United States Patent Application Publication US 2007/0054278 A1 - sequence listing, part 88

SEQ ID NO: 96796 - DNA, 184809 bp, Homo sapiens
cttgagcccaggaggcagaggttgcagtgagctgagatcatgccactgcactccagcctgggtgacagagtgagaccctgtttaaaaaaaaaaaaaaaaaaaagatcatgccactgcgctccagcctgggggatagagtgagaccttgtctcaaacaaacaaacaaacacacaaaagaaaatcttcagcaaaacacctatagtgatagagcacactcatgtagtggttatgcttgaaaactttatgatagattgcttgggtcccagtctcagctccagaacttacttctatgtgccgtagttagctcatctgcaaaatgaggctaatactagtatctacctcatgtggctatcttttttttttttttttgatggaatcttgctctgtcacccaggctggactgcagtggcgcgatctcggctcactgcaacctctgcctcctgggttcaagcaattctcttgcctcagcctcccgaatagctgggattacaggcacccaccaccacgcccggctaatttttttgtatttttagtagagaccgggtttcactgtgttggccaggctggtctcgaactcctgacctcgtgatctgcccgcctcagcctcccaaagtgctgggaatgtggctatctttaggagtaactgaaataatatattggatgcgctgaaaacagttcttggcacacagtgacagctgtacgattgctagccatcatttctatcatcataaattagtttaaaaggtaagagatctataggcatcgacaaaaaagatctctaagtacaatatatcactggaatattgttaaatgaagatgtaaaatgcaaacatgcaaatagtaatattccatttatatatatatcaatacaaagcaaagcatttctgcatgagaatgccacactttgctatgatgggcctgaaagtgggaacaagaaaatccagcttcatttggattatgcccatttgaggaaactgcgacttaagatgtttaaattaagtaactcactcaaggtcatactttgtatggagtaagttgtgattcaagttcaagtcagtttgcctgtacagtccatgatcaggcaggagaatgcaaaggaaaggagtgaggggtgtcaggcactgaaggagaggaaaactgggcaagtcttggaggcctttcaagaggtaatgggaaacaaggcatagctggggcctgagaaggagccaagtgccaaatggctcctggaaggtttactcagaagctgctgcaatggcctgagtggccagaaggaaggcagagcagtggtgacaggctggagaaatgcctgagcccagagaccagtcctgaccaagaagagcagtgcagggaggaaaggaggaagatgatgctccactttgggtgacagggtagatggtcagggatcaaccaaccgcaaacacagaggagaaagggtttggtggggaggcatggtgggggggtggtaatgcaagtgagttcagtgttgaacacattgagtttaatgtagcaagggacatccaggcagctgcaatacaataaaataagagaaaatacaaatctggagggagagcgaggttggaatcagaagtcactaacacaggcatatgaaaaggtgctcaacatcactgatcatcagagaaatgcaaatcaaaactacactgagatatcatctcactccagttaaaatggcttctatccaagaggcaggcaatcacaaatactggcgagaacgtggaaaaaaggcaacccttgtacactgttggtaggaatggaaattagtaaaatcataatggagaacagtttggagtttcctcaaaagagtaaaaattgaactaccatatgatccagtaatcccactgctgggtatataccccaaagaaaggaaatcagtacattgaagggataactgcacacccatgtttgttgcagcagtgtttacagtagctaaggtttggaagcaacctgagtgtctaacaacagatgaatggataaagcaaaagtagcacatagacacaagggagtacacaaaaaagaatgagggccaatgttgtctgtctgccaagacaacagaaacatgatcatttgcaacaacgtggatggaactgcagatcattacgttaagtgaaataagccaggcacagagacaaacatcacatgtcctcacttacttgtgggatctaaaaatcaaatcaattgaactcatggacatacaaagtagaaggatggttaccagaggctgggtaaaaaaaaaaaaaaaaaaaaaaaaaaaaaaaaaaaaaaaaatgaataagacctactatttgatagcacaatagggtgcctatagacaataataacttcattgtatattttacaataacttaaagaatgtaattgtattgtttgtaactcaaaggataaatgcttgaggggatggatacccctttctccaacgtgcttatttcatattgcatgcccgtatcaaaacatctcatataccccataaatatatacacctatgtacccacaaacattttattttatttatttatttatttttgagacggagactcactctgtcgcccaggctggagtgcagtagcgcgatctcggcacactgcaagctccgcctcccgggttcaagagaattctcctgcctcagcctcctgagtagctgggattacgtcaccatgcccagctaatttttgtatttttagtagagacgaggtttcaccatgttggtcaggctggtctcgaactcctgagctcatgatcctcctgcctcggcctcccaaagtgctgggattacaggcataagccactgcgcccggccccacaaaaactttaaaaaataattttaaaaaattaacaaaagaagtcactaacaataagaatgataattaatatctactgaacagactgtatcaggctctgttctacactctgtacatgcacggtctatgaacttatctaatcttcctaacaacactctgatgtaggccgattttatttcattaattttttttgccagagaacagatttaatacctaatgaagtaggccccttttattttatattttattttatgtatttatttttgagatagagtctcattctgtcactcaggctggagtgcagtggcacgatctcagctcactgcaacctccacctccagggttcaagcgattctcctgcttcagcctcctgagtagctgggattaccgtttctcgctctgttggccagactggagtgcagtggcgggatcccggctcactgcaagctccgccttccggtttcacgccattctcctgcctcagccaccaagtagctgggagtacaggagcccgccaccacgcccagctaattttttttttatttttagtggagacggggtttcaccgtgttagccaggatggtcttgttctcctgaccttgtgatccgcccgcctcggcctcccaaagtgctgggattacaggcgtgagccaccgcacccggctgacctaaaacttttaaagcctcactcagccccactcaagcttgctttctctagcatctagaacctagaaaagatcaaaacaaccgcttgcccagggcagcactaattggccgggtcatccggtggttttattgctctgtaataaggttacctaagttctttcttgaattttattttattttatttatttatttatttttgagacaaagtttcactctgtcgcccaggctggagtgcagtggtgcagtcttggctcactgcaaccttcgcctccctggttcaaacaattctcgtgcctcagccttctgagtaactgggattacaggcgactgccaccatgcctggctaatttttgtctttttagtagagatggggtttcgccatgttggccagactggtctcgaactcctgacctcaggtgatccgcctgcctcggcctcccaaagtgctgggattacaggcttgagccactgcgcccggcctttactttaatcattacgcacaaggatttccatctgcctttttttttttttattattggagacagagtctcactctgttgccaggctggagtgcagtggcgcaatctcggctcactgcaatctccgcctcccaggttcaaatgattcccctgcctcagcctcccaagtagctgggactacaggcgcgcgccaccatgcctggctaattttttgtattttagtagagacaggatttcaccattttggccaggatggtctctatctcctgacctcgtgatctgcctgccttggcctcccaaagtgctgggattacaggcgtgagccaccgtgtccggcctcctgtctgccttttatcttaccctatcactagtggctgcctgaagatctcagaacagcatctataggagatgcgcatccgatcctaggaaggatttctgatgctattttatctttagggacttgttactgggcttctgtctgccaagacaacagaaacgtggcctagcaaacaattccttttggttggaaggcagtctcgctaggggcatttgagggccttgcctaggacataggaccagcagtatttcacagctactacagaaaataccccagactttggcccataagatctcttgtattatactgcagatctaccaatggcactcagacccagaggcagatgcaatctccggttcgcgggttgggagcagttttgtggaacaaagacaccgtctagttctgacatggtacagggaggaaacacacagaggttaagacttagacaagaggccaggcgcggtggctcacgcctgtaatccctgcactttgggaggctgaggcgggaggatcacttgaggtcgggacttcgagaccagcctgaccaacatgaaggaaccccgtctctactaaaaatacaaaattaggccgggcgcggtggctcacgcctgtaatcccagcactttgggaggccgaggcgggtggatcacgaggtcaggagatcgagaccatcctggctaacacggtgaaacaccgtctccactaaaaaaaatacaaaaaattatccgggcgtggtggtgggcgcctgtagtcccagctactccggaggcttaggcaggagaatggcgtgagcccgggaggcggagcttgcagcgagccgagatcgagccactgcactccagcctgggcgacagagcgagactacgtctaaaaaacaaaacaaaacaaaattagcctggcgtggtggcgcccgcctgtaatccagttactcgggaagttgaggcaggagaatcgcttgaacccgggaggcggaggttgcggtgagccgagatcgcgccattgcattgcactccagcctgggcgacaagagcgaaacttcgtctcaaaaaacaaaacaaaacaaaacaaaacaaaacaaacttaagcaaggccaggtgcctgggtcgaggcagagctgaggcttatccgggcatcctctcacttagcagtctttcttccacaacacactgatccccgtgtttggcgtattgtggagagttgcagggcattcctttccctggacataaatttccacgtctaccggtgacatcaagtcacaagaggccagaacgcagttttcaagtcagaatcttagccagaaacgaagttggcctcttgccaaggagccaaataactggatggacgctcgcacccgcttcgcagacaggcgcacgcagtggagaggtgaagtgatttctgcgtttgggtagagcggcgtcggctttaggtgtccacggtgcggaagccagccgttttccaaaatgcaatacctctaatggtccctcacgaacagcagtccccaaatacagccgctcttggacctcgacgaaggggatgccactaacgctgtggggagagcgcacggtccccgccggcgcagggagccgggggtagagcagagggcgtcgcgtccccatcccagccccagcgcgggggctggagcagtcgagagggcggcctcccgccgcctagaggcgccggtccgctcgtccgctctgcctgtgccccgtctctatggcggccccaacggccgtccaggacgtggagcgaaatgagctcgggcgctgacggcggcggtggcgctgcggtggcggcgcggtcggacaagggcagtcccggggaggacggtttcgtcccgtcggcgctggggacccgcgagcagtgagtgtgacgctgggcaggggaggatgagccgtgccgccctgcctgggccccgagaargggacggcggggtggagacccggggctcagggacagggagaccctcgggggcgtgacgggagcagggccacctggcggggggcttacggggatttcaaagagtggaatccctaggggtcgccctacgcggttaaccgacgtttcaagggattggagcccaaggggcttgtgggtgcgggacaggctttggctcctgggaggccttttgggagtctcgaacctgagggccaggcttgggggaaasggggagagggcgaggctggcgaatagggctggtcggcgagagtgagagaccgagggagaagtgctgggcctgggagccgaaaaggctgagtaggaggggagggatgtgggagctggaagtggggtgggaatagcggatgacccgaggcgggagcggggagatagtgggggatcttggggtgaaagaaagcgatctgacctcaaacagacgctcaggaattattaaatgaattaatgtgggtggatgaatggctgcagggaacagttggggagaggtaaattggcgggatgagagggagcagggattctagagaatcattgtaggaaaagagacggcaaatgaaaaggattcagagggccgggtgcgtggtggcttacgcctgtaatcccagcactttgggaggccgaggcgggcggagcacaaggtcaggagatcgagaccagcctgaccaacatggtgaaaccccgtctctactaaaaatacaaaaattagcggggtgtggtggcgcacacctgtagtcccagctactcgggaggctgaggcaggagaatcgcttgaacccgggaggcggaggttgcagtgagccgagatcgcgccactgcactccagcctggtgacagagcgtgactccgtctcaaaaaaagaagaaaagcgtccagagaaaatttaaacggagggctagaagactggaataggcagagacaaatagcacaggaaagagactgtgtgcctgcacacttgagaccagatgtgcttgtttcatcaagttttgaacttgggtcagggacttagggatacgtggacaaatgtctttgtgtttttttaggctaaaacttattgttgtgcatcagatattgtcctaaatgctttacatgtacagtataaacgtattctgcttgcccatgtatttccttcttttaactcaaggacgttaaaagattgaactatgtgtatttattaataacactagtgatgtttaaacctctgtcataaatagctctgtaatgtattagaaacatacatttaattcataatacagtttaattcaagagtcttgctttgcatttcattgtttacatagttgggatgctgtctatgagagagaactgcaaactttccgagaatatggagatacaggtgaaatctggtgagttaggaaaagaatcaagttataatctagaagattatatgtatatgtgtgtgtgtttaaaaaaatacgtatatattcgccgggcgcggtggcttacgcctgtaatcccagcactttgggaggccgaggcaggcagatcacgaggtcaggagatagagaccatcctggccgacatggtgaaaccctgtctctacgaaaattagacaaaaaattagccaggcatggtggcgcgcgcctgtagtcccagctacttgggaggccgaggcaggggaatcatttgaacctgggaggcggagattgcagtgagctgagatcgcgccactgcactccatcctgggcgacagagtgagactccatctcaaaaaaaaaaaatgcatatattcaagtgcttatacccaaagaaagcctaaaaatcctgggaaccctggattaagtctggctttagtgggtagatttaaagtatgtctcttcttttattcttttttaattttttactttttttttttttttagagaggtggggtgtcattctgtcatccaggctggagtacagtggcatgatcatcataactcgttacatcctggacctcctgggcccaggtgatcctcccgccacagcctcctgggtagctgggactatagctgcatgccatcatgcccagcaaattttcttttttgtagagacagggtctcactgtgttacccagggtggtctcgaactcctggcctcaagcagtcctcccaccgtggccttccaaagtgttgggagaatgggtgtgagccctcttttaatatctcacatttacgtttgatgacagcatttcaccctatagttgtcctttgtcaataaacaataaaattctgagacaccaacacatacaactgttaatgctgatatagagaaatgttagtaaataacatactgaccttgtctattctgttgtattcctggaggtggtttctcctaaattacagtagagacaaagctgaagcagtcacagatgttttcactttcaaataagagtttgagcatatggtataaatagcttaaatggaatatagtggtgacttttgctctgtatccctcagttatttgactgattctctctaacaggtttggagaagagagtatgaatcractaataaggtggatgcagaaacacaagattccactggatgcttcagtgcttgatattggaactggaaatggtgttttcctggttgaacttgttggtacttttagtatttgtttgttaaagacaaattttaaaaggaaaatttttaaaggccctgcaattgaggatattaaccatctaaatataaaatagtaaagcagtcatacttggagaagtcagatagtacaaaagggaggctacatggattgtgagagaacctaggcaatctgagtcctagtcttgactcttttggctatagycttaaccttgagtaagccacttaatttttctaggcttctgttctttcctaagggttgtgactaggtgattgctattggtttcttgtagctcaaaactctagaaatgcwtatatatatatatatataaaatatatatatatatatataatwgatgaccttttgcaattccagtaggacatacgtatcttatcttataggtaagcatatggtttgaaaagygcattttgtccatggaactgtgtttcggtaaacattccactgctagctaaaccatcactgttgtatgcctgcagtgtgctcttgctatgctgtgtgctgtggaggaattataagacttaggcttcatcctagataattttacagtcttaattagtacagaaataaacataagagtgaaatttgttaagtaaccaccacatgccaagcctcatgtttggcattggcaacaggaaaatttagactttgtgcttgaattgtttacattacaatagagtatggactgacatatggacagttgtgccatcacttgatgcatgcagtaatacactgaatatagaaaagagggtgattaattttggagtggaggggtagggaagcatcttggaggagtaaatatccaagttgggtggaaatttcagggacagtttggtgacctagtggcgtgtaaagagggagaagatttcaactaatggaaatattatctaaaggcctgaaggctgaagcagtattttatgttctgggcctgtaaataatttgataaattgaaatacaaagtatacgtggggatggacagacatgaggattaagttaaagataggaaccatattatgctttgccatgcttaagaccttcgattttgcatttaggctatggggaattgttaaaatgtttttagtagtggaatatgattagaagaacttgaaataacccttcttgaaacattgagatatagtgtgtgtacattaaagtgcacaaatcagaagtatacagctaagtgaattatcagaaagtgaatacatccacataacaatcacctggtcaagatgtaaaatattatagaactctagaaattccccttgaactctctaccaattattactcctttcttcctttttttttttttcaggctttgtcacccaggtaggagtgcactggtgagatcatggcacattgtagcctcaacctctcaggctcaagcgatcctgtcgcctcatattttgattttttttgtagagacaaggtttcactatgttgcccaggctggccctccttcctttttaaaagtaaccactatctaccaatcatgaacaaaagatgagttttaacatcagattaatttgcctgtttttgaaggtataaatgaaactctttagggtgtgctattcctggtgtctttcaggcttttttttttttttttttttttttgagacagagtcttggctctgacacccaggctggagtgcagtctcacgatcttggctcactgcaaccttcaccacctgggttcaagtggttctcgtgcctcagcctcatgagtagctgggattacaggcgcacgccattatgcctcgctatgtagttcatttttattgccatataagattcctttgtggctgggcgctgtggctcatgcctgtaatcccagcgctttgggaggccaaggcaggtggatcacaaggtcaggagatcgagaccatcctggctaacacggtgaaaccccgtctctactaaaaatacaaaaagttagccgggagtggtggtgggcgcctatagtcccaggtactcgggaggctgaggcaggagaatggtgtgaacccgggaggtggagtttgcagtgagcggagatcagcctgggcgacagagtgagactccgtctcaaaaaaaaaaaaaaattcttttgtacaattatatcagtttcatttattctttctttacctgtataggttcttttgggttttaatagtttactggtagaggctaatgatttatactttgagattaatagcttgtagattattttcttttctttttctttcttttttttttgagatggagtttcactctgtagcccaggctagagtgcagtggtgcgatctcagctcactgcagcctctgcttcctgggttcaagcgattttcctgcctcagcctcctgagtagctaggattacaggcgtacaccatgcctggttaatttttgtatttgtagtagagatggggttctgctatgttggccagctgttctcraactcctgacctcaggtaatccatctgcctgcctcagcctcccggagtgctggtattataggtgtgagccactctgcctggcctgaacttcttttttttttttttgagacggagtctcactctgtcccccaggctggagtgcagtggsgcgatctcggctcactgcaagctccgcctcccggattcacgccattttcctgcctcagcctcctgagtagctgggattacaggcacccaccaccacgcctggctaattttttgtattttcagtagagacggggtttcactgtgttagctgggatggtctcgatctcctgacctcgtgatctgcccgtcttggcctcccaaagtgctgggattacaggtgtgagccaccacgcccggccctgaaattcttaattgaagtgtagtttatgtagaaaggtgagcataagtggtacaaaatgaaccccttgtgttattcaccaacctgaccaaaaaataagacatttctagtaccataggagcttccttgtggcccctcccactccttcccttctaaaggtgaccactgctgtcacttctatcatcatatagtaggctgtttttgatattaactgtagtagcttcttacggttttaatttgcatttctctaatgagtaatgaatgatgttgagcaccttttcaggtgcttgtttgccacttgtgtatctttttttttttttttttttttttgagacagagtctcgctctgttgcccaggctggagtgcagtggcatgacctcggctcactgcaacctccacctgcagggttcaagtgattctcctgcctcagcctcctgagtagatgggattacaggtgcgcgccagcacgcctggctaatttttttgtatttttagtagacatagcgtttcacyatgttggctaggctggtctcgaactcctgacctcaggtgatctacccaccttggcctcctgaagtgcttggattacaagcrtgagccaccacgcctggcctgtttatcttctttagtaaaatgtctcttcagatcttttgcccatttttaaattggattgtttacttattaagttttgacaatttttaacgtattctggatataagttcttcaccaggtacaagatttgcagatgttttcttctattctttggcttatcttttcattcacttaacagtatcttctgaagagcagttcttaattttgatgaagtccaattaattttttccttttttggatcatgcttttgttgtagtattaaaggactctgcctaacacagggtcacttagaacttcttctgtgtttttgtttaaagttttaacactttaccttttacattcttttttttttttttttttttttttgagacggagtcttgctctgtcacccaggctagagtgcagtggcatgatcttggctcactgcaacctctgtctcctggtttcaagtgattcttctgcctcagcctcccgagtagctggggctacaggagcgcaacaccacgcctggctaatttttgtatttttagtagagatgggctttcaccacattggccaggatggtctaaaatgcctgatctcgtgattttccccccttggctccccaaagtgctgggggtgcaggggtgagccaccgcgcccagcctaccttttacatttagacctttttttttttttttttaagatggaatcttgctctgtcttccaggctgtagtgcagtggtgtgatcttggttcacttcaacctctgcctttggggttcaaagaattctcctgcctcagcctcctgagtagctgagattataggtgtgtgtcaccatgcccygctaatttttgtatttttagtagagacagcgtttcaccatgttgtcsaggctggtcttaaactcctgacctcaggtgatccacccatcttggcctcccaaagttctgggattacaggcgtgagccaccctgccctgcctatttttatgtttttaatttcattgagttctgttctttttttttttcttcctgattttactttgttcctttttttactttcttaaggtggaagcttaggttattgatttgagacttttctaatgaaattatttaatgctatgaatgctatgaatttatcagtaagcactgctgcatcccacaaattttgatatgttatattttaaaaaattgttctacacctcacttgaatttttttttaaattgttgatttgttgtatttttattcagtccaaaatattttctaatttttctaattttttttaatccacgagttatttagaaatttgtttaatttccatgtttttgggatttttctgttatgtttctggtacagatttatagtctaattcagttatagtcagataacatgccttatatgatttgtatgatttcaatccttttaaatttgttaaggtttgttttaagacccaagatacagtgtgtcttggggaatttttcatgtgaacttgaaaaatgtatgtattgccaggtgtggtggcttacacctgtaatcccagcattttgggagactgaggtgggcagatcacctgaggtcaggagtttaagaccagcctgaccaacatggagaaaccttgtctctactaaaaatataaaattggttgggcgtggtggtgcatgcctgtaatcccagctactcgggaggctgaagcaggagaatcacctgaacctgggaggcggaggttgcggtgagccgagattgcaccgttgcactccagcctgggcaactagagtgaaactctgtctcaaaataaaataaaataaaataatttagccaggtttggttggtggcaagtgcacctgtagtcccagctacttgggaggctgaagtgggaggatcacctgagcctgaggaggtcgaggctgcagtgagccatgattatgccaccgcactccagcctgggtgacagagtgagaccttatctccaaaaacaaaggaaaattcatatgtaagtttttgtgtgtacatatgttttcacttctcttgggtatttacttaggagtgaaattgctgggtcatacgccagttaagcatactcggtaagtttaaccttttaaggagctgctggaccattttccacagtggctgcaccattttaaatttccatcagcaatacatgagagtttaaatttctccatattcttggctgggcacagtggcttatgccggcaatcctagcactctgggaggccaaggccggtggatcacttgaggtcagcagtttgagaccaccctggccatcatggtgaaaccctgtcgctaccaaaagatacaaaaattagccagacgtggtggtgtttgcctgagtagtcacagctactcaggaggctgaggtgggagaattgcttgaacctgggaggtggaggttgcagtgagccgagatggccccactgcactccagcctgggagacagagtaagactctgtctcaaaaaaaaaaaaaaaaaaaaaggtttttccctatatcctcaccaatactttttattatctatcttttaaattatagccatcctagtggacatgatgttcagcccctttttgtttagtttttacatgttatattgttttccatccttttaacttaccttattattatatttgaagtgaatttcttgtagccagcatatagttggtagttatttttatctattctaacaatctctaacctttaactggtgtatttagaacatttatgttcaatgtgattattgatacgtttggatttagktctacattttattgttttcccttttttacctctgtttttttttttttgagacagagtttcactcatgttgcccaggctggagtgcaatggagggatcttggctcactgcaacctccacctcctgggttcaagtgattctcctgcctcagcctccctgagtagctgggattacaggtacccgccaccacacacggctactttttgtatttttagtacagacggggtttcgccctgttgtccaggctggtcttgaactcttttttttttttttttttttttgagacggagtctcgctctgtcgcccaggctggagtgcagtggcgcgatctcggctcactgcaagctccgcctcccaggttcacgccattctcctgcctcagcctcccgagtagctgggactacaggcgcccgctaccacgcccggctaattttttgtatttttagtagagacggggtttcaccgtgttagccaggatggtctcgatctcctgacctcgtgatcctcccgcctcggcctcccaaagtgctgggattacaggcgtgagccaccgcacccggccggtcttgaactcttgacctcaggtgatctgcccgcctcagcctccctttgtgctgggattacaggcttgagccactgtgcctggccttacctctgttttttattcttctctttttcctttcctgctggtgttggtttatttgaacatttgttagtatttcattttaatttatgtgtatcttcttgaatatatctctttgcgtatggctgttttagtggttgctttaagcagttgactgtgtcttttggtgtggcttttctagtggttcctgtgtagattacaatatatatagttgtcaaaatctccttggaatcagtattttaccactataagtggaatgtgaaaaccttatcatgttgggttcttgatctttcacctttatgttgtagttgtctttactattacctttatgttgaaaattccattagataatattatgatttttttcaaacattttaaggaatgcactaggagaagaatatttaattatattcacctagatatttatttcacctttgtattctggatctcctgagctttttttttttctttctgtctaagaaattcttcttggaaattattttagagagggttttcttgcaacaaattttttttgttttcctttacctgagaatagctttatttcaccttcattcctaaggagtgttttttttttttttttggctgaatatagaatcttttttttttttgagacacagtctcactctgtcacccaggctggagtgcagtggcacaatctcacaatctcggctcactgcaaccttcgcctcctgggttcaagcgattgattcttctgcctcagcctcccgagtagctgggattataggtgtccaccaccacacccggctactttttgtgtttttagtagagatggggtttcaccatgttggccgggctggtctcgaatttctgacctcggatgatctgcctgcctcagccttcaaaagtgctgggataacaggcgtgagccaccgcagccggcctgaatatagaattctgagctagccgtttctttcagtactttaaaaatgttatgggctgggcacggtggctcacgcctgtaatcccagcattttgggaggccgaggcgggcagatcacgaggtcgggagatcgagaccatcctggccaacatggtggacccccatctctactaaaatacaaaaaattagccgggcgtggtggcatgcccttgtagtcccagctactcaggagactgaggcaggggaatagcttgaacccgggaggcgggggttgcagtgagccaagatcgcgccactgcattccagcttggcagcagagcaagactccgtctcaaaaaaaaaaagttacgtcacttgtttttgacttccatgttttctcatgaggaatctgcagtcatttgaattgttgttttcctatgaatgcatcatttttctagatgcttttaagattttttttctttgtcttttgttttttgcagtttgcttatgatgtgtgctgtggcttggatttctttggcttatcctatttggtgttcactgaactttttacatctgtaagcttatgtcttttgccagatttgcgatatttctagcttttgttttttctattttttttttctgtattactgtctttctcctttcattttgggagtctatacacatgaaatgtcaatttttytgttgctccacaggtccccgtgaactccacaggttcaattttttaaaagtcatttttgtctttgtcggccaaatgttatatttcaattgatctgtcttcagattcactgactttttctctgtcaccttcattttgctgttaagtccacacattgcaattggctgacatgtcttaattttttaytgcatgatttctttatttaccattacgatttattttttgtaggaggtagttcatttgtctgaatggtttttcacaatgtgaattttctaattacatctctatagtatttaacatgttttctgtccctcgtgttgtctgtacgttggaaattagacctaaattaagggtcagcaaaccacagtctacgggtcaaatctggacctcctttgtttttataaatatttgttggaatacagccacatttattcatttgcatattgtctatggcagcttaagtgttgcattggtagagttgactggttgtaacagagactgtatggctggcaaagcctaaaatatttattctgtttctttttgttttttgagacagagtcttgctctgtcgcccaggctggagtgctggagtgcagtggcgtgtgatcttggctcactgtaagctctgcctcctgggttcacaccattcttttgcctcagcctcccgagtagctgggactacatgtgcccgccaccacgcctggctaattttttgtattttttagtagagacggggtttcactctgttagccaggatggtctcgatctcctgacctcaggatccacccaccttggcctccaagagtgctgggattacaggcgtgagccaccacgcctgactattctgtttctttttttttttttttttttttttgagatggagtctcgctctgtcgcccaggctggagtgcagtggtgcagtcttggctcactgcaagctccacctcccaggttcacaccattctcctgcctcagcctcctgagtagctgggactactggcacccgccaccacgtccggctaattttttgtatttttttagtagagacggggtttcactgtgttagccaggatggtctcgatctcctgacctcgtgatccacccgcctcggcctcccaaagtgctgggattacaggcgtgagccactgcgcccagccactattctgtttctttatagaaaatggttgctggctgggcatggtggctcacacctataatcccagcactttgggaggccaaggtggaaggtttgtttgagctcaagagtttgagaccagcctgggcaacatggtgaaaccccgtgtctactaaagacacagaaaaatagccaggtgtcgtggtgtgtccttgtaattccagttactcaggaggctgaggtgggagaatcgcttgagcctggggaggttgaggctgcagtgagctgtgatcacgctgttgcattccagtctgggtgacagaaggaaaccctgtttccataaaaaaaagaaaaagattgctgaccctggattgagagatttttattagatttttttttttggcaagtaaacttattaggtgttggtgtatatttgcatatgtggcgtagaatatttggtgtagaacattcatctttttgttatattaacagccattgaagaccatttcttatacgtactactttttcattgatcagctacatttttgatggttacttttcctacatttttgatggatgtttttgctatatcattttaggttactatttttcttttactatcttctggcttccattctttatcacttattgttagctataagccttatcatcatccttttaaaggtaatctgtcgccttgtatcccacatccctactccctggatgtttttgagatttttctgtttttctttttttttttttttggtacggagtctcacgccgtcacccaggctggagtgccatgtgccatctctgctcactgcaacctctgcttccggggttcaagtgattctcttgcctcagtctcccgagtagctgggattacaggcatgtgccaccacacctggctaatttttgtatttttagtagagacggggtttcaccatattggccaggctggtctcgaactcctgaccttaggtgatccgcctgccttggcctcccaaagtgctggtattacaggcataagccaccatgctgagctgatttttctgtttttgtttttcatcagatacactatgatgtgtctaggtggagtttgctttcatctgccttgaatttatactgtttcttgaatctgaggcttgggtcctttgtcactattggagtattcttagccatatgccattttttcttctgccctattctcatttcctttcctctcagattccacatatggattgggtatacatatatgtttgtgtgtatgtatgtgtgtgtgtgtgtgtatgtatagactgtgtgttaaaattgtctatacatacacactataacctccaactccggagctcactataacctccaactcctgggttcaagcgattctcctgcctcagcctcccaagtagctgggattacaggcacccgccaccacgcctggctaattttgtgtgtttagtagagatggggtttcaccatgttggccacgctggtctcgaacccctgtggatatagagggttgtgtgtgtgtgtatgtatatatagtcatacactacataacaatgtttcagttgaaatgtaccacatatacaatggtggtcctataagattataatactgtatttttaccctttctatgtacagatatctttagggctgggcacagtggctcatgcctgtaatcccagcactttgggaggccaaggcaggtggataacttgagctcaggagttcaagaccagcttgggcagcctggcgaaaccctgtctctacaaaaaaaaacaaaaaacaaaaaaacaaaaattaaccaggcatggtggtggcatgagcctatccagctacttgagaggctggggtgggaggattgattgagccaggaggcaaggctgcagtaasccatgattgtgctactgcactccagcctgacttacaagagtgagaccctgtctcaaaaaaaaaaaaaaaatctttaggtacacagataccatcgtgctacagttgcctccagtattcggtacagtaaaatgctgtacaggtgtgtagcctaggagtaataagccataccatgtagcctaagtgtgcagtgggctctaccatttaggtttttgtaagtacactccatggtgacacatgactgtgtgtgtgtatgtgttacatcttatattctgtgctatattctgtctttttttctttytttttttttttttgagtcagagttttgctcttgtagcccaggctggagtgcaatggcgcgatcttggctcactataacctccacctcctgggttcaagcaattctcctgcctcatcttcctgagtagctggaatttcaggtgcccaccaccatgcctagctaatttttgtatttttagtaaagaggggtttcaccgtgttggccaggctggtctcaaactcctgacctcaggtgatccacctgccttggcctcccaaaatgataggattacaagcttgagccaccatgcccggcccatattatgtctttgatattctttcctgtttttaattttccattcttttgtcattctgtgtataacagggatattttcttctgactgttctttgctgatttttttttattttttgctgtgtgtagtctgctatcaagcccacccttgaacttcctaattactgtatttttcaattatgttattttttattttattttttttgagacaagagtcttgttctgttgcccaggctggagtgcagtggcatgatctcggctcactgcaaactccacctcccgggttcaagcaattctcctgcctcagcctcccgagtagctgggattacaggcactcaccaccacaaaattagcctggctaatttttgtgtttttagtagagatggggtttcaccgtgttggccaggctggtcttgaactcctgacctcaggtggtctgcctgcctccgcctcccagagtgctaggattataggcgtgagccaccgtgtctggccctgtttgtttctctgttgtggttttcagttctctgctagaattctcccacttgtcattgtcatttctgtcagttgttttgaaatctttttctgaaaattcatttatttgggtctcctgtcgggtctgtttctaaagtcaatttctccccttgggtttggttgtttccttgaatgtctgctcatttttgggtgccagaaattgaatgtgaaagacattggagatagtttgaggccctgagtgatatctctagaaacctaaaacatctatttgtgatttttataagttgtactagaagaataaacaggcatgggaaaagaaggaaccggtaggccgaggtgggcggatcacgaggtcaggagatcaagaccatcctggctaacacggtgaaaccccatctctactaaaaatacaaaaacaaaattagctgggcgtggtggcgggcgcctgtagtcccagctacttgggaggctgaggtgggagaatggtgtgaacccgggaggcagagctttcagtgagccgagatcgtgccactgcattgcagcctgggcgacagagcgagactctgtctcaaaaaaaaaaaaagaaggaaccggtaagaatcagttaatagactcatcctgggttctaggtctcccagagaagcagttaagggaaatggggagaaaatctcaaggaataaggagggatacagctaaaagggtggaaggttggcatcaaaaaagagaatattagacctttagattaaaaacaaaaataaagggagcaatctacctgtagaaagtaattggtatacttgttccttgagtttagattaggaatcagttacttagggttaaaaagacttggtaggtcttcatggatttgatgtggcagtaggttaagttttaaaggaagtaaccatttagtaaatggtgaagagcaggaagggaatttcaggctatactgtactttgtaacttactttgtttttcatgtttcctttgaaattatttttagtctcattggtctaaaaatgtttagtgttgttagggggtgtgtaaagaccagaagcttccatgcttttgccatagacactacacagcctagatgggttaatggctagcaaacaccaaaactctcaagtccattgagttaaagaaacttcttggggatactgatacctgcccaccctacctcacaggttttctgtaaagatctaatgggatgtatgaaatatttttaaagacgtaaaagtagtatacaaatgtagaatggttaaaaatcacatggctggtggagaattgcataatgtataattacactgaagggaaaatttaaaaattgatagcttattacatttgcattgattttgttaatataatttaattgggttaagtaaaatatatgacaaatttatgtgtgaattggaaattatcakcatcaaaagttaatgttacctttttttgcctgagggcttatacatatattttcattatttttgagaacatgaatttccttttgaaaaagagataaaatattatgaaaacaaaggtattgtcatagwatatacactytcagtttttatttagagtctacaataaaatttaagcattatgaattggattatatgtcattttctctacatcaaaaataagacatcaccastcctaaaggaatattataattcataaacaaaacattatattaaaattttatactaaagtataaaattatttctctctaggcaaaatttggtttctctaatattactggaattgattactctccttctgcaattcagctttctggaagtattatagaaaaagaaggtttatctaacattaagttaaaggtaactattatttatattactataatatttacaatagaggttaaatgtttctagagcatattaattgacaggttttaaactcataaattagggatcaatcataaataatacaaattgaaacatttttaaatagccatattaaaaatttaatctagttggtttggggaaattattttttcttctgtatgtttgttcatacactactgctcctgatgtttgcaaatacacataatacttaactatggattaaccagatcaaaagggttttyyttttttttttttttttttttttttttttgagactgagtctcgctcagttgcccaggctggagggctggagtgcggtggcgccatctcggcttactgcaagctccgcctcctgggttcatgccattctcctctctcagcctctgaagtagctgggactacaggcgcctgcagccacgcccagctaattttttgtatttttagtagagatggggtttcaccgkgttagccaggacggtctcgatctcctgatctcgtgatctgcccgcttcggcctcccagagtgctgggattacaggcgtgagccaccgcgccctgcccacatcaaaaggttttaaatgcatcaagtggtataatgtcaccaaaaatcatttagtttatttttgtgtcctatgatctgtgagatgatgattcctaaatttacatttctagcccaggcctctcttctcagctctagagttatagacaggcatgccctgtttttttggcttcccaaatggtatgttttttgacaaatcaaaggtttgtggcaagcctgttgagccccatctgttgacaccattttttcaacagcatgttctcactttgtatctgtgtgtcacattttggtaattgttgtaatatttcagagcttttcattattattttatctgttatggtgattcatgatcattgatctttgatattactattgtaattgttttggcgtgccatgaactgtgcccacgtaagatggtgagcttaattgataaatgtatgttctgtctgctctacctactggctggtctcctatcttcctccctcctcctcaagcctccttctttcttgggacacagcaatattgaaattaggccaattaaaaaccttacagtgggacaggcgcastggctaatgcctgtaatcccaacactttakgaggctgaggtgggcasatcactttgaggtcaggagtttgggactagcctggccagcatggtgaaaccatatctccaccaaaagtacaaaaaatagccrggtgtggtggcgggcacctgtagtcccaactacactccagcctggrcracagagggagactgtttyaaaaaaaaacasaggcaggaggattgcctgaacctggaaggtggaggttgcagtgagctaagattgtgccactgcactccagcctgggtgacggggagactgcgtctcaaaaaacaaaaataaaaaaacaaggataaaaaataaacaacccccacctcaacacagtggcctgtaagtgttcagttgaaaggtagagtcacacatctctcactctaaatcaaaagctagaaatgattaagcttagtgaggaaggcatgttgaaaaccgcgataggccaaaagctaggcctcttgtgacaaaatttagtcaagttgtgaatgcaaaacaaaatttctttaaggaaattaaaagtggtattccagtgaacacatgaatgatgagaaagtcaaacagccttattgctgttacggagaaagttttagtgctccagatagaagatcaaaccagccatagcattctctcaagccacagcctaatccagagcaaggccttgactcttttcaattctgtgaaggctgagagaggtkaagaagctgcagaagaaaagtttgaagctagcagtagttagttcatgagatttaagaacagaagccatcttggctggacacagtggctcacgcctgtaatcctagcactttgggaggccaaggtgggaggatcacctgaggccaggagtttaagaccagcctggccgacatgctgaaactgtctctactaaaaatacagaaagttagctgggcatggtggtgggtgtctgtaatcccagctacttgggaggctgaggtaggagaaccgcttgaacctgggaagcagaggttgcagtgagccaagatcgcgcaactgcactccagcctgggcaacagagcgagactccatctcaaaaaaaaaaaaaaaaaaaaaaaaaagaaaaagaaaagaagccatctccatgacataaaagtgcaagataaagcactaagtactgatgtagaaggtagaaggtgtagcaagttagctaggaaataaccagtgaagctggctaaacaacacacagatttccaatggagatgaaatagccttatattggaagaagatgccatgtaggagttacatagctagagaggagaagtcagtgcctggctttaaatcttcagaggagaggctgacattattgttagagggggctaatgcagctgatgactttaagttgaagccaatgcccatttcccattccgaaaatctgagggcccgtaagaattatgctagatcttctttgcatgagctctataaatggaacaacaaagcctggataacggcacatctgtttacagtatggtttactgagtattttaagcccatttttgagacctactgccccaaaagaaaaagactcaaagtattactgttcattgacaatgcatgaattcacccaagagctctgatggagatatataagaagattaatcttgtttttttttgagacggagtcttgttctatcacccaggctggagtgtagtgactcgatctcagctcactgcaagctctgcctcccaggttcatgccattctcctgcctcagcctcccaagtagctgggactacaggtgcctgccaccacacctggctaattttttgtatttttagtagagatggggtttcaccgtgttagccagggtggtctggatctcctgacctggtgatccgcctgccttggcctcccaaagtgctgggattacaggcgtgagccaccatgcccagccgattaatcttgtttttatgcctgttaacacaggatctgttctgtagcccgtgatggatcaaggagtaatttcgactttacagtcttaaatgtgttatttaagaaatgcatttcataaggctatggatgtcatagatagtgattcgtctgatgcatctgggcaaagtagattgaaaaccttctggaaatgggctgggcgcggtggctcacgcctgtaatcctagcatcttgggaggccaaggtgggcggatcacaaggtcaggagatcaagaccatcctggctaacatggtgaaaccccatctctactaaaaatacaaagaattagccaggtgtggtggcaggtgcctgtagtctcagctacttgggaggctgaggcaggagaatggcgtgaacctgggaggcggagcttgcagtgagctgagatctagccgctgcactccagcctgggcgacagagcaagactctgtctcaaaaaaaaaaaagaaaaaagaaaaccttctggaaatgattcaccattctgcctgtcgtgaagaacatttataattcatgggaggtcagaatatcaacattaacaggagtttggaagaagctgattccaaccttaatggatgacttggagagaggttcaagatttcaatggaggaattaactgcaaatacagtggtagtagcaaactagaattagaagtggagccagaaggtgtaactgagttgctacagtctcttgataaaacttgatcagataaggagttgcttcttatggtggacgaccagagaaagtggtttcttgagatggaatctactgtgaacattgttgaaaaaggattttgaatattccataaacttagttgataaagcagtagcaaggtttgagagcattgcctccaatatcgaaggatgttctgctgtgtgtaaaatgctatcaaacaatatcatgtactccagagaaatttttcataaaaggaagaatcagtcgatacggcaaactttattactgtcttattttaggaaattttcacagctaccccagccttcagcaaccactaccttgatcagtcagcaggcatccttattgaggcaaggccctccagccagagaaaagattatgacttactcatgatttcgatgatggcttgttagtgtttttttaacaataaagtattttttgtgggggatggagtcttgctctgtcacccaggctgaagtgcagtggtgtgatcttggctcacttgcaacttccgcctcctgggttcaagtgattgtcctgcctcagcctcccgagtagctgggactacaggcacccgccaccacacccagctaatttttgtatttttagtagagatggggtttcaccatattggccaggctggtcttgaactcctgaccttgtgatccacccgcctcggcccctcaaagtgctgggataacaggtgtgagctaccacgcccggccatttttgtatttttttagtagagacgagatttcatcatgttgaccagggtggtatcraactcttgatctcagatgatccctccaccttggcctcccaaagtgttgggattacaggcatgagccaccactcctggcctacaataaagtattttttaaggcacccaatttttttttttttttttttttttttgagatggagtttcgctcttgttgccctggctggaatgcaatggtgtgatctcggctcaccacaacctctgcctcccggtttcaagcgattctcctgcctcagcctccgagtagctgggattataggcatgtgccaccatgccyggctaatttttgtatttttagtagcgatggggtttcactatgttggtcaggctggtcttgaactcctgacctcaggtgatccacccaccttggcctcccaaagtgctgggattacaggtgcgagccaccatgcctggcaaggcacccattttttaaaaagacataatgctattgcacacttaatagactgtaatacagtgtaaacataacttctatatgcactgggaaaccaaaaattttgtgtgacttgcttcattgtggtgtttgctttgttgtgttggtctggaacagaacttgcaatatctctgagggatgcttgtaaaatctgcctgttcaaaacttccatttggaaagctaatagtctctcaacttaattagtccaaaatgaaactcttggtttcctcctcagacctgatttccccagtctttcccgtttctactaataacactcccatttaccctgttgcatttacacaaaacccaaggagtcatccttgattcttctttttccttaaagtcctatatccaattctgttcgttttatttatacacacatatatatatatatattttttttttttttttggagacagtgtcttgccctgtagcccaggctggagtgcggtggtgttattacagctcattgcagcctcaatctcctgggctcaagtgattcttccaccaaagcctccagagtagctgggactacaggcctgcttcaccacacctaatttttttgtagagatggggttttgtcatgttgcccaggctagtcttgaattcctggcctcaaacaatctgcctgcctctgctttccaaagtgctaggattacaggtatgagccactgcttctggccagttttatcttcaaaatatatcaagaatgtgatcatttcttgttatctcaattgctccctgtgaagtccgaaccaccattatttcttgtttaaactactacagtagcctttgattttgcccctccatttccactcatgctgctctgatgttcttttaccacagggcagccagagtgattttttctttgttattttttgagacggaggctttttctgttgcccaggctggagtgcagtggcaccatcctggctcactgcaacctcggcctcctgagttcaagcaattctcattcctcagcctcccaagtagctgggactacaggcatgcaccaccacacccagctaattttcttcgtatttttttagtagagatgggatttcagcacgtcgctcaggctggccttgaactcacgacctaaggtgatctgcctgcctcggcctcccaaagtgttgagattacaggtgtgagtcactgcgcccggcctaatttttgtatttttagtggagaccgggtttcamcatgttggtcaggctggtctcaaactcctgacctcaagagatccacctaccttggcctcccagagtgctgggattatgggcatgagccactgtgttcagccctggccagatttttaaaaatgtctgttcatgtcgcttccttgctcacaatcctgaactgacttccccattgcattgtaaatagattctgaacctcatccagccttacaaagtccctcatttcttaccttcttcctcgtttatcatcaatactcggtcacattggcttttcttctgttcctgaaacatgtcaagcttgttttgagtctgtatacttgctgccctctgcctagagtattcttgccccagatcttagcatgtttggttcattctcataattcagatctttgctcaaataacaccttagagaaaactttatttatttatttgtttttattttttgagatggagtttcactcttgttgcccaggctggagtgcaatggcgtgatctcggctcaccgcaacctccgtttcctgggttcaaacgattctcctgcctcagcctcccgaktagctgggattactggcatgcgccaccacgcccagctaatttttgtatttttagtagaggcggggtttgtccatgttggtcaggctggtctcgaactcctgacctcaggtgatctacccgtctcggcctcccaaagtgttgggattataggtgtgagccactatgcctggccaagaaaagtttctactcttttccaaactgtttctcttccaagtcacttaatgtcttatttctctggctttattttcttcatggcactttatctgaagttacttatttagcttatttatcttttatctttctctttgtagaatataaggtatattttctttcttttcttttcttttcttttttttttttttttgaggcagtgtctcgccctgtcgcctagacagtagtgcagtggtgcgatctctgctcactgcaacctcygcttcccagttcaagcaattctcctgcctcagcctcccaagtagctgggactacaggcacatgccaccacgcccggctaattttttgtatttttagtagagacagggtttcaccgtgttagccaggatggtcttgatctcctgacctcatgatccgtctgccttggcctccctaagtgttgggattacaggcgtgagccactgcrcccggccaatataaggtrtgttttcatacagggaccttttctattttgtttactgtktttttttttktttttttttttaagatggagtctagctttgtttcccaggctggagtgcaatggcgtgatctcggctcactgcaagctctgcctcccgggttcacgccattctcctgcctcagcctgccgagtagctgggactacaggcgcccaccaccactcctggctaattttttgtatttttagtagagacaggatttcaccgtgttagccaggatggtcttgatctcctgacctcgtgatcctcctgccttggcctctcaaagtgctgggattacaggcgtgagccactgcgcctggctctgttttgtttactgttatatccagggtctgaaaagtacctgacaatagatgtccacaaaatatttgctgaatagatgagtatttttatataggcatttaggatgaggaagcctcttcaaagttagctcttcagagtgatagtcattattttgcttcaggtataatgaatactttggacatgaaggaagggagaagacccaccttccaatatacatcaacataatatatacatttttaagtcaatagagttttagattaaacatgatttacaattgctgtattaaatgtgtgtgaataattgtgagctaattgcctaattatttttttcaaaatgagttttcagaattttcattggtaaattgtgaatattttataaaattgaggcggattgctatttccratgcttagtatgcatcaggttattaacagtgaatgagatggtgatgtatgacttcacacctccaactgaagtaattacagtttaacagttatttaatttcttaagccttatgccattcattatatccattagtaatttcgtaagctgcttagtcaagacccaagaaattcttttttttttttaaaggctggtcaagtgaagcagtgataatagagaaggaaggaataaatttgtaactggttttgatcgattagttgtaaacaccactgcactcagaccagccaaggcccaagaacttttgatctaccgtgtttattttaggttacacactaggaatataagttaaaaatcttattcccatagctgagtgctgtggccacatctacttaggaaggctgagatgggaggattgcttagctcaggttttcaagtctatcccgggcaacatagcaagactcctgtcttcaagaaatcttatttccagtgaacttagttccaaataaattgtcatttttaagaatatgtcraattttctactttttgacagaaacaggtttttcataaactaggcttgtgagctccataatgtgctggtattattagggaatatggctagctttgatttgtttccaaatttgtagagatttggaatgttcaggaaataccagtctctcttattaatcttggctttaatgatcttggactgaagctcataaaagttagctataaagttgaaaatatgtttattatatgtaaaatgccattataattaatgggtccttttattaataaccttttacaggttgtcacttacattctgtaaggattttgttttaattgttctcacatagacattgacttttaatataggtagaagactttttgaatctctccacacagctgtctggatttcatatttgtattgacaaagggacttttgatgccataagccttaatcctgacaatgcaattgagaagaggaagcaatatgtgaaatctctctccagggtgttgaaagtaaaaggcttttttctaataacgtcatgtaattggaccaaggaagagttgctaaatgaattcagtgaaggtaagtgactatatggtgtttaaatgtgtgcttacctcaggtttcatgtacttaaataggttttctccccgttttgtgttatagtgttttacttttctatttgtgggaattgcctgcttttttctctgttaattaccttgacaataacttttgactgtatatgcaaagcacagagaaataacattggttgagatccagagatcttttaaaattttttctgagaaatcttggcagttaagtactaacatttatgagcctgtaaaaattaagttctcagcctgggcaatgtggcgaaaccctgtgtctgctaaaaatacaaaaaattagctgggattggtggcgcgtgcctgtagtcccagctacttaggagactgaggtgagaggatcgcataagcccaggaggcagaggttgcagtgagtcgagattgtgccactgcactccagcctgggtgacagagtgagacacatctaaacaaaaaragagaaaaacttaagttctctatttgagtcgtacaatcttttatttaaggtatataatctattatttatagaatcaaacaaaaagcacatatattgtgcttctggcttcagtgcactgatttactggcaaatccataataatgcaaatggaagaagtacttccgtcttacatgctgagagttttgatattatagatactttagctgtcttgcactagcggtcatttaggtcttcagagatgatagaacagttcttggtttcagaggatatagaacaattatttttaagattgcacggaattaaaatgtagggaattgatagaagattctagtgctgaggcaggatccttttttgcctagttagcaaagtgtaattagtgcagtatctacttagtggagatcttgtgagaactgagaatctgtaatctatacacaaaatattttgagttctctggcagactgttccttgcattttgtaagaaatattttatctgccagttttttatgtagtgcacaggcatttctgggaaagtatcttgagaatctacagatatttgcttgttttttcttagaatccttttcagattagtttktttttttttttttttgatcctgcactttttaaaggataggataaattttcaggatggagtcttgggtaaataatatggtactcaatatttggttaaattttgaacctcagttgtcacaagctaatggaaagtgaattacctcaagagaatagtttactgtgtaccattatttataaccgtactgcatataccttattttagagtttgttttctttttagtattaagggaacaggctgggagaacacttaatacatgtccttttgtgtgtgttcaatggctttgacagattatataatgtaaaacctgaagtgtttgaggcttgaaatatgagcttatggcttcattactattgcctctggaaaacaagaattatatgtgatttattgtcttttctttcatgccatttattttattatcttccatgttaaatttgtttcctttagaactgttgaggccctgtatcaataagtctttcctcttcctgaactttgacagttttaataaatgctcaaagttacactgtgtagggcaagtttctttcctggtttttaaatacaggtgttcttttttactcctagaaccagcagacaaaaacatatttgtctgtctttgataatgaggaacasactttagcctggttagagtacttaaaaatgtgtctttgtctgaaaactattaagtaaactatgttcaattttagaacaaaatacagaatttaagcaaaatattataatgggaaatgttatataaataattatatacaattgaaaacattttttaggcatgagtcccttagaaaatggtatttggagttagatatggsacagtaacagaatacactgccytgcgtcactgccaaaggtcttgttcctgactactcatactggctgccacattctctttgcataaaataaagcttgtttcaccaatcttttaaggttctttcttatttgaactataaatgttcataaaattgttgaaacagatcttgcattttttccatgatacccctgattgtacaaatactttgtgttataatttttttagtgagggttacctggaaccagttgcccatgttctaatttgatgtcgaagggacttgactttatgacagtgaatgaatgaaaacaataaccacccatcttacttcagaagcaatttaagggagtctttctgaatctattcaggtttggggagctatcctttaaaagaaaaagtaattcaaatttattatctaaataattgaaaaatatcaataacgtcaacacataagcatacagattaaaataattaagacaatttgtttaccatcagtggagtacaaccactattaatattttggtatattctattttgaaatataataactccaattctgtagggttagttcagggagttgaaaagttagtcctggaaaatttatacagacagaaaatttttattattaaatatccagagcatttgtaaaatttttgaaaacaaatatgggtgtataactatgyatgtatccaggacaatgcctgcattttccagcattaagaaacatcatattattttattaaaaggaatgtcataatttggaaaagttttcttacgataagcttttaataagcattataatattcggttattatgatttggtgaaattagataacatgaattaggatgtataatgaaatagtatgatagaccaattgatgcaataatataatttttatttctgtttttgaaacggtctgtctctctctctgttgcccaggttggagtacagtggcaggattttggctcactgcagccttgacttcctgggctcaagcgatcttttccacttcagcctcccgagtaggtggaactacaggcacacatcatcatgcctggataatttttgtatttttagcagagacgaggttttgccatgttgtccaggctggtctggaactcctgggctcaagtgattctcccacctggcctcccaaagtgctgggattataccatgccaggccctcgttggcattttagtaagtgaccttccagctttatttattttttaaaagcaaaataatataacattttatttcatagtttaggaaaacactacattaccttatttggatctttacaaaatcacagtgaatttgatggcgtggggtggcgcattggcgttagtagcttaaggctgggattagaggcctgagccattgcacccggccagtatacatcacttaaaacatttttttctgtttataagagttatttgagctcaaagcatgaaaatttagaaaaatacagaaccccacccctgcctcaagaaaaaaatattccaaaactaataggtccatcaatgagggaaaaccttgattggcgttttattttactttaattttaaaatttattttgagacagagtctggctctgttgcccaggctggagtgcagtgggataatctyggcttaccacagcctccatcatccaggcatctcccacttcagcctcccaagtagctgggactacaggcgcacaggcacaggccaccacaacggcttatttttgtatttttttagagatggggtttcgccatgttgccccggctggtcttgaatacctagccttaagtgatagaaagtgcatagaaatcaggatcatggtagaggtaacttgacagcctgtctcatttagtaagtrctgaagctgagacttcacctaggattttagattccaagttaattttttgaacctaggatttgaacctaggattttagackccaagttaattttttttaaaccatactgtgatgctttgaaagttactagttccttgtcttccaggccctttattagttcgtttagtttgagtcttcatctttgttataaattactgtttttaattctgctgaaatacacataacataccattttataaccatttttaagtgtatacttatgtggtattaagtacatttacatttttttgtgcaattgtcatcactacccttctccagaactttttcatcttctacaaattcatttatatttccaagttattttgcctttctgtattaagtgctttaatatgtgtggtgtgaattaattagattactacatatgaagcactcaaaataatgcctggcgcttagcaagaactcaacacagggccaggcgatgttgctcacgcctgtaatcctagcactttgggaggctgaggtgggtggatcacttgagatcaggcgttccagaccagcctggccaacatggcgaaaccctgtctctactaaaatatgaaaaattagccgggtgtggtggtgcataactgtaattctagctacttgggaggctgaagtgagaatcgcttgaactctggaggcagaggttgcagtgagctgagcttgtgccactgcactccagcctcggtgatggagtgagactccgtctcaaaaagcaaacaaacaaacaaaaaaactygacacatgctagctgcttcctacaaaccaggtgatagaggctaacagagatacagctttgcagagatgacaaacaggaagtggaggaaatgggaggtggatggaaagcctgttttttccaawttgtttttggtcttgtcttttccttgttaaattcaaagtgattttggaggagcatacatatgctgtacatacatagtagaattgaaaaatcatgaagtgaaattcagcacaatttagagtttggaatcatagttttacaaagggttcaatggtacagtgttaatgcatgcatataaatacatgtaagtatgagactcaattcttaataaaagtatttaaattttgtctgacaggatttgaacttctcgaagagctaccaacacccaagttcagctttggaggcagatctggaaacagtgtagcagcattggttttccaaaaaatgtgagactttttcttggacgaattcaggtagctacacagaatctacacagcaaagttaacctgacacagaaaatccttgtgcaaataaatgcttagtaagtacacaggatgcacatgttgaatagagtatactggattggtgaaagaaaataataataatgagcatctaagtggttgggttttagagatcaatcaagaataattttaattttcttttgtatttgaaatgtaaatagttttcttttcgattaaaaaaatttcctataactgctaaacagttaaaaactttaaagtagtaaatgagtttatagaaagcatgtattcttgatttttgtgccttggtaaagttgataactatttatgaatatttgaccaaattattccagcatcagaataataagcaaaataactttgttagtgttttgttagactgtttatgaaatataacaagaaatactattttgtgttggatggcggttatttttaaacttaattaatacctgtgaaaaggcctcttacctttatgtatataattaaacaaaatcagagaaatgtatcagttgctcaagttatcaagcctgcattttgcagctatggtcttctacacactgtaagggtagtagaaggaaagagaactaaggaatgttattatttgctagcgctatgttaagttgtcttattaagtaattgagtcctttcaatgtcttcttgaggtatgtattgcttgttcttgtttctacgtataaggaaaatgaagctgagagaagtgaagtcacttttatgaggttcaacagtacaggatggagccaggatttttatctgggtctgtctgactttaaaacacatactcttctcctagcatattctgcctcacaggtgcttagtctttgcctttgtagcatttacagtacagctggagacccatgatgattacatataaagttcagttagaaaagatgggtagttactttattagtgttcatctgtggagtatcagaatagcagtcagccaactctgtctcatatcatccttcattacttttccccatctccctactcaaagacttgcctctattaagaattttgtcattcttctgtgaaagggtagtgtaagttatataagccctcagcgatacatgcacaaagatgttctagttaggggctaatttggcaagagaaacagtttattaatgtttttgaaaagataagtcatattcatacttaataccattttgtatttgtggtaatattttaatattggagctaaatacaaatttttgcataattttttgatgattttcagctttgtgggcctattgggttacataagtgactttttgtttggcaaatgttactcctgtattgagtaagtctaacattacgtcccttttctttttggggaggggtagccagaggagtgagtttttcatttagatsaacattgatcaaccattaagacaagatagttgaagacatgtatgtggactgtcaacaaaaataacattttttgaaaagcttttattttcaacatgtaaaaagtgagaaattacttcaaaatatatgcaatttaaattttttagaagattgtgttgattttaccaagacaggagatcttaaactgtagaaacttttatagtttttgagatcgggtctttgttttttttcacattaatattctttgatttcaaatataacatagataagtactcttagaattttgagttaagtatatgctattttaatgtgctaatcctacaaactaggctttctgtgtgactagactgagatgttgagtttgattcacaaaaagcttagaatggttctttgttgaaaagcttttcgagtcactatttggggcatgttagtgccatttgcaaaggtgaaggttttcttttttttttttttttaaccatagagcttttgataaggttaggaaaaggaagttgtcatctcttcttattactctaatcctgctggaagctagcttcttagggactaaaaccagaacaaatggaaggtccaaaaatgctaataagaaattagtattttcacataataccaaactgtaaaaaccaggccagcaagtgtcaccaggttcctgaaacaaaccataaatacattatttaacttagtattgttaaattgtataaatatgtgggtaactgtgacagaaattatgcacttataaaaagcagtaagttacatagtgaatgctgttttctgtggataagaagctggaattgtgatttcatttaatcgaaagacgcttactttgaggaaacttgtttgaaatgcaaacgcgatttctctgtggagccttcacggaattgctgcttttcactatgattattgctgcataacaggccacttctgtgtgtaggaagtgcgygtgcaagtccaaagggaattgaggcctgaatgggtgggttatcccaattaacaaatacaaagwtttcagtacattttgttttaagccaggtgcacaagttagagttgctttttgggackggcatttatgtatgtgagaatcaaacctgatatcactcttggcagcctgactaaagccatttaaaaataagtacaaattgtccttgaatgatttttttcccattgtagtagcactgaattttccttttttcttcatctgtggtacgcatgcaatcttctgggttttgtttttttgttttttttttgaagaaataagggagctaagtatatacaaaagacttttagtctttttatgaatcatgtgcttcagtggacttacttattttaaaatttctatgatactgtaatgtggtactgtatgttgacctcaattcacatttatccagagtataatagaaacctcaatttttaaggaacttatattagtagttaagtttcttatggccttgaaataattttcttcaaattggtatacaaagaaatagtgtatccctgctatgttaatgactttcgtctatgttcttttaagtaattttattttacgaattgtgtgtgtgtatgtgtgtgtgtctctgtctggtagcctacaatgaaaatctgtacaaatgtgaacagtttgtctccaggggagagccctggggtttgatttcctgtttttggctctgtaagctaacgtgtatgtgctcctggacagccctctgctttgagagtatgagaccaagtgtcttgtgttccacagtagtaacctctttagctaatgtcgtgtgtgtgtgtgtgtgtgtgtgtgtgtgtgtkgagggagtgttgatgggctctgaaagaagtcttgtctcgtacatttcactgaatgaaggctgcccatgacctagagcttgattgtgggaggtgaagagcatatatggctgaaagacaattgcatagtggggaaaaaaattaggaaatccttacatttctcttggttaggcaggaaacagagatgtccatagaagaagagggagytcatcagcatgttttattaacagttaatggaagaaaattaatgctaatttattcttcatatacaccatgcaatttgttagaaaagtaaaagaatagtttgaaattctttggtcaattgatggattcctatgttcagggcatagaaatgaaactcaacatcaagcagacaaatacccaagcccacaggctacataaatgctgaataaaaccagctctacaatggaactctgaaaagcgacgggtaagaagcctaatgaatgattgaatatgaccttagcaaaatccctggagtgttgttgaacgatcattcatttccagcttagatgtcaagatgggctccagtaaccaggaaaaaagagagcttgagtcagtacttactgagttttaaaaatcttttgcaacacagtgtattagactgatcattaaaaggacttctctagctgaattttgagctgtcactatagtttaggcccagggaaataaacttaaaaagataggaataattcctaagacatgaatgtatcaatatcctatcctgcttttctggagtaggacttcaaaaactgaaatgtataggctggcagaatgtacttttgtcatgctgataccactgtaaaagagacttaaactaggagatcagttgagccctaaagtatttgcaaattacttgcctagcttgttagaagaagaaataaaaagccaaaatctacatttttgttttcaaaagaaatgatttctttgtttcctgaagagatgagaaaagataaattcttccatgttatatttttacgtacgtatttttattactgtactgtatcaacaaatgataagtattttaatgagtgatctttattgttcatagtagctggaagcatcttaagaaaagcaaatctaatacatctgttttcccaaatatgtaaaaatttacacatgttccagcaattagcatatcgtgtatatttctgagtagcttaggaaaaaatatgaaaacactctggttgaataaggggactgtgaactgtatttctcatttttcattaatatattacagatcaggcagcttatcattgatgatagcagaatcgaaatggcattgggatggctgtagttccccagctttgcctgccttactgctgcaaagaggagagaactgttgggaggaagaggctaaatgtagaagagtgtgggtgctgtcagttcacattttcctcctaacccttctgctaataggaaaatgtcaggcctttgttcccatctaattttagtacatcctggctaaaaaaatgttaggatgaaaaaatgttaggatgatttccaaccatggaactttgaggggtggggtaggggaaggaagaatggaggaaagcgcagtttatactccatatccgtctgcctttctgcaacagcagctagcccctactctgttgatttgggtaatgaaataaatttagatgcattgaagcagtgataattaggttttccttctatcttctcagtaagaagcctagttggtttctgaatggggaaagtcataatatggtatttaatgaaacatacctggcaaaattaaagagctgtacgcaagctttggaagaaaggcctgaaattgtgagtgcaaactacatgtggtgctatgtataaatagaacctttgagatgcatttgtatttcagggaagctgcttttatactgttattttgaatgagagtaatattttgatttttaagaatcagtcataagcaaggcacacaaggctgagctgtttatcccctctgtaaacccaacaggcctagagggaaagcccagattcagtgagagagccagttggatcaaacaattgataatatagtttgttcaagagataggacagaattattggctttgtagttgaaactaccaactgttgtggttgttatttaattaaaaagtaattaactgaattaaactaaaagggcaattctgaatactggagctcactacgaaataagctgtcttcccccagtattcagttagtgagctaaggtatcctgttggaatttgtatgatgaagacattatgtagcagaagtgagatcatttcattatttgcaatgaattaagcagattattttctgaacttgaaattcagwtgaatttattttggttcctttcattttataacagcaggtaatttgttaaaatctattaagcaatagaatagatgtcaaacaaatgatttttaaaaatatttaattttggagaaaaaatgattagacctagccaagttacttttcttttctggtcttcagtttttctctccataaaacaggggcacttagtgatatttaacattctgtatccttgttagctcatgttgccataataaaataccatgaacttggtggcttaaacaacagaaatttatttctagaaagttagttctggaggctggaattccaagatcatcgtgctggcaaggtatgttttattttaaggcctcttctctaggcttgtaggtggctgacatctatgtgtgtctgcatgacttctttgtgtgcaatggggttggaggagagagagcgcataagctctctggtgtctcttcttataaagagcactaaccccggccgggcatggtggctcacgtctgtaatcccagtactttgggaggccagggagggcagattaccataggtcagtagttcaaaccagcctggccaacatggtgaaaccccgtgtctactaaaaatacaaaaattagccgggcctggtggcacacacctgtaatcccagctactcgggaggctgaggcaggagaattgcttgaaccttggaggtggaggttgcagtgagccaagatacaccacggcactccagcctgggtgacagagcgagactccatctcaaaaaaaacaaacaaaaacaaagtaaagagcactaaccccatcctgagggcctcactctcatggcctcatctaaccctaattatttcacaaaggccctatctccaaatatcatcacattgsgggtagggggtcagggcttcaatatgtggattgtaggggaaaccagcatttagtccataatactcctgaaatcaattaaggcttagaaaaagccctacaaaataggcttctagaatagctgtcccttggtatgcacgagggatactgggaccacctgcttataaccaaatctatacataggtgagttttgcatcccaagaatattggattatccatctgagtttggttgaaaaaagccaagtataagtggacccgcatagttcaaacccatgttgttcaagggtcgactgtatagatggggagattaaataccccgtttgctaactctcagttgttaggtaacttgatggttcttttaaaccaaggtatctgtactcatatatacatatgtacataaaatatttgaagcagtcagatgagtattcaatctaaaaaaaacctttgtccatgttttcttaaactttgtatttgagtattgtcactgatatctatttgataagtttgtatacatttgagcaaagggtttttttttttttctttgagacagagtctcactctgtcgcccaggttggagtgcaatggcacaatcttggctcactgcaagctctgtctcccgggttcaagcgattctcctgcctcagcctcctgagtagctgggactacaggcgcctgccaccacccctggctaattttttgtatttttggtagagacggggtttcaccatgttagccaggatggtctcgatctcctgacctcgtgatccacccgcctcggcctcccaaagtgctgggattacaggcgtgagccaccgcgcctggcctattttttttttttttagataggttctctctctgtcacccagtcacccaggctggagtacagtggtgtgatcatgactcactgcagccttgacctcccaggcttaagtgatcctcctgtctcagcctccctagcagctggggctacaggtgcatgccaccatgtcaggccaattttcctattttttgtagagatggggtctcactatgttgcctaggctggtcttgaactcctgagctcaagtgatcctcctgcctcagcctctcagagtgttgagattaccaacgtgagctaccgtgcctggcctagagatatccaggaaatttaggaatttacatcttattgtttagtccacttccatttttatatatagagatcaagactgggccttaggaaaattgtgataatttgaggaatctccccaatatggttcttttttgacacaagacacaaactacacacagattacctaatttgccactctaagatgagtatagtatatgggtatagtatatgggtctgcccttctttttttttttttttttttttgagatggagtctygctctgtcgcccaggctggagtgcagtggcgcgatctcggctcactgcaagcttcgtctcctgggttcacgccattctcctgcctcagcctcctgagtagctgggactacaggtgcctgccaccatgcccggctactttttttgtatttttttttagtagagacggggtttcaccatgttagccaggatggtcttgatctcctgacctcgtgagccacccgcctcggcctcccaaagtgctgggattacaggcgtgagccaccgtgcccagcccttgcccttcttatatatagtatgctgtatatactacagtgtatatagtatatgggtctgcccttcttatacatagtatgctgtatatactacagtatatatagtatatgggtctgcccttcttatatatagtatgctgtatatactacagtatatatagtatatgagtctgcccttcttatgccctgtgtctctccaggctactgtcagtttgtctctgtaactgcttatttccccagtgaaacagaagtatgttaaaggtgatagcaaagtaccttctgtatagtaggtacttaaggttggtttcccttccctacatttctttgaaacagcttggagagagaagcagtggtttagaccctgcatattaggaatgtgaatattaagtgagaaatgtaaagcagcttagcgggattgctggcacacaccaaggctaaatcagtgttctttcctccaaggacccttcttcccatggagytaatatgtttaattgtttgagattttacccctcagtgccacagttttagtatattcagttccattgtaggcatttgtgttctaggagtgattaaatgagtgaagagaggcggagtgctagacaagtgagagggaaagtttaggtaggcctttcagaacttcttagaaatcatactgtgtagcttcttccttaatctctagctagcgctggtgctgaagcacttatttatttttttgacagaccaagtctcactgtattgcttggctggagtcagactcctggcctcaagcagtccttctgcctcaacgtcttaagtagctgggactcctgagcggtacactgtgctgggcttgaagtacttttttttttttttttcagtcatttaagaaatgaggatcacatattggccgggcgcggtggctcacgcctgtaatcccagcactttaggaggccgagacgggcgcatcacgaggtcaggagatcgagaccatcctggctaacatggtgaaaccctgtctctactaaaaatacaaaaaaatcagccaggggtggtggcaggcgcctgtagtcccagctaccgggaggctgaggcaggagaatggcatgaacccgggaggcggagcttgcagtgagctgagatagtgccactgcactccagcctgggcgactgagcgagaccccatctcaaaaaaaaaaaaaagaaatgaggaccagatattataatgccagattttcatgaaatgtcctttatgatgtgtcagcagagactaagaatacccctcggatttagatcgttacctgttttaagtggtaattttttttttttttttttttggagacagggtctcactatgtcacccaggttggagtagggtggtgcaatcatggctcattgcaacctcaacctcctgggctcaagtgatcctccaacctcagcctccatagtaggtgggaccacaggcacgtgccaccacacccagctattttttgtaatttttgtagagacaaggtttcgccatgttacccaggctggwctcgaactcctggcctcaagcagtcctcccgccttggcctcccaaagtgctgggattataggtgtgagccaccgcatccggccccagtaattattcactaagaaatgtgggtatggtgggggaaaatgtaaatgtgggtgcatttgaattgaaaccaaatggacaaggatatggtataccttccttcattaggtctgagtgccaaggcattattccaagtgatatcagacaaaggaaccaagagcatatccctgtaggatcatgcatcaggaagctggtagaactggatttaatgaaagtgttgaattggatttgggtcttggccatttaggaagcagtggcctgagattttataattgatttttactttgcatcatccagatttgatatccttgatcagtgattcaggtttatttcctttgctgtaagttaacagtgccattcacggtgacattttcgtttgatgttgagtaatactttagtttatctgatttgtccttagtttatactagaattgacagtgtagtgtgtaaaaagtatggtgaatcagttatttatgctactctagaaaacatttggtttggcccggctcggtggctcacacctgtaatcgtagcactttgggaggctgaggcgggcagattacttgagctcaggagttcaagatcagccttggcaacatggtgaaaccccatctctactaaaatacaaaaaattagccgggagtggcggcatgcacctgtagtcccagctactcaagaggccaaggcaggaggattgcttgaagccggaaggcggaggttgcagtgagctgagatcacgccactgcactccagcctgggtgacagagtgagactctgtctccaaaaaaaaccaaacaaacaaacaaaagaaaacatttggtttttcaggtttgtttatttctttaacctttttattggtggttatatgactatctcaatgtctagaatgcttagtatgactatagacatgttggccagagccatattgctttctctagttaatcctagagggctttagtcttttaaccattttaagaaagttctacagagttgaggtcaatatgatatgatgtacctctttaggacagaacagaatcaaagcttcagttctttatgttaggtagtttaagagtacagtggttgactaacctggttttgatcaaggtgtttttttttgctttttgtcccttgtaaaagttaagagaagctgtaactagtaattaaaatagtaagccagcttctcattcatgtcaattctttcatattataggtacagttaaacctatagctgcaggttacgcacatacaaaatcggcaaggctagtcttctcttagaacagtcatgggtatgaattcaaacaaaagatctttgcttttggttaatataatagattgacaaactgctgaggagagttaagaaattcacaggctagtatgtaggctaaatgttcttttcgtactgctcccaggaatgttctgccttttagaactagaggctgatttcttttcttgayattttaaatccaaaggattcagcctttagattgggtttttaagctctgtgaaatcaccaactgtatctagttttagtttcctttctacctaatgaaaatgaaatttactcagtttcatttttagggggaaaggcaggagagcagtagctttgagcatatcactagggatgaattcaaaatcgatttttcttgaggcagtgacttatggcagatagttgacaagagaaaaattaagttttgagcttatatctcaaatactgaatgtgaattccactaaagaatatttaagaaaaaaagttgaaatggtttcatttaaagatggtaacataaacatttagcctggtctacagttgaaatattttctagattaaatgcaatttataatatagcaatatgaaaatactgtaatttgtttttagatatgtttttggtggggtaactgaagcaaactagggaactcaccatgttataatgataataattagcatctacttcatgtaagatcataaacagatgcttttgaaccttagtattaggataataaaataggcttaataagttttacttatgccatttactttgattgtagatagtgaaaagcctttcttacacttttttaaagctttttatttaccatacataaacttttaaatgtttgttattcatgcttgtgttttcttgtagcacataataccagtagttactattaactttgaaaaaaaaatatgaagttgaaataagttttaactgttgctctgttctttttagcttactttaccagaactcttccctccagtgagttgcaagcgtgacatttgctgtgttttcagcacctgccaacttggaaagcagggtttgtgttcaggacttaggctcacaacccatactttgtggtgcacaatgctggcccagctggcatgctttcgtacctcaatggtgctagacagtcagttacaaagctgtgtggcttcacatgcgctgatctcaatagtcactcctcttcaagctgctttcaactcttattttgtatcaaaggagtgggattggtattattaaactcattgctgaggttatttttcartgaaaataaattgttttatttagttcttggatcaaagagtaattttgtcctcagcaaccaaatacctctttaaaaaggtgtgtgtgtatatatatgtatcattcatgtatgtatgtatgtatgtatatacacacatgcatgattccagccagagctataattcatttcttattttcatcagtggataaaaagaacagacaggaaagaacagagggattaatgtgtcatgtgatccctacatgctaatgtaggtagggttactagttgtagctggacaaagatgtgggaaaatttacagaacttttttttctgagtaagacgtgaaaattgcccccatgataggttcagattttttatttccatctgtaaccagaaacttcttatattttccaaagaagtatattttgctaacatatttccagtcacctatctttttgaaaatacttaaggtggacttggtgatrtctgtcttctcataatttattataagcaattttaaaaaggttctgcttttaaaaagatcttttcaaatgtagaaagaacagtgtgaaatgtgaatgactggcttttaatacaagggttgtgacaaagaggcagtggcttttggaagccaaataaaggggtgaatacacgtgcatctgcatactgctgttggatccagtgtataacgtttggcgtttgtttagttcacttgttagtctaaaaaggatagtatgttattctctcaaaccagtttataattttttagtggtaagctctttttacaaccatacctacagatagatttgatgggaaaaactgaacatttgctggtacttgttcaagcctcaaagctcagctctttgtttgaacgtcacatttatctggttctaaaggcataaaaataaaacacccactaactacctaagacactccttagtgcatatcaaaacccaacctttaccctcgtctgcacaaatgtgcttaggtgaatacttttattagcttgttgatacaagttatagtaggttacacccttaataaaacacacccttattgtcatcctgttgcttaagagctttaaacttgtaataggggagctctctaatatagaatgatactcaatttctatctcccaggcagttttgagtggaaatgtgttgcataccttacacacaagtgtgcctctatttggtagtcctcctttgggagaactaggattgctgtgttttatccctggctttcatatattttttgtttgtttgtttgtttgttttttgagatggagtctttttctgtcacccaggctggagtgcagtggtgcgatcttggctcactgcaacctctgcctctcaggttcaagcgattctcctgcctcatactcctgagtagctgggattacaggtgtctgccaccatgcctggctaatttttgtatttttaatagagatgaggtttcaccatgttggccaggctagtctcaaactcctgacctcaagtgatccgcccgccttgacctcctaaagtgctgggattacaggcgtgagccactgtgccgggccgtcatatattggtcttgatgtaaaagactgcaagtaatccctgcattttatatttcccagggtgttctccggcttaatcaggttagcgttggttggtgataatggaaaagttacaagtaatagtttttagattatttatggatttattcctaaattggcctatgaatttgcatttaggtgtctggttgtgtgcaaaatctggttttgaccattttggattgaacaaagatagacagtttagctccatgtccccaccccattgcagcttttacatagctttaaatctagagttctacatttttagctactcttctgaattgagcagaactctaatataacaacaaccttttgggtagaattttttcttagtaaagaactatggagctgagcactaagaagtgaggatgttttataatatagctgtaggattattatatcatgtgggaagaacctatagtatggaaggttaagtgtgacacaggtcttaatgtatgcatatctttttagcctttggagatacaaatctagaaaatgagaagtaactatttattggttaatagcataacttcttaagcaagtatattctagacagcctcaagaaagcctcagaaccagaaaaacaggctgctttaggttggaaaggaggtgttacagcagaggaactggccatgaccaccatccttggaatgtgaaacgcaaatcatcctgaaagcaacaagaataatggttgtaataattgtttccaggcctgggaccctgcatcttgttttttaagttgacctgatgaactagtaattgtaggaataaactgaatgtttgccagcaggagtcactctaggcttcctaataaaacgttagtaaattaaactctgtccttaaagctctgaaaggctgaggtgattgtgtgatatcagatggctttagggaaacactgactcttttcgttaagcatagcagcattcttagattattccttgggccttcttttgttcaccatcggttcttggatcttgttcctttcaagattggtccttaatgcatttttaaaaagcaacgtatatgggtaaggatatcaatatcttagtatgctgtattctgtatgttagctcattttggctttctaggatgaactgactctatcccacatcatgtaacttgaaatgaatagactcatatcctttccactgattgctgtccattctaatcatgcagcagaactcagtggagcgagctgtagtgtgaaaggagatgtcagttcatgcttttctgaaaagaatgggtccggtgtgatgatattctgaaatatttcagcaatagccatgaaatataatagtttcccaagcacacaaagctcaagaagttaattgttcatttatgtttgatactgggattgaaacattggattaaaaccaattaaatgttcctagaagcaacagaaaaagtttccttatttatgaatagaaccattcaaatggcgcagacacaatccatgtaaagtaatgaggtgttttgtttttttggcaaaggagaacacaaaacaggcatagggagttttaaaaaaacttctctttaaaaatcgctttttggatacaaggtcaataaaataacatacaccagtaggaaggagtaatgsgaaatctagggcttcacaaggaaaacaatccccctcccccaggtgagcagcacaatgaaaatactctgcttattctatcagggttacattcctgaacttaagtcaacatcctaagttacagaactaaacatgctctgcctctgcttagcaaccacaaatccttccttcgccagttgcatgtattttggatgtggcttctgaagtacacagtcacagcgccccgagttaggaaatttgcgctttattttcccaaagtgtgacaacactttaaggtcccccctccccgaccccacccgcccgctgtcctgcacgccactgaagtgatcgtttcttttgaacctcggcatctaacaacccggaagctggacgcctgaagcctatgcggcccagcgttttcatcccggctcgtgctgggggcggggagagaagcccgtagggcctctggcgcggggcccgggcagccgcggtggcgcggcccaggcccggggccacttcccgcgtcccggggcctcgcaggcgcgagcgcggcgagcggcgcgcggctgagcccgcaggacgccctctagccccgccggcggcgcgccgcgagtccctcactccccgcccatcggcggctgcgcgcactgcacactcgcctgccgccgccgccgcacgccgcctgcctcctgcacgccgccgccgcgcctagcgcccgggcccgcgacaccgcccgctaagcgccgggccgagttcacgcagccgcggtctggcggctccgcggcggcggcgggtgcgggcggcctggccggtgccggttaaagggacgagttgcaaacacttcaggaagtgacaagtcgatttcctcctccccgggagtcgctcgtacaaagcgctcggcgccggcaggcgagcgtgcgcgcggcggacgcgcggcgggcaccccggacgacttggcgagcgctggcggtgacggcgcggggtccgcgcccggagcgccccgccgcgcacagtaagcgacccggggccgggcggcggcggcggtggccggggggctggccccgagcgaggtccgggccgtgtgcgtcccggccgctggctggagggagcccggctcgcgtgcgcaatgggcttgccttttttttttcttttttcctaatgttgctggtttcctttttttctgccttgtttcgcctttgggttgggtcgggcggtttctccgggcgctcggtctcgcccctgatgcaggcgtgagacttgtcagagcacaggcatggggaagaacaagcctggctgcggcggaaaagtctgcgctccccaggccagggcgggcgggcgcggggactgctgcgcccgggggtgtcctctccgcgtctcaacttgagccctgactagccgctgcggaggaggcgcggagtctcgggagccgggcggccccattcgccccgaagttcccgcatcgtttgcagacaactcttttgttcgcggaagtttgcacccgccacccccggggtgcgggagcgaggcggcgggctccgctgctgctggactgtccggggcggtcaggatgggggtgagggggcattctgtcccgggcgggggaagcccgcggggaggccaccgctggggcttgcggagtgggggcgtccgcgccggcgtggcttttgcacatggcgagaagggccgtccggcacaggcacactggtcgagtcacatttttgctagtcttggattttgcaagcccgtgggagtcaggttccccgctcagggtttctcttggggcagagacgaaagaaacgaggacacccagaatccggggagggtttgcggtttgtgttgtcccaagtgtgttctcgctccccccgcccccccaccttgtcccccagcccccagctctccacccccattttcggwcttggggracaatgcttgtagtacgggccggggcgccgcagcagcgacgaaccgcgcggacaggtttgcccgggtccctcgcgttcggacgccccctgaagccgagctccttccatctgaccgcccgggctcattaacacgtactgtacttaggacgatggtgaacaaagaaaagctctttgcagcgtttgatgaatgggattctgcctcctataggccacactccgagtcttccatacggtacaatctccggactcggtggtgttaggaaagtggcccccggaatggcttgcattccgggtctgggatcctggggtgggcatttgtgccgtcgccttcgccgccgcgctcgccttgcaggagcgggtgcagatggagccaggctgacggttgttcaasaggaacaaatgtttgttcaattgttggatggtggagaaaagggactgtttcctattgactgctgcaggagttggaatggcattgtttattggcctgggaagccaggcaagcgtcttgtgctgcttacaacatattagcagacttccaaatgacatgctagcatatgtgttcccagcagtccccaccggctggcagggagattcctccttgctccagatcctggactcgtttaaaagatgccacctggtttgaggacttgggaaggaatggagtcagccgaccaggtgaaactcactgttccttattaggccaggtttttgtttcattttaatttatctatttaagagtaacttgtgtcagttacagttttgatattgaattgcaggtctacagggtcccctcccccgcctctagctgtggactacagaaacagctacttgtcccagttgatagtcccattcagtgggagaaggtttggctcaggattggtagcccttgactctgtgtctgcacttggctgtcacccatcatgcgacctgggagtctgccgatccagcttccaggygctttttcaggttaaaaagctaaggagaggcgtggggaaggcctgtatttttttcttccaaacgttccttcagagaacgaggcgatttaaattcaaataatgttgcccaacgacttcctattttcttctgagaaggtgagattcatgtgcagtcattttgatatcaaagacaagtttttaaatagaaactagcaacctcactgctgcagaagtggacttgaatgttccagtcttctcaggacaaagtagagagcattccactgtcttggttcataatgttttaaatcagtttccctcttctcttttcaacgtggggtatgttgcacatagcattttgaaagtacgcaaagttcttttggaaagagctttatgataccttattgtcaccgtggtggttacgcttaattgacattttatgggaagtcctggtattatttcctgggctctttctgtttccatcttttagtctttctctttccccttatatattctctcactgccccgctagcctctccatcctctctacagaagcctagtgggcttgggttcctttaagcgggtccagtgagcaggcgcctgacccttgattgaagctcaggaagggccagcctgctctcctccccttttggaggccagagaggagagagctgtgtttaaatattaggagctggcagcaggggacgctgcggagctcttttaaaaagcacactcttctcacccaccgctcgatgccttgggccctgaagactgagttctgggcccaccttcagattgttcagttgatgttttatttgggcagcgtgactttctgcagttaaattgcgcattgtatggaaaactcttctgttcttgtccttaaataaaaagactgaaataagcaaatactcagatcggcacaacccccatcattaccaccaccacgcacacctctctgatgtgtaataaaagaaacctgcaggcataatttgttatgtaatatgctgataatacaagtttcggttttcgatggaaaccagatgtggagggactctctttaattgatccagcaaggggaagactaatagatgaactagtccttgcaaaccccagtggtgttttgatttaactttaggggagaatcccgagctcagggctttggagaggtttttaccctcagcttctgctttgctgcagctgtcctttttgtcagactcttcctcttttgaaagaaccggttcgttgccaacacaaagcacatggccggagctggcggggctcagcgaagcttagctctgctggactctcctcctccttgcctcgtccggctgctaccctcccctccacgccacaaaacagggtctggccaggggacttgggtgctgggaggagtgttgattgttctccctcaactccttyctgaaatgtcagtctgatcatccagggagagtttctgtttaaacttgtccaacggatacactttccaaaaatcattgactctctttctctgattaatttgtttgtttcctgcctaagtttgagggttttttctggatggctgagtcacctttattatggctcaaggttggggacggcactgtaatagctgaccccattaacagcagtttcattgcctgcctggatgtgaactttggaaacaaacccagaggcttagatatgctgatgtaccctgagacttgcttagaaaatttttgttgtagcgcagtttacattaacatgattaatgactgcgccactgaaaagtccatattcaaaagcaatttaccgttccctagggttcttcttacagtgaagtatttttctttgccaaacaactttgttttaaggtaacttctttgatgcttaatccaaacctcctgtgcacagcgttttggggcaagatttgggcttcgtgtattgcgggttgtggttttggtggtgcctgtcttaacctcaccgaacttaggtcagggagaactcggattcttatctaagaaagttctctgagatcctgagcaacagagtgctgtgctggctaggatgggaggaaatcttccagaggaaacttggcttctgggtgtcttggagtgatgcgaggaggctggagctgaagattttattttctttcccctyacagtgattggagatacttgagcttttctgaaaaatagagacgtccttgggtttttcttgtcgttttttttgtttgtttgtttttttgttaaatgtgggttgattgagagggggaaatgctgatgggtggatctgaaagcagccttaggaacccgagaaaataaaaacacgtttgaaggactctggaagattttgcatttcaaagggtctaccttgtagaatttcacatcacgtcaggggttacagaggagtgtgacaggcacccccgctttaatggttctccgtctctcctgctgtgggggctgcacggggaagctggcttttgcatgggggatgggggacagcttggccagaccacgctggactatcatggagaccacattgcctcttgggcatctgtaagtctcgggaaggacttttttcacggtgccastctcaggagggtgaaagcaaatcatgttsgtaaacagcccatttgacctcagaacgcagtggcaggctaactcctgacttctccactcactctttttgttctcttgttaaacaaagaaacagattcttcccctgcgctagtataatatgattcccaaggatttagctgaaatgggtgcagattgttcaaagaataatggcagcacccactggttgttgaaggcccaccctgggccctgggctttgtatacactctctaattctcaaagcaaacctgcagttacagctgaggctcagagaggccaagtaactggcccaaggccacatagccggaaggcagaaagccaggaaggagctctattccttcagagcctggttgctttccatatgccctgctgtgtgttcatatgatagaggcactgggttctgttttatctcaaagcagaaattttgtttagtcttgttaacaccacagagaaacctagaacttttaactgccttttcccctcctctcccctctgctatggctgtgtgtttttttgttttttgtttttttttttttgttttttggagtgattggaatctgtatgtactgtaggaccaaaggcagtgagtgccatagtttgggaggctgagatgttttgcttcaatctcagaaaaggcagattcacaagaaaacatttccagtgaccttctgggggaaacaggaagtaaacctggcagcccactggaaacaccaccatttattcagattccattttccattcagagagattcttaaaagtgtttccaacttttttttctttttgcatttgtaattcagatgtctcaaagtaaattatgatgtggtggttgccactccaggtctgtacaatatcatattttgtttacgtgcctaaagtaatcaagtaactgaacacaattgtatatcctccagtgtgactgaacttggtacgccccagccagggctgggcagcggccctgcattctgtctcagacagatggttctttgcaggttgcttctcgggggggtgtgagtgtgcgtgtgttttgaaggaagaataaggagacccatctctagcaaggcctgcctggccaggcatgctgtcctttctgcccctgaagagtttgtaggagmgtgctggggcccctgtgctctgaacttctagaagctagagtaaagtaatggttctgaatattggctgcacattagagtcacctgggaaggttggaaaaaaaaaaaaatccagatgcccaggctgcattcaggcccaattacatcacaatcttggagaggggggcagcaacccarcattggtatctttaaagttcctgagtcgattctcttgtgcatccaagactgaggagtgagggctgtaatagaccccatgcatacctacgggtcggttccttagtttccctattccttagcaggagattgggggctttcgtattcgggagcggagcaaacctattggcatttgctgctgmtgctgctgctctgtcttggtgaagtggcatctgaagggcacccatccctaggggaagtgtctgctgtgggcatcatcgaggtcatttctgtttctgctgggccaagattcagcacagtccctttgaaccaccttctttccagattgaagggggcagattttactcaggctgtggtttcagggcagttctcatgcaggccctgcctccccacrgtcctagtggtcttgttctttctggggatttggcataccgtgtgcccctggggctcaggggaggaaagatgcagttaggttccagggcatatcctggcaactcccagtgagtggtgagtctttttcacccaggtttgcagtgaatgtcactctgtcagctcagagcctgtcttcctgtgaacatactcaggattacatttcatagaattgtgtttagaatggccagggggcttggagagtgagagcttcttgggcctgctgatgtaaccttctggaagagaagtccgatccttaagaggtgaggtgactctcccagggtcscgtagccagttgtcaaaggtgcagactctgtctcctgagtccctgccctactgctgtgttctcatgacgtggaaccttaattcctgcttgcaagacagcctgctttagcgtagaccagcaggtgaacttgatcattgctcacagagttcattagccaagtkaaacatgctacccatcccccgtccccaccccccagtcccaatggaaggtgctgaaaccttgtaaaggtgagcttgctgaaaaaggttttggcctctttgccaaaagtgtgtcagtctgccyggctgtgttgtggtggtggtgagtagtgaataagggctcttccccctgtggggagttgggtttgggccgagtgaagggagaagaggagaattgctatttttctcagggctgcaatttccacattcatttagcagacattgattggacatctgctgggtgtccagtgtggagccgggcactttgcttcattagttcatttaatcctcagcacaacctgtggctcagggactagcccgatttcattgctgaagacatgctgcctgcagaaatcactcaccccaggttgggatttgaacttggcccagctgacctcagccctgtattctttstaccacaccctgctgcttttccatccagtgctcaccaggggaggagagttcctgctgtaagacacgtgcattgcccagtgggcgttccctggcaactcctgcctgggtgccatgctgcagcttctaggagggggcgtgggtgggccctcgagctcctggatagctgggtttgtacaggtcctgtctggggccgctgtgtgtcctggcagctggactgtgccttgtgcaggagaggcggcttatgcaggttccagttgctgctgcctgcccccaccccgtggaggccaccctccctcccaggctgccctctggctgaagcctgaagcaccctgacagacaaagcccagctgggagaggcctcggccctgcctggaattccccttgctctggcattggccttggccatgggcctgggagcagagggaggttctgtccgctggctgggagcagcttctctgcatgtttggaagtggaaagactaagttctctgcagctgggtgtctccatgatctgggtgaggagaaggagcctggctcctgagcccgggggaaaagaggtctgtggttttgagtctccagaaggagtgcaggatgcggggaagcccctctgtggcatgatcctggggaccgggccgtaggaaccgctctcccctgtaatccctttggcagtcaaacgattcagtttcctggctggaaggtagtrggcacagactgyctacttgctggacctaatttgccctgtaaccctcactgggcctctgatttctcaccttgctggtcctgcctcccagcgtttttaggaagatcagtttagagcttgtttgagaagccccttgcaatgggcgtagtgccttgcagagcagtgccaggtaggagatgagtgtgactgggcaggcaggggttctgctgcaaagcccatggtcggctgcatgccacctaggtgcttcttgtggctgcaggaagaatgggactgtttggcgtcacagaggaactttgggcagagtctaggtgaaacccaattctgtatcatcgagggcaaaagtagcattcagctttggaatcagaagcctgggttcaaatcctaggtctgccctttgcccgccatgccatgtgcctttgagcaggcgactgtctctctggcccccattccttcttctggagtatggcagtgctgacagcacccccagccagcccataggttcggggccctgagtgagaccacacctgaggacacttagagcccaccagacattagtgagtatctcacgcagcctgtggcaagcgcgtgctgttgcgaggactgaagggaggctggaaggacatgagtcaggcaggttgccctgaggaggtcagtcagtgatgacaagatacaggacagagcagaggggacttcaactggarttgggcttggctggacgggtcaggctggggcggatagagccttttctcctccagcatcttcctctctcagatagcgtagggtttttttcgggaggaaaagttgaaagtatgcattacagtttagtttgcagtgtgtctgttaccaagagttgagactggtgaaatctaagttttctctctaggaaacgaaatctttttttaccaaaagtgatttacttttgctcctaagcatagaacgttaaatgcatgtatgggtcatgatgtggcctcaccgtcttggctctgctgccaccgacacttctgtgaatgaattctttggaaaccaaggaattaatggctgcatacctacctagactgagagtgaggggcccacttaccaccttctggattctctttaggtgctttgcagtgggcatctttgttttttgttyttcctctcacgttgggggagctgccttggacacctggagtcagcgtcttccgggtgcgggttatgtggttgcagctggagcgcctgcccccagctcggcctgcggtgtgattccggctgcttctagatccctttgccacctgaacctgacctcagtctgcaggagcaagagctcatctaagcttgctgaagctttgaaaggagcccttggcttggaggacagagggaagggtccaggctgtgccgcttggcttctgttggtgcaggcctctgactcctgacacgcctattccctgggtctggtgagcatcgcgcctcatgagtctggggctggctggcatcctgtggggtgaacaggatggacagtcttgactcatgagatttcctgctgcactttgggtagctttgagggacacccctttgtatggagtgtgaagactcatgctgttcactaggttctgggagggggccctgactccagactgtgacagcccctcccctctggtgctggccctagagcgtcctttccagaggacccaccaaggtggctgggcatgggtggccttgaagcagacctgctaggacaatgagatcctgaagctttgtgagcgagggctgcataagggaggtctctgaggtgtctcggctgcctctggtctcatggatgtgacagaactcatctgccaggtggagcgtgtcatcctcacccactgtgtcctccttgggtgtgtcactgttcctgtgatgagcacaaaacatacctgccatggtggtggcccccaggctcagtgcagttcaatcaatgtggagtaacagctactatgtgtgtcagacaagtcgtcaggccctgaggaattcagagatggatctaccgaatgtctgattttagggagctcatagctcgtattatggacagtcagactgcaggtttttattgaggttctactatgtgctagacacagtgtaataaatgaatgaaagtgtgtttacacaaggtactggtgagttacaccgtcctctggaagtcatagaaagtctctctaactgagctgaagagaggagggcagggaaggcttcctggagggggtgacagctgacctgagtcttgaagaatgagcaggagtttagacagatgaagaacggggaggaggagacattcgagaccaggagagcaggtgtccccagtcacagcaccatgggactgtgtcagggaatctgggagacctggagcctgagtgagacgagtgtagatttcagaggggagcggagctgatctaggtcaggatggcagtaaagggaagggcgaagggctgggagaaagcccaccttcggggtgacactgcccaggggcccagccttttgaccttggagtgaccttcctggagaagcatgagactagcctctgagaattttcatcaagtgccgccttggccagagtgatgtggtctttgtttatttttagacaaaactctcgcatttagcaggcgcccttgggattcccaagagcttccagaacttcttgtctgtgctgcgctggaactaaagaagtcaaagttctggcgttgtgtgagttgaaacagtctgattcagtgtaaaactaccttttttttttctttaaagggaaaaacaggcacctaaccgtgttggtgcgatggaagagggagcttcggtgccccctgggctctgtcatagcctgttctcactagtgttctcaaaggcagggggaagctgctgacacagacactcgagaatggcgggcctgagtcacctgactcttggcggccagtgcgcctgaggcctccaccgccctcagatgccagcccagattccaggccccgttgactgtgtggcatgtgacctgggcccagaagaggagaattaagaaaaatactgaacctgtgcagaggtggaggcggaactgcagttagcagcccatcttagctttggggggtgtgttttccaaggctggtagggttttgctcatctgcatttactcctaagggaagaagaaagtgagtaagttagccacagatggttttgattttaacagtaaacctctctgttcatctcattcccggggaggttagcacatgccttcacctgttagaaaagaaagtaaaagaggatctggcctggctgcgtccgcataggccaaaagttgagcagcaaactggagtgaaagagcgttatgaccagaagtaggagcagagaggagatcagacaccttgggctcaggagagtacgtgatagtccacaggtaaatgagttctaacttgctttggggaaaaaaagatttttttttttttttgtgatggagtctcactctgtcacccaggctggagtgcagcagtggcgtgatctctgctcagtgcaacctcagcctcccaagtagctgggactatgggcgtgtgccactatgcccagctaatttttgtatttttagtagagacggggtttcaccatgttggccagactggtcttgaactccggacctcaggtgatgcccccgcctgggcctcccaaagtgctgggattacaggtgtgagccactgcccctggccaaaaaacaatttttaaaagcatgtgtgaggttcaggtgagtccttatatgttacacatgatttcaggaagtcattgttctgagacatggcgtggtggcgtgctcctctgccatggaggagcgtggccagggtggtgtccgtctgctcacctgaggagctccctgggtctgccagcttcctgcctggccaagcccttcccctgcacttgtaagacgacgactgagcgtggctgatcctgcccggtttctgggtggatagtggaacctgggggaaccagggtagaatcccttatgggaggcagccattggcctggccaggctttgggcgctgttggagacagggctgaatttttagccctgagtgtaggcacaggcgagagctggagcccaggcacttgttccctgtgtggctggctgctcatctctgatttagctttggctcaatttttgtcctaccccctgattgctactggagccagcatggtggtcacagccactggtgtcttagggccctggaagagaagacagcaatcccaggttgccctctcctctgctcagggctgatcctggcagacatggaggaggagataggcaggaggagatagggagaagacttgggagggagctgggtcttcatgccaaatgcaggaagaaacaagccatcgttcagttcatgtttgagctgcgtcagcccatgtgaaggcccccacacctctgggaagaactgcagggagcatctctctggtccccgtctccaaggtcggggaagcattttacagttttggaggtgatgcggggaagggccacagccaaaacttcatgtggcagtctagcatgccacacctcactggaatcccgcacgctagaagggagccgccttgtgagaggtgttccagtgaagtggaaccccaccagtaggtggtgggatgggctccagaacagtgtctggaacaggaactagtagagctcaacgtcttagattccttaaaaaaaaaaaaaaaggttgattttgtgtgtcttaataatttcctttataaatggagcctcttatagtacaaggcagtacagatgagcccagacagttgggcagaatgttgggtagggctgatgtcagttagaaaagcctgagagaagaaagagtagggcacagaaccagtgaaaaggatccctgggttctagtgctgccacttgatggcttttgacttcggttcagccacttcacttctctgagctgtgattttctcatctgtggactgggaataatagtgcctacttaacagagcaggaggaataaacaggatagtgcragtccaagcacccwgttctttcccgttttcattcacccaacaagtactttttgaatgccactgtgcgttaggcttcgccgttaattcatataaccacsctgagaagtgagtgctgttattattccctttttatagatgaagaatatagggttctgtgaggtaaagtgcccaaggtcatttagctcatgggcagtagttctggcgtttgaactcccaactttaggattggcaaactatagcctggtgactaaatctggcccactgcctacatttgtaaataaagttttattgggacacagccacatccgtttgtgtaggtaatgtctgtggctaccttcacaccacagcagcagaatttatagaccacagggtctacaaagcctaaaatatttattgcctggccctttacagaaaaaaaaatgtgctgacctcttctccacatgaatactctgcactycggacctgggctgttcagtatgttagctgtagcctcatgtggcaatttaaattaaatctaaatgaaacgaagacttcagttctttggttgcactagccacgtgtcacatgcttaatagctgcatgcggtggtcacctctcacgttggacagcacagacccagaacgttgctgtcattgcagagtgttccatcaggtaggagcacacgagactgtgtcccagtgtggggagratccaaatctgggagaaccaaaagtgcagaggaggtattctgctgaaagaaaagacactggaccttcctgctcccaaaacacagaattgaaaattagtttgttgactctgaagtgatggagaaatgtctgctgtggcagagggaacctgggcctggagtgaagaggctgtccctaaatcctatgaccattggcaggcccccaccatgcccctctgcagcctgtaacctcagctcctggttcactggggccgttggcctcatcaactctgccatgtccagtgccccatgtgtgtttgcatgctgggtcctgcagaaatcccatttttatgtattcatacctgttctgttctgggccatttgggcctgatggrttataccattgttcctaccatgctggaatgggaaatacatggtctgatgaaatgaccatgttttccatgggcatcagataaagaactacttcattcattcaaaatgatggctactgtgtggcatgaggaaggaaggtgagttccaggtacctcagctagctagtatcacgtgacttactccttaaaatgctgtccactgccaacactgatgccgtgtgttgagtagcttggaattgggctgaactgtagctcttgtcttgcttggtccataaatgctctgaataggaatctctttggaagctaactaggggcagagtcattctgaggggtgaaggcaaatatggagggcgtagatctccagttcatcagacccaggcataaatgcatcagtgctggacccatctcccccacatttgtgcatgctgatagactctgagtgtggagaagagctgtgtggctggttgtagtccacgctgtctacattggagtctctgaaatgcattgtacagtcaggagtccagtccattgctcctgttaggaatggctggcttttccatgtttggtttacatggttacagtctgcacaaatcttcacaccttaaacaatgcccactccctctgtaatcaggatggaaacctttataaaatgcaagaatgacataccaggaggacttttcaggaccttgggcaagagtgaaaaaagaagaaaaccagataagtaagcctgatgaacttagctctagaatagttgcatgaaggaagtgcctggtaaggaggaagttgtgtttaagaggtcgtacgtggaaaattttttccccacatgctttaaaagggaaaagaatagccttgaaaggccagccttgattaygtgtccccctcccatcccactgccacctttgacactgtgcttgcctctagccagccactcctggaatggtgtcctgtgtcttccttcttcagccagtggaggggtgagatcattcgagattaggctctgccctaagtttctcactgctgtcccagccctcagggagactaattgcatgtgcccaaaagaacccgggcacaaatacctttataatggaaattatctgtttttagagtgctggcgttttctgagcacctactgtgtgccaagcactctgcatatgttctctcatcgtctgctcattgcacagccagctgggggtgactagccccgctgggcaggagctgagcttcagccatgtccctgagagagtgtggcttgtgatgggctagagcctggcttgaaaatccaggtccctctgctccaaagccagtttctcctcaccacctagttttgtccccaattgtgcacatgttgctgtttcaaagagaaatctcttgctcctctgcatgggttccctgatgacatttttatcactgcctgtgggcagagaagtaggttgctcactgtggggtgacatttaagaaaaccaactccatcaagctttccctttgaatgtgttgttatggtacaagaagtcttcgtttgtcctgggctattttgaaataaaaggcaggaaactcccctcttgtttctatatcttgcatagaagtcatcaaaacagaatcctctgttctgtgcggtagtcgtgattgaggaagcagctgttctcttcatgatgacccaaccaaagccagcagtctggaggcgtcagggatccagaattgtctcttccatctgctgggtttacttgcgtgtgttagaagtatttggcatggaaactctttccctaccccacctcgtgggcgaggccagaagggagctctcctggtgggggcagggcagaccccaggctctgctgtacttcagataatgccacggtttcctccatagaatgggtgccacagcctcccatggggccaggctgagtgaacgaaccagatcaactgtctctccaagtccatgggtgggaaggcaggcctctcctgtctgtgattgggagttgtatgggtctgctttgttgtgcatggaatttcacacagtctgagctgtctaggcattttcaggcctccagctaactcaccgagtgagccagggagtggtgccgatgagaatgtgtgactggatcgcgaagccaagcgagtccatggagatcttcaaaccaagatgaaacttagtcgtttgagtgttttcaggggtctgaatcgtcagcatcatttagactggagtttgcactctggtggtctgggtctgggggccagatgtggtcctcagacatgatttgtttgtctcatatgatgctttacaagtttttaaatttcttgggaacataaaaaggagattgtgcaaagaagtcctgactttcagtttctcttaacaagtcaggaggtaaattttaatagtagcctggatcttctttcccaaacagcccaccacagttagctgtagccagagccgtccacggtgggccaggcatgttctctgcacatcatctcggttcctatgcagcatgcttctctcatttgtgtttcctgcttggccctggaaggcatttgagtttgagatccctggagtggataagacattgggaaggcagattcagattttctggctctccaggttattggcacagggagaacgatggtgaatggcagtgactagtagaaatgcccaggatgtttgcagtgctcaaggtcattgccatcataatcctgctacctcgtgttccacctgctagtaaacttgcaaagataagccagtactccgggcactaataaaaactctgaaagtacaaatatgtcccttaaatcttggaagctagtctcaggccaggggcccttctaccctgtgaatggccctgtgatactgggtgacctggggattcattttgtacccccgcaccccccccccccacaatcactcaggtgcttcacctagtgtaatcttcttatctacaagtgccttcctgaggctgaggcaggcagatcgcttgagcccaggagtttgagaccagcctrgtcaacgtagagaaaacccatctctactaaaaatacaaaaattagccgggtgttatggcatgcacctgtggtcccagcaactgggaggctgagacgggaggatcgcttgagcctgggaggcggacgttgcagtgagccaagatcgtgccactgcactccagcctgggtgacagagtgagaccctgtctccaaatataaataagtaactaaataaataaaaagtgccttctggattttaatagatattgcaagggaatttttacaaataaagatgtaatttttaaattctcatgacaggcagcctagctgctgtgtaccaagtagataacttctggtgttagacggaaatttcttagggtagatgaaacatgtatctcagctctttcttttgacagagactcaatacagcaagtagaagtaaagcaaagatttgccagatggtaattagtatttttcaaagaattgaggtgttctcttcgtatttcttcaaatatctaatagcaatccctcctatcatttatctttttcactcaaccctgtttttatctcttcgtatggcagctgttctgtgactttttgtttccttctgattctcacacgtatttcaccgcatagtcaacctttgggattcttagtgtcattccaaatggtttgctgaatttgagaaatgtagcttgtcaatccattgcctgaaagcccttcccatgcctttcctttgcagcagaaacatggcatcctcatctgcctctttctcacctactggtcagggcattgtgcacctgggtggttggtkcagcctctgattctgctaggccaaggctctgacgatgccactgttctccttcagtgcattctagggactgttggagctcctgaaggccaaggatcatcttgacctagatttagatttccagggcctggccagaggacatgctgggggtgggtagtaggccacccatccaattctgacctcatggcttttgcaagaaactcaacttttatggatcctgattttctcatgtgcaaaattgtcctcccagttactagggttctaggtaccaaatccactaaaaatgtgtttttcaaactttaggaaccaccggactcaacctggagggcttactagacacagctgctgggtcccaccctcatgcagtttgtctggggtcggggactgaaactttgccttcctaatgagttctcaggcaattctctactgatccgggtccacgcttggagaaccagtgcacattgctgaagcaggtgccaggtaccccagtgttccccccagcaaggatgtgggttggcctgtgtgggtcttggctgcctggcatatgaggctygtctttcctttcattttcccactgcatcttattttctgggaaacttgagactagattcccggagatgttttgttttccgttcagccatcttcatggaagctgtcctcacactctcaccgtgatagttggagacacatttatttcctacctttaggtaattctatcactaacacacaccatccactgtccatctcggtttccaccctccacctggaacccagatactaacggaggcagccttggcgattttgagttttgagcttttggtttcccagataggttgattttacccgttctcaccaaagacaggccgcatttgggtcgagctgacagagctgtcatggacacagcaggttaccctgtactcgggaatgcttcatgaagcttcccactcactgccgtcagtccaaggctgggcgccctttgtttcaggtgccctgaaatcagtgtctccgtgcagtggtgggaaatagagtgcttaaccatgtccagaatcaactgctgtaccctttctttcccttccctgatgacacctgagcccagccggggctgctggaggtgagagaccctgggacccatctggggaagcaggtgcagagccaggaaatggtgcgttgaagtccatacagtcagccatgctcacatctaagtgcttagtggtggtttcctctcatttgggggttttagttgtccagagtgaacctgaaatcactgctgggtcttgtgtctttagctccagatgtagtcactgggaggtgacgggcaggctttggctttgcctggccttgaagttttcctcacagttttgttttgtcaaggagtgttcccccttctactctcgctcctcagaaacaaggggacactaactcagtcatggctttgaatggagcgtttctgtgtggttttctccttgtcccagtactctgccttctgcagctcccagcccccagcagctgggcacattggcccttgtgctttcatatccacgaaaacacgtgggaagcgcgtgcccagcacatgccttgatcacatatttgtaactcgggagtctgagatgatcgtgacattctcgtatggggctgtgtgtggccactcccattccccaagggagaacacaattactgtattgtctgtgggcattctgggcgagctgcttgggtcacggctggggctgttggtatattgggggatggaaataaccgttttgcagcttcctacctttatgctgccatttacaaaagagggaggtttgggacgacctcttagaatcccctgggtcacctggctttgttcagctgagtaaaccaccagcctgtgcccccctaccccgcccccatagctcagcttgtttgcctgctattcaggcaggacagctctgggagggcagacctctgagaggtggagagaagcagagtgatgggaggcagagagcagggtggcggcttgtggctgtccggtgcrcagagctccccctgcctgggccttgtgagggcgctggcgctggcactggccgatgttgtggcagctgacctgtctgggcatcctgaggctccttccaccaaaagctgggaaggggccctccactcccagccccgtccccctagcttgctggagtgtcagacatgtcatttagcagcatcctaatagaataccctcaccccatctctggcattgaactcctgcccaacactcatgccgcttcctctaggaaatctccccagatctttacctccctacttggaattccaggctcacttctctgcccttgtggatttattatcgtatgacacactatgccttgtgggaaacctaattgaacacttgctgtttgcgtgaacttagttatgtatcacctgccttcttccctcagtccctagcacagccagcctagtgcgtgttggacttgggacgagactgataccgggaggaaataatgcccagagagaagcacaacacagggagtacatgagatttgcyggttcaactacagtcacctagaaatactttttgtttctgagtaaaagtctgttctaaggagcgcagcgtcacatgtgtatataatcttcccattgacccattttgctctctgtggaggctcccaggaccttggccctccctgtcccactggggttcctgcagaggcctgggctgtccaggctctgcctggcccagggccggccctgcaagtgctgcccgcctcacatcaggccctgactgcagcaagactcttcctcctaaaagcagaacacagaaaacaaagctgttagggcagggccctgggctctcagttttcccatgattgggtgtgagagggctgctggccaccctcccgcccacagaaactctgatgagtgttttcaggttcctgaggaggtgtgagtatgatcagatacaggggtttttgtgctggtcactgtgtttttctgttatgctctgctactgtggaacccagaaaacttttgagcccagcccctccgtgaatcaggaggtgctgtgctttgaattagtgttaacaacattttgatagytatcggaaaccccctgcaagcaagacagatttcagtatctctggcaccaagaatgttgagacttgacttaacgtggtgattgtgttctttgtttcagcagacatttcctgagcagctctttgtgccaggttctggggactcaggggactgaggctgggctcatgccctccagaagcacacagtctgtaggggtggcagcttgctggttcatttcatggccctgtgattcaagctctgcattctgcacagaggcagagggcgtgacctgactcagtgtggagtgtggaggtcttcctggaggtggtgacacctgagctgagtctaaaagatgaggttagagagtctggaggctgagagggcagcagggagcaggggaagtgggtggcaagttctagcctgagagaccagcatgagcagaggtctggaggcaggaaactgcatgtggtatttggagaactccagaatgttttaagaataggcagtacatgcatgtgtacaaactcagcagtgaaaagcagtttcctcatccctgtccccagctacacgtctccctccttcctggggggagctcctgttgtcattttcttgtttgtcctcccagagatattccatatgcatgtgcaagaatatgcagatatatacacacacaaatgtgtgtataaaaatacagtattttttatatttttgattttagaaagtattacctatttcttgtgaaagtcaatatctcgtttggttcaaaattgaaaacatacaaaaagccatttcttgaagagtcttctctcatctctgttcccggctacccatttccgctccctgaagacaggttttatgttaagtttcctttgtatccttccaggacttctgtattattggcacaattatttatttagtttcacccaaatgggagcttaatatacccactgttctgatctttgcttttctacttagcactatacctgaagatggtttcctctttggatgtgttgggctcccaaagccttcttttttttaatttttaaaattaaaatttaaattgacacataattgtacttatttatggggtacatagtgatgttgcaacacatataatgtatgatgatcggctcagggtgattarcatttccaacatctcaaacgtttatcatttctttgtgtcaggagtgttcaatatctttcttctaactatttgaaactacataatattgttaactctagtcatcctacagtgctatagaacactagaacgtactccttctatctggctgtaattttgtatcctttaacaaatctcttcctgttccccgccttccscctacccttcccagcctctagtctcctctgttctgctttttacttctatgagatcaaaattttttaagcttccacatattctcgtagcctcttagaaagctgcgtttcgtcctttgcatggtgttgcagtgtgtatttatcctgtccttcctgttaggcggttaggccacttcccatcttggctgtgcctaacgatacgatatgtactattttgctcatgagtaggacagtctgcagggcaggctgatttggcactcacacacgtgttcacagggagagtgagtaaggaggatagaaccgcacgaggacacaggcaggttatgttttacgctcatctctctagaggttgacttgttcccccttgtgaaaggcaagtgactttaagttggattctgctgagtcttgaggaagctgtcttactcctttactgtctcccataagtaagctctgcaaaaggagacctggcccagtgtggtctctggaagcaaggttcgcccaggggtgtggttggcgtcgcttggggagactcccttacagactgtgaccttcaggccataccctgcaggacaaggtcagctagaactgaagcctgcagtgcggctctgccagccttgtttgctggggccttgtggatgtggatgccacctccggcacttgctagacttgggcctcgtgaacatcacagttctagtcagtagtttgttgatttattaataattgaagcgagtaagagtctgtccaggcaggggacctgccaggatgtgggagggagagactgcagggtgactttgcacccatcccatgaaggttgtgatgcagatttctgaactttattttttgagatggattcttactctgtcccccaggctggactgcagcggcatgatccagactcactgcaacctccgcttctcggactcaagcgatcttcccaccccaacctcccgagtagctgggtccacaggcatgcaccaccatgcccagctaatttttttgtatttttggtagagatgggattttgccatgtttcccaggctggttttgaactcctgagctcaagccatccgcccgtcttggcctcccaaagtgctgggatgacaggtgtgagccaccgcacccggcccagatttctgaactttagcggtcccagttattttatcatgctatttttatcaagatattttaataataccctctgccttttagtgcattttaatttagtttttatttcactcatccatcagttgttaatagttttcacttccatgggaggggactgtggcttatgtatgttcatgtcttcagcccctaccatcatcccagcagtcacaaagtagtcactcagtaagggtttgttgaatgaatgagtacagttgcctgccacgcaggcttttgtcaggactggtggcatgctgttaactgttcatccagcacactggaaactgggttttggtgcttcaatgtcaacctctgaccagtacttgttaaatttcatcaattctgatcccatccagttattcagtcggatagggtttctttttttgtttttacattttatgacttaaaaaaaaattattttcgaagctaggacctcactttattgcccaggctggaggcagtggtgtgatcatggctgactgcagccttggcttgcctaagtgattctcttgcttccgcctcctgagtatctggggctgcaggcacatgccaccatgcctggctaatttatttttttgtcaagmcgaggtctcactatattgcctaggctggtattattattatttttaagtctgagaacatatctatgccacctcccttgggtctgctcctgatsgaggtggccagtgttggtggtttgtttgtttttttttttttttttagatgaagtctctcttttgtcacccaggctggagtgcaatggcgcgatctcggctcactgcaacctccacctcccaggttcaagcaattctcctgcctcagcctcccaagtagctgggattacaggcgcccgccaccacaccctgctaatttttgtatttttagtagagacagggtttcaccatattggccaggctggtctcgaactccttacctcaggtgatctgcctgccttggcctcccaaagtgctgggattacaggcgtgagccactgtgcccggccgtgttggttttttgatgtgtaacttttccttctcctgcacatttttgaactccatccagatgacactggggaagaacccctttccacagcgaggtgaaggccagtccacatttggtttgggaggtgcatggaggagtgctcagaggcctggctttagagttttgctgctgacttagtgaatgagcttcctgagagcaagggaagtacaaccaagcctggttcagatggctccactagggggacagtgacagctatagccgcagctggtgtacttggcagtctttcaagcattttggggtgtgckgcggacaaacaatagaatgaatctttgtttctggagcctgggccatttctaacgaggaagatgattactcatttttggaagttgggttaactcttccagagtcttttgactctcgcttagatctgtaacgaaaagccgagaagagttcaccttggcatcccaaggtgtttgctttaaagccgggtgactctggttggctgtgtcatttcctctttaacacccctccacccaggtctttgccctaagtcaggaggcctgattgtcatatccagagtgcttagaaggaagtggggcaagtgtttgcaaatgaggtgcccctttcttctcctgttcccccacccccatggcatgccaaaaaataaagaaggagctcaagacccgttgagcagctgttcctccaaacttcttagattaattccgtggccagttctaagtaatttaaagccaaatgcctggacttagctttgaattaggacttcatgaagcctttcttcgtcttcttccttctttcttcttcttctttttttttattttttttgtgagacaggatctttctctgtcacttaagctgtagtgaagtgttgctatcatagctcactgcagccttgaccttcctggctccctactcagcctcctgtgtagctgggaccacaggtgtatgccaccatacctggctattttttaaattttttatagagatggggatttctccatgttgcccagctggtcttgaactsttgggctcaagcatttcacctgcgtcagcctgcccaagtgcagggattataggcgtgagccactgcgcctggcggtgaagcccttctttgcagaaatctctttctctgccttaagaggcaagaatctggtgctattttgatctgtgaatagacagatggctgttgttacacatgcagcggctcccccgccattgtgctgtggctggtggtgggagtagtcttactagaatttatcctgccctccagaaccctcccctgcagtaggagtcaggtagatagctttggctgtttgacctgagaggtgccacagagctcgggtatacttgtcatgtgacagacccgcctggcagcttagagtccctccagttttgttttggcagatgatggcattctcgaatgtgtggtggagcttgcagcgcgatgtgggggtagaagggagaaggcggaaggcttaccatgtgattgatgagcctgtctgattaatttctacaacagaccctgtaggttggtagatatgactcagtcagatcaggaagggggaagtcctgaagtgtgagctgaggttaggatgtgacctctgatgagtgggtggcacatgggcaacctggtgcctctcgtgcctatagcagttcttacagagcttgttgggaccttcttgcatcacctgtcatgtcccagtgtgatatagtcttagaccggtgtgttggggctaccagcctgcaggcctcctagataaagagatcactgccctcgcagctgtgttccaaggcccagctgctgagagattaccttccctctgtgcagtgtctttgggggttctgtgagagctgtagacaccaacaggaatgcttctccctgcctgctgagtgactggagctgcaccggtaggaaagctgtgtctgtagcctgggctgggggtggattgtcctgcaggagagggagagtccgagagctcataaacattttgtaaaggaaaaggagattcttgtcctgagagttgtcctagaagatgaagatgtcaaaactggtcactggctaacttcctggctctccaagaaactcctctaaatcaggttgttgttagcgtcactgaaagacaccaagatgcccctgtatgcataaggattgagcttggaaaatgcaatcacgcatacatccccatcctcaccccatggatatgtaagagaggggcaggttctgcaacaccacctccccgctacctcggtcccacccattggaagagtccctgtggcctgctccgactctgctttatgggaggtcatagccagggcactttgatggcagcaagtaaggatttggcctttgcctttgtccagtttcctgggaccttgaactgcaggtcaggtctgagtaggactggaaaggccagcatagcagttgttccaggacaggcatcatcagcttactgtcctttcttatagttcattcagtaccttcaaatctattgattttcatgctctctccagagttgccatttgcctgtgacacgtgaggaaactgaggcccagagagtcataaagacctggctgaagccacacagstgatacgtgactacagttagagtctcactagtcagaaacggagcttatctggcccagcatcctatttgactcatgagggaactgaggctccgaggagggaaataacttggcaaactgggcagagccagtaagtggcactgtcaagcccagagcccccatcccctaagtcctgcttgatccacctaggccacacagccttttgtttgggtctttccatttttgtttttaaatcttttttttccacccctcttctgttggtttttagtcatggtttgagtaaattcagtatacttataaataggtccgactgaagaacaggtcatggttgtcttaggctaagtggcttaacatgatagtagattatctttggggcccgctgcggtcccctcattgtcctctggttctcttcccattctttcccttcccccggtttggagcagaaggcggcatctagctctgtggccactcggtaagtgtgagttctcctctctccgtgcctcttgtccctcgtctccttccttttgagtgtgtcaagcagcttccagtctatagcaagctcttctttcatagtgtttgtgggttaaaaggacatgagcggtcgtgagaattaygggagtgcctataggaagctcgtccatcagttatttttcattgataaatggactcttgacaagtcatgcatgcagttggcttcagtttcaagaaacaacatgggctgtctcattcccatgttgagatttgttttggctttttggatcccagcacttttatgtccctgaataatgtcattcctccccctcctcttgaaatgttatttgctttaaaaagcagaaaatccctacaacattgaaaagtccaggagaacagagttccgatttggttcagcagctcagtttactgttttgtcttgttttgtttttcccccttccattaaggagacacataggcgagcctgggccactttgttcagccaggggcccaggtcaagtctctttcaagctgtgtagtgtgactcccagtccttccccaagtgtggccttcggtggcctttgattacctgaaggactagatcagggaatatgttttagccccagttactgaagaaagcacctctgaggacacaccttcctgtggagggagggatgaggaaggggtgagtatgccctctctgtctaaggacagcaggtgcttcatgcgtacagccagccactctcacttgccctgctgaatgtccaccagcccagttgcaggagcaaggtgcttggaggactcaaaaacatattcttggcccctagaagctaatgctgtagctgtgaagacgagatgcttttatccaatttatgagcatttaataagggcctatgccctgctaggaattgtgcctacctagggatttcagtgtttctagggatatttttgtagtgcccccacctacagggcgttacctccttaacttatagctgaggcgggcagcacaagggtaacgtcttacatgttacaaaggcagaaagctgagcaaagttgcagagcttagccagggccctgcagctcctctgggactgagctgggctgagcgtggactcaagttcagtgctcttgctgtgatactgacttagcagatagacatcagtcaggttgctgctgtgggcaggctctgtgctgaggccacaggatgactgagggagggcaacacctaggctgcacaygtggagggggggctccccacaaacaacctggaaatgaactttgagagaaggacagggtggcagtgggggaggcataggcaggaggcacaggacctgaggagatagggacagatggatacaggttccagctggggttgcaagaagccattgtgactccctgcaggcccaggagcaccctgagcttcctggaagacacttcaccctctgcaggttacccaccatgtctgcacatccatgcagttaaggagggaaagtgatggcttcctgtcccgcttctaccctctccaagatactcgtcatctgcccatttttcttgcttacagtggaacccctaataccatgtttcaacatcagttccagaaggttgatgtttggctgggacacctcaggatgggctgtattagagagtgtgtgtattgcaaaattagtgtctgctttggcatttgatcatttagctgacaaatcaagtacttaaaggataattaacaatgaaacttacaggtcttggagtagtggggtccaggggttaagacagactttggagttctgtagatgtgggttgagtctttgtgccttgttcacaactaggtgaccttagacctgggcctcactttccccctctgtaaaatgggataacagtagtaccctctgatagggatactctgaggttgcagtaagcacagggcctggcactgttgctttggctaatattttcctcatgctgctttaaaaggtaggctctgtgtcacctgttacttctgcactagcaaagtactgatgaaagaggttttctttktttttttttttttttttgaggtggagtctcgctctgtcacccaggctggagtgcagtggcacgatcttggctcactgcaagctctgcctcccgggttcccgccattctcctgcctcagcctcccgagtagctgggactacaggcgtgcgccaccacacccggctaattctttgtatttttagtagagaggggtttcaccgtgttagccaggatggtctcgatctcctgaccttgtgatccgcctgcctcagcctcccaaagtgctgggattacaggcgtgagccaccacgcccggcaagaggttttctttgcctctttttttctgtgtgttgagggtggtgctggcaggattgttagttgtttctcagcaggacctgaagacatgggaaccctggctgtgggagtcgttgaaatgttcactatagtatagaagctgcacattcgtgggtcctgaactctggttgaaacaccagactctctttccagtatcaacttggtctgggaaagtagaggccctggataaagttcttaggcagctttcaacttttatcctttagactcagatgacttagttagtatataaaatcagcaagcagaagcgtccccaagcagattaaatccctttgtcttggcggatatgaagcttgactgcagcattcggctcccctcggaacccttctcgcactttagggttgtcacagaatttggcaggagacaacgtgacccactaagcaacacccttccccaaatgttcatatacttgcttctggattctgcccacagattgcttttgtcacaccaacaactgaagctacgaaagtttcaaagtgcacaaagaccttgtggaattgctgtcttcccctcctatttcctttgcttaatgggagggggaaatggaagctctgagagcaatgacttccgggagccaccaggaaaatcactgtcagtggctgagttctcatgtttaggttttgatctgagtcctgtttttaaggcggtaaaattaactgtgaaactaatgtgtgcaagtagtamgtacaggctaaataaagacactaaaagaaggaaaagcttgtcttgctgatttccagtttcttttaagggatagcccttcaaaatgcattacagagcatttggtaaacttctaatcttcttaagatttatataggattgtagagtttgcaacactttcttgtatgtattaattcattagcatgcaatcctcttttgaagtggatgagccargtggggctcccacttgctggaagctgakagtcccaggccacagtgatatcagatagctgtgttcagcggttgcaaacaaatgaagacacattgaagactgtagaacaaaagcaagaaaatttcatgttagcaaggmcttgtgtgagagcaaagctgtcccccctgtttctgtggtgtcagagacagagtggcctggggaggaaggcctgggtttgaatcctggtcttgcccctgctagatgtatgatattgggcaaatgacttgatttcttttcttggagcctcagtcttcccatctggaaaaygtgcatactaccaaccataatgcctgttcataggaacgtgagaggattagctgagaaggacccagcctctggtggatgcccagggagatgggaatggaggtgagggtggagggctgtggctggaagtgtggctgtgtggggcacatgggggtggagatgggctctgggcatggggcgtcttgctgaccacggcagcagccacctgtgtgtgtgccctcccacccataggccttgctttgggcacaatgctggcaagtttggggccgttcttgggcagatgcactcttggggtgaggacttgggaggtgggcaggggccccctgccaccgtgtctgcacccagggagcataaacatggatcaatgggaagtctgaccttgccttttgctcttttcagtggaaatcctggtgaagatgagtcattgagtaggggctcctggggttgagtcagagagcactgtgtctccatgatcaggttggggtgccagccaaggggagaccctcacctagccctcctttggcagatattgggtagccctagctgtgtatggaagcaggctggaggcccactatcatgagcactgcccagggagtcacaggagagaggtgggaggtgaatgtggggactgggaagtgacaatacaagacttaaatacagggcaaggaaaactgcagccgagatgcaaggatggtgcccgatgagagtgcggcccacgattgctacttgtgcaaaggggaatggacaccaatgcctggccttctctgtgccgagcttttttatatgtgttttcttatttaaatcttacagcagccccagggcaaaggtattatcctcattgtgtttaattacttaataataataattattttttgagacagggtattgctctgtggcccaggctggagtacagtggtgtaatctcggctcactgcagcctctgtctcccaggttcaagtgtttcctgcgcctcagcctcctgagtagctgggatcacaggcatgcaccaccatgccaagctaatttttgcattttttagtagagttggggtttcaccgtgttggccaggctggtcttgaactcctgacttcaagtgatccactgacgtcagtctcccgtagtgctgggattacaggcatgacccactgcacccagcttaattatttcttttgatataaggtctccctctatcaccaggctggagtgcagtagcatgatcatagctcatttcaacttcaaactcctgggctcaagccatcttgcctcagacttctgagtacctgcgactacaggcatacactcccacgcctggctattttttttttttagtttttattttttgtagagatggagtcttgctgtgttgcctaggctggtcttgaactcctggtctcaagcagtccttttgcctcaacctctcaaatgctgggatcactggtgcragccactgtgaccagcctcagccccattttaaagatgaggaaactgaagtcgagtgatttcatggcgaaggccagggccgctaaattccacacacacgttcctccccttcccgcgcacacggtctccctggtataatcagtgggctttaaaaaaagttttaaaaacttatatatagcataatacactcttttggtggttagtgctatgaattttgataaatgcatagattgggatttatttaaaattttttttttgagatcatttacactcatgcagttacaggaaataatacagagaaatctcgcatatcccttactcgctgtcccctaatggtaaatcctaccaaactaatgcagcatcacaagcagaaaattgtcacggatacagtcaagacacagaacatgtctgtctccaaggatccctcccgctgtcttttcatagccacgcccatttccctcctgctcccacgccccatccccaacccctgacagccattcatctcttcactaattctataattttgccattttaagaaagggatataaatggactcctagaatagtgagcctttggggactggctctttcactctgcatgagtctctggaggctcatccaggttgtggcgtgtgtctctggttggttccttcttattgccgagtagtattccacagtgtggctgtgccctgccacattttgtctaattgttcacccagcaaagcgtctgtggagtatttcctggttttggctgttatgaataaagggctgttacaaacatttgtgtgtgaacrtaaatcttaatctctctggaataaatgctaaggagaactcttgctggtagttgtttgaatgggcatttgaaggggttttttaggggatggagaggtgaggcatggtgggaagtgcagtcctgaatgctggcccaccagggttcaaatcccagctttgaacccggaccctgggtgagttgctgtatatggctgtaaaatggggataattcaatctggcttgtggctaatgtgtgtaaagcgcctggtacctagtaggtgctcagtagatagaagtgattcttgatataggttaagagaaaacccactagaccatggcagggtgtgtgccccagaggtggcctgtgggagggctttgcgaggcttccacctcgcgccctgtgggatcacccagttattgtctttttctkggccatgcccccggcttctctttgagaagaccctgaccctgtttgcagactgggctcgaagtctccggcctggtcctggcattccccagtgaagttggccgggccagggcccacgggtcataggaatcccaggaaattccagatcgtgctgggctctgctggtctggattcgcctcacaaattctgagaacgtgcccagatcatttcacatgttgctgtaatttagctggattctggaaatgtgtattgagctgctagggtatgtgagggatygtggtaggtgttgcaaagggttcagaaaaaattgctctcccaacagatcaaagcagccagctccagcttctaacctcctttgggagcccccacagctgcagtgataaggtctccattgagtatggcattcagagccctgggtctggtttgagtctctctctagctcccatcctgctgctgtgccctctgcgtgccctgtgtgccagccaccagcacgctcaccgttcccatactccaagtccgacccggcggccacgccttgcttacacccttccctctgcctgggtgccctgcccttcctgatgaaatcttgcctgttttttaagaactaaaagtaccatgggcaggcgtgggatggaatattcaaacctcacatagggttggacgtggttcctctccggaactgtcattcccttctccaggcaaccactgtgtgggaccatgctggactccttctatttttttttttttttctttttttgaggcagagactcactctgtcactcaggctagtggactcgctcttcttgcctttgtcactttataggatttcttggagattgtttcatatctgtacagtttgaactggctcattaaaatatttttgaaggccacatggtattcccttatgtaacaacaccgtaatgtatttaaccagtttgccctgcttgtaggcagctaggttgtccccactcttgggctcttacagtgcaaaggagtcactttaaggcctacctccgatgaatgtccccctttctgcctgcctctgaaatgtgttggctgggtcactgcactctctgtgagaccccccagggcagggattgtgctacacctgccttctcctttccatgcctgccacgtgtgctgaccacccagttacccaggcgcttttggtgcttctgctgcctctctgagccctggccccttgtcrggactctgctggggatggagctagagagagctggggtgccccgtctttgcctcgttctggcttcctgcttcatgcagagctgtgtctggatgggctaatgtgttcccatggcgacagacttccacagtttcattctactggcckcctcctacttcaccagagggatgggccatcatatagccaggcccttgttaatggaatttagcttgtttccctttaaacacatttgagaggatggccgcttgggygtccattgccgagaggaggatctggactcccagcctcccccatgaaactgctagcagtagctgctgctgattgagcactctcctggatgagcgagacactgggcaaaggacttgggctctgttttcatcagatacagtaaccttgtgaggcaagcactgttttccctgttgtayagagagggaaactgaggctctgagagtaacttggcaaaggccactcaaacaatgtatttcaagagctgggattccaactcagttgtgcttgactcaggacctgagcctctgtagctactgagcccacctggcttcctagagagaggctggaaatgggggaggagggaacaggcagctcacctctcaggccttgtgccgacggctggctgccgtagagctgaattggggctcacacacagaaacatgacggctgccattaggcttccaccactgaggaggcacaaaaggcccctttgaaaggcgagtccaggagcacctctctggcctgctcctgagctaagcctgcagtgggggctgacaggcatttctggctcagctgcctggccagaacttgcaggagtggtctgaaattctttccttgaacagatcacacttggtcagaacatgtcacttctagatcgatgtggtattgaacctgtgcatcaggtctctcaatgcgacctgggaatcttcaggctccccggggctcccttcctgaacatgtattgatttccctcctccccttccctgcttttgcactttggatgaaccttgttttcgaagaacagtagaaggtaattttcctgtgcttgccagctggcctgtaattgagcaatttcagtaacacccactgtaaagtctaattgaagtaaacaggaaaacatgatttacaatctggacagcaagtaaataccagggtgcaattaatttttacacagagcagcagattctaaaacattttcctgtgttgagcagtttgtttctrattacagattggaagctgcttttctatttaatactgttatcatgattattttttactttttgatggtgatcttcaggttccttgtatctgtgtgactttctttgaaggtttagccacatggggaaatagaatcagagacatgagtttataaggagggatttttcaaacctgaactgaaggccgcactctttcttcatttgtttggtgggaaatgatsgtgggttatcggagaggggctgcggataggctgtgcagaatggcgatgctgagtgggtcccatcactgctggaagctcagtttagttcattctggggaagatgacaaaactgtgaaggcctccagtgttgcaaagatgttgatgttgaaatgtggcacttccaaggaccagaaatgtatgcctttttttgggggcggggtggggacggagtttcactcttgttgccccaacctggagtgccgtggtgcaatcttggctcactgcaacctctgcctcccaggttcaagcgattctcctgcctcagccttacatgtagctgcaattataggtgcacgccaccaagcccagctaattttttgtatttttagtagagatggggtttcaccatgttgaccgggctggtctcgaactcctgacctcaggtgatccacctgcmtaagcttcctgaagtgctgggattacaggcatgagccaccgtgcctggccaaatgtatgcctttttaaatggaccctactgattgttccattagcttctgttcataactggttggagaagggagccagcatgctgactgctggtcccttgctgccagttggctgcctgagggccgacccctttggtgttggatgcggggctgaggcatgttctgacccttggcctactttaatgtatcctggtgtgtgctgaagctgcctgtagagccagcttagtggtaagatgtcacatgacttgagtatgctgcagggacagcagattgttagccacccagaccctgagatagatcttaaaggtatcatgcggctggaccccaatttgttgttstatccaccaggccattttacaagtgaggcagcccaaggctggcatggcaggggtgggcggggggactctgagaaggtaactctgggccttggtgactctcccagagtgcatctcctttagcagagaggtggttccagtcccctgggatttccagtactgtgggaggggtgactctcagggccctcgtctttcttagtcctgaatctttttgcttttcttttgtctttccagggagttgaccacatttggccatttcccagaagggccccaccccaagggtgagtggccaatggggagctgtttctgctgacatcaattccccaggaggtactcaccccaagtctgcccaagtgaagatggctgatacccaccctgggatggagcccagcgcctgaggcccttatcatggtgatggtcctaagtgaaagcctcagcacccggggagctgactccattgcatgtgggaccttcagccgtgaactggtgaggacctggcaggcttcctgctttccatgaccatttctgaggcctgatgtacagacagggctgtggactgagcacctargcttagcaaatcgagtccagagtccccaagagcaaagctctgtgaggcgtcccgggctggggcaacagggcacaggagcagagcttgactgagaacttgctggaaggaaggaactcagctcagatttgasgtcatctggtgaatgaggaggggaggccatcccctggtaaataacagcaagtgtgattctgccgcctgccaagccaggattgacattccttctgtctccacccattaagggggggtggtttccagagggggttggtgccctgaatgggggcccagataagcctgtccctctgaagggtggtgctgcctcaggaacgtcgagagtgggagatgatggggaaagaaggtgtggtgagctatggcaacagccaccctctgccaaaggtggttcaccctggaccaccctggaccacttggtggactagcgcagagaggtagctaactcggccttcttagactacgagcaaaacaacctccagtagctgaaccctgtcagcagacctgtccttccaagcccagttcctcagatgtgagtgcaggctgctcccctgtggagggagcgagaagccacactcagtcataagcagtcttgtggagatgggcaagtcctcagaactctctgcagcttccgtgatcaggaaggggccaactgcccagggtcaccttgcccaggacccctcctggcgcccttcacggctcctcgtgaggacccacgccaagcctccttggtgggccccttcccctagctcatgccagtgaaaccagaccttgagcagatagacctaggtctctggctgtggcaggagcttgggaaagccaccgagatctgtattctttccgcaggcctcacagagcgccttccgtgtgttgggcaccaggctggaggagttcagggaacaggatgagctggagccaggccctgtactcctcacccttgagaagctcgtggtctagagggagggtgtctggagagctgtgaatacagtgacacttgaggatcccatgactaagaactcgcagctgaagcccatgggaagcccagggcttgtagaggagcagggccagcctggctgtagcacgccagggaaagccttgcggagcagggatacttgatttggccttgaagggtgagaagaagtggcttagaaaccgttgggtccagcctccttgttttacaaatgaggcagctgcaacctggagcaggcagtaactgcctcactggctccgcctccgccttccctcctgcccctctagccccacttcctgggcctgcattcaggcctctgcctgytgcctggtgtctggacgccagtcttggtggccctccctcagtcaggtctcttcagcccttaccagatgtgacactggtgccactctgctcatgggcctcagcctgtgaggtctccatggggtgtcacccccagctgcaaggatagggactcagctttgctcctccccatgtccccagcactactgaggcagggcagacagcaggcacctgaggtgtgtttgctcgatggcagccttggtcactgcagcgaggagtagagctgctgtgaccattcagctcttctgctaccaccccatcctttccagttcacatttgctgtgtgatgtgattacttctcaccagccccgctgccaccaccctggttccacctgctgttctctcgcaaggattcttgtggtaactggtcccctgcctctggctctttttaacctgttctccacccagcagccagagagaatcccagtcagagctgtccttctctgtgtagcagcttccactggctttacactgaatgcttagcaaacacccagcccttactaggatgtacatggccccatatattcttgtccatgtgactgctttgacctcatctctgccactctgccccctctgctcggtccccactggcctccctattccaatatgccaagcgtgagcctgcctcaggcctttgcactttttccttggcctggagccctctccccacagtaggacacactccctccctccttccttctctggctactcaacctacagttcagtcccagcgccagcgcccaccccttacccccaccacactttctctcctcttttcctttttccctcttgggcacttagcacttttaaacatgtccctatggatcttgaccgagtccttatactagaatgggagctttgagaaagcagaggatgtctctcttacttgttgttgaatgcacggggcccagcccgtggcaggtgctcagtggatgtttgtggatggatgagcttgcaggttcctgtcacctggcctcttctcattcaccattgtcttactctctctctggctgctgctccagttcacgactgagtgggtgcgactagagtagctctgaccaaaaagaagggacctcaagggtgaggagccatctggaggtcccgagggaggagccctacccgggtccagctgtgcagttggctgcagtggccgcctctgtgcttggtcccttctcagggtgggactgcctggtgttggcttcagagttggttccaggacatgtgggcccaaggtcagctgagctgctcttccaagaggtgtggcctgagcccctgccaggaggagcacggcctcccagccctggccagggaaggaaaactcatctcagaaagggaaagcagtcaggggagagcaggcggctttgctggaagggattctaccatgtgttctcttgtggccacacagattagaatctgtgctttcttcctgaactctccttgctttgttggaaagtatccttctttctgctgctttttgttactggcctgtccgggcccagaaccacccagtgtgcagtgctttgggtccatctgtggtcttcctcctcctcttctctccccttggctccagatgagaggtctgttgtggggagcagccctgttggagatgggctttctcattgctcagtttgcttatgcgcccagaacacattgactgggcgtcagtgcctggcccggcctggctcagcgctgcctgcgctatagcgtgggccagcaggaaggtgttggaggtgcagctacactgagggtcttgggaagtgtgttagttcatatcatgttgctatgaggaatacctgaggctgggtaatttataaagaaaagagatttacttggcttatggttctgcaggctgtataagaagtatggcaccggccaggcatggtggctcacgccggtaatcccagcactttgggaggctgaagagggcggatcacgaggtcaggagatcaagaccatcctggctaatatggtgaaaccccgtctctgctaaaaatacaaaaaattagctgagtgtggtggcaggcgggcgcctgtagtcccagctacttgggaggctgaggcaggagaatggctcgaacctgggaggcggagcttgcagtgagccgatatcacagcactaccgcactccagcctgggcgacagagtgagactgtgtctccaaaaaaaaaagtatggcacctgcatctgtttctagtaaggcctcacgaagcttccagtcatggcagaaggtgaggggagaataagtgtgtcacgaggtgagagagggagcaagagggaagggaggaggtgccagacctgttaaactaccagccctcacatgaactagaagagcgaggactccctgatcaccatggggaggccaccaagccattcatgagggatccgctcccatgacccaaacaccccccaccaggccccgcctccagcattgggggttacatttcaacatgagatttggaggggacgaacatccaaactgtatgcccagaggtccaggtacctcctccctgtccttgagcctcatgccacctgctgaggggcaggggtgcacccatttctaccccattatacaggaaggaaactgtggctcagagagcccagggaggggctgccctggtcacagatttcaagtccaggcccttgtctgcttcccccagcaccttctcgcatgggccctgttccagaggctgtgatcgccttggagcccctccaggccttggggagagacacacgatgtaaataactgaagaaatactgaaaataatcttagtctagtgatgacatccacgggacagaatgtgagataagctgatgctagcatttgctttgaacagccagcaaaggttcagaggaagttgacggggttttgctttagcttcctaaactggtaacatcatccccgtgtaaataccatcaagataacaacaggaacgatggaaaataatttttcttttgttttctaatcagactaagaagataacaagtggaggtttaagattttaaaggaaagcatgactgtgggggaggccgggactggtatcagcataggccactttggaattatgggagcaggccccagaggcgcagctcaccctgggtccccagagtcaggccttagtcacagagcgggaaagtctcaatgtgcaagggaaagtcaccagggtcctcgcaaccctgggtgtcatgtggcactggaggaggagctcgtggccaattctgaggcctgttgaggggtgtgagsactcggtctccctcccagccttcttaggggttcatgccatggttctggttcccctgttttaaaaaactaaatgctggtgaaacaactgtctttccctcaaagaaagatgtgggaaaaagggraaaaaaggactgaccagtgctcagcattttgcctttcccagcacagggcccacctgcctggggggagatggccctgaggctcagctgtgcccatggccctggcttcgcttgcactgccggcagccatggctgggtccagttcccctttcccccactctggccagtgccttcctctgctgagtgggctcttccttccagtgttctaacattagctgctcccctggaaggcagcccagacgtttgaccttggagcactgtgctccctcagctccttcccgcacgcccacactcaggccaagggcctgttcttttgtttccagagtgaccacctcccttggccaggcccgctcttctttctgcagcccatcctcccttaaggctgaagaccaaagggagctggtggctggctgctcctgggcagagggcagcatggagctccaggctgcctgactttccacgtaacaaccaatacttgtcctttggaggggctgatctggtagctagaacaagcacttccttctgtacttgtcagattaggatgccaaggctaaatgacttttcttacctgaggagttagtggccatgtcaggccttgcacccagttgcctgggcactggggttcttcatacttcgggccatgctaagttggcactttgagctcaacagccccagccaggatctctggcaggccccaggctggcctgaagttagaatgtgggagtgcacagggtccagggcagcctgatgcctttcaccctgggcaggcagagataccaaggggcctgcccatgctttggctaatcccagagcctcaggagtcagggccagcgtatctctatccgcatctttgagagtcttcacacaaaggtgctgttccctcctcagcttctctttcttgtctcaggcctggatctcctttttgctttcgactgccacggtctcgcggggttgcatttcggaagtgtgggtgctccactcgttcccccgcagggcatgagcgcgagcctccccctgttgctctgtggctccctgtaacaccgtgtcaggagatggaaaaggtgatttgatttctttagtggataatgtgcagagcaaagttaccaagaaccgtggttgtggcctggcattttctgcagggccagttcctcatttggagccttaattgtgtctttatttaagccagggctgctttctttagtcagacagatggccctgaagcctccatttgatttccagcttttgcctttcctacgaggatctaattccaaaaaccttctctcgtgatctgaggagtctcacagagacgaggccctgccccggcgtgggctcgggaacagaggcttcacggtgggagaagcacaaaggggaaatgtgctctggtcttatttcactgcagacctcagctagggctcgggtgctcgcagagtgcagacactgagtgtcttgtgaaacctcagagggccgaggggttccctcggmctggtggggcctccacaccgtgattggctcattcttcccactgtgggtgcaggaggttcaaagtgttggaaaggccgtgtgtataggaatggtaaataccagtgggaatgttagcatatactgggaagcctggggaaaaaaaggccctggccaacctagagccaagcaggaactctgctggtttgcccatgtggagttggaccagggaaacctgccagcggtcagggtacactggggcctggcaccctggaaagctgtcagtacatgacattctggcctggccgccactggcttagcctcacggatggggctcagaaagcaagatgggccgtgatctggtcttgaggtcaagcacgaaatcagtcagggttcctcctttgtcagcaccagaggccatctccagctaactcaccccgaaagagaactccctgaagcacagggcgagctcgcagggctggagaggagggggccagtcgggcctcagaaagggcagggtgggagcagctgggaggactttagaagcaggtgctcacgggcaggctgagggcctccttcctgggcggatcagccccagctctgtggttcaggagtcagccatggaaccagtgtctggtcagccaggcttgagttctgggcctagcctggggccaggggaggtggaggcaccttggttgacagtcccactaagacatgatccagtgacgatgaaggtatcccaattcagaattggggtgctgctgacagaagaagggggccgcaccactgggctgcgcggtttcatctgttcagtgaggagcaagcagtggcttgcccggggtggggaaatggagaagtcgttctttcgagttagaaaatcatagtgtgcaccattgctggttcatgggaacccttaggtagagtgttggagaccggcatgaggaggccaggctagcctgcagggcggctctgacactcaggctggcctctcagcccttccccactgaggtttgactttgcgtgaggccagcgattttgggagacagtgacttctgcccagtgaaaatccacttccgttgcctgacatccactgggtgtgtggctgcaggagtgggacaggctggcgctgacaggtggctgtagccatggtgcctgctgtcagctgggatgttggaaccaagacagccctcctttctcaagaagcttccgttcccatggagcagagaatcagtacaggaacagatgttctgatacctgccatgttcattaaatgaggcgatgggagagagaaaagcaggtgggaggcaccgctttagccaggatggtccggcaaggccactgaggaggccacagggcaggaacagtgcaaagcctgctgcgtgaagatcccggcacaaagcccctgagatggtagtgactggcctggccccactgggtggtgtgagtgaggaggggagggccagagcaaggttgggggtactcaggttggctcatatggggccctgtaggctgtggaggagaggtagtggccgggatttgattctggttgtggtgggaagttgttggaacagaatgacgtggtctgatctctgctttaagaagatggctctgggttctggatggagggtggggaatgggggccgagggtacaggctgtaagagcggttaggaggggcgttcactggggctggcagtggctgggatcagggccaatggtggggtggtgaggagtcagttttccaggttagaaatggcaggccactctggggacctgctgcagatgctgataagtcctcattgaatgaatgaatgagcaagttgagtgaatgtatgaacgagtgcctggggtgctctgtgtgctggcccagtgctgcctctgtgggcagacagaccccagcatctctggcagtgttccttgcgaaggcctgggtcaggagggccctgaggtcccccttggtctagaacatgccagcttggtgagaggcggccagcaagcactgttctgctggccaggcaggggcggctcactacgtggcttcctgctttggtgtggaaagccccaagccctcctgcatgcatgccagtgaagcacgcggggtgcttcagtgttcctgttcaattctgctctccccagcccccatcctggtgtggcctctctggcctcccaccctgggttaccttctcccacctggcaggcacgggctgggggccggggttccccagggggtaatttccttgtgcccaggtgttcccttagtgctgggagctgccttccttggcaagcaagaccctggcctgacttccctctctgagcctgcaaactgggcgcctgcctggcgtccacaggctgagctctcrgctgtgcaggcagtgcagccccagcagcagtgctctcatgcgcttgtcatccacttgccattggatgacttcggtgtgttctcagctgcacctctcagctgggattgtgttgggggatgggaggaagcaggtgcagccattttgaattcttcccagatatttccacagatggcggtagaggggatggttacatcactgtggaatccaggagggtgactgagcctgatgatactgttaggatcattttaaactgaggagggcaacctgtaggaggactgccccgttccccttccgccctagaagctcctgtggtcctcatcaagtgtctaagcatcccccccaggaggctgccccgacctccaccctcatcccagcacacttgccctggacatcccctccagccctgatctccctgtggtttgtctgtgaccgtcttccatgaagagtgagccctccttcacctctgtgtccccaggttggtcagcatggacccttagtaaccccgtgggatgaacacggcgttgaccttgtgcagaggtccctggattgggtggatggggatgaagtgagggagctggtgccaggtgcttgccgccttcttacctggaggggccaggcgttcctagtcagccccatcctcctgccaggccttaaagagccagaacctgggcccttgtccacttaccagcctggaagtcttgtctgtttgtgtcattttgatatggggagtgttcagggttccttttagaagtcagagccttctgtgacaggctcatttctctggggctaagagctcctttcatcattgcatgatcaacccccagcacagcccgcctaggaagaatcaccagcccgtgcccactgagcgagtgggcgagtgagtgaggaagccttggagcacttgaggcagagctccttcctggggctctggctgggtagtctctgctcatgagaggaccgagcgagcctcttgacctgggtatcacctagcatgaggaacccccagaatattccacacccagcttactgtgtagccatggagcaagtgccctggatttggggttcttctaggcctcgttggcctattctgcctggtggccatagcattcagttgagggtaggcggggggcatcagggaagctgtagaatgtttgcagtggaaagggaaaccattgtggaaatacagggccaaggagttcaaaagccatagctgttatgttgagaccaaatataacccttgagtttctgtttcagttcagagaaaatgcctcaaggggactcgatgtagccacaaaacagtctgcagagcagacgccagcccttccgagctctccccatgcttctcaccagagcgggagagctgttctccctggatctggaagggaggggtctcggagtcggacctggggccctctgctccctacttgaggttcttcgtgtccccagggaggtcccctcctctcttggtctcttctcagcccagctcagggaagcttgttccactgtttaccatccatcctgcccccgggccgcctccacatcacttatgtggaaaaatcccctcgtgtcagaagtcgtggggctttctgtgtgttttcaaagcccattaactcgatggactccataactcactagagacttgggacaaaaaatctgggcctaattttrtgcagatgttttctctttgaataccttttcctcctttccctgatctgacattggcaaaggacagtcacccttttattgtgactttagaagggatcagtagagtcagtgcaaacatgcttcctatgatttgaagagtgaatagcttttctggttgttttcagcacacgccaaagaagatgagtcaaggacctacacttttctcttgtggaattatgggtaagtactcaaggccatcctggaagctgtcctcctagtccttccagccagggtctgagtcctccaggtgagacactcaaagcactttctggacacaagttcaaaaagagcagcccygggactcttctgtgtgttttaactattttggtcccctacggtgcctgagtgaagggacaggcactggtgtgtggtttacaactccaacattgagaatttctgtctgatgattaaagtaattcatgttgatttttttcattcagaaaatgcacaatagtgtaaagtatgcaataaaaatctctcgtagccccaatgcccagggagagttactgttgatatttttgtgtatgtttatgttcttagcattttttatatagcccattccacgatgaacatataattatgtaaaactatatttgtttgcttttttcacttggagtagttaccatcatcttcccacagcattaaaattgttcattccatgcattttaatggtctacagtaccgcattgggtggtaaatgtatcagaatgtctttagtgatgtaactacatctaggctgttgggtcaagaggctgttttatttgctgttgtgatgaacagtggctaggtaagtgcctaattctttgtctgcctttgtgatgatttgctaggatagtttccaggagtggaatagacaggctggagggcagggacatttttaaggctcttgattcattttgctgacatgccttcmagagaagattgccttgatcttctgtttctgtgcaagtgtgaattactgttttttataggcggtaaaaaagatgaccattgattacttgatgcttcagatgattgggcattgtttgacctctcagtgtctctctgtgrctctccttgcccacctttggggacgtcttgccggatgagtttctgtaacgtctgcgtggactcagaaaccactctcagatgatagatgatgatgactgtgggctttcagattcaaaggttactttggtcagacctcagagtctcccttgcctttccttctcggtcctccctccatgtgcggtgttttgtttttcttcttcagatacagttgccatagatgaggtgatgtgtcagattgagcactgtgccaggctccttacatgctgggccccgctggctctgccagtggcatcattcacatacgggagaactgaggtctagtgaggtggccctctgcaaggtccctcagtaagcggagttggactcaggtgggtgacgaagggagactgttttcttctcaaccacctgccatggctctgggacacctggcggtgctcttgatgctgccactgaagaagatggagacagggagatcagctggccctggttttccrtgtgacatacttgggaggcccgtccccacaggattgaatacctccccggtggtttacagctttcagcaaaccctcagggccccagacacatagctcagaagcctgcctcctcgcctgcttcctgggacaacctcacctttgcrcttccttcctgcgtcatgctgggaaagagagaggccccggcatgcccagcccctcaaccctgcctaggctttagctgtcaaccgggccagaccagtaaactgggttgtggagatgttggtctttatttcaakgatttctagtctttgcactgtgtaagttataataaggtggaagtctggtgggtttgtgatgacagagagagtcgcccttgtagggccaggtcttgaggcccagagaccaaggcagaggccccggagaagggaggtgtgtgggaaaaagtccagatggcccaggagagtctatcggaggctgcagagcccagcaacctgctttctaccggggaggccatggtttccaggagggactacgctgtgtctgcagactcctgtttacagagtggctctttaggaagtgctggctgggtcccaatgcctccgtcccaggctcttctcctcttcagcagggtcctgtcttccttctgctctgtgggacagtgccagggcactgccaggcagcagagggagaagcggggagctattgtactggtgggaggtctgtggagtccccttgttctcctctgctgctctctctccatgggtctcatctttctgttggtcggcccctccctaattcaggaaaaccctgacctgcatggctgtgcatcactgacgtgtttcactgactgcagtttgttttcattttcagtggcttgctgtcatagatatgacttgagcacctgctgtgtgtcaggcacctggtgagggatagagtgaatcagaccctgccccttctctcagggagctttctgtctggtggaggagaaagatcaacgaacagtgaattctgcactgcttaggccaactcccgtgagatgtggaggcccttgagctatggggataccaccccatcttcccggctaggtttcctcagtttgcaagttgtggggatttaaggagacggccacacactagcacacatcctccctcccacctctatccctttcctgcgcttgctggagcggagcgggtgtcagcagtcaggagccttaccccgtgcactctgtctagtggaagctcaggttacctctccagtcctccgtgtgctccatgaactgggagtgcactccacccaggcagcgagatttcatctgaggtgtgcctgcttttcttttttttttttttttgagacagagtctcactgtcgccaggctggagggcagtggtgtgatcttggcccacggcaacgtccgcctcccaggttcaagcaattctcctgcctcagcctcctaagtagctgggattacaagcgtgtgccaccacgcccagctaatttttgtatttttagtagagacggggtttcaccatgttggccaggatggtcttgatttcctgacctcgtgatccgcctgcctcagcctcacaaagtgctgggattacaggcgtgagccaccgcgcccggcgtgcctgcttttcaacagtggggaagagaatactctgaggggccggctagacttttcaagagggttttgggcccttccagcgctggacaatgctgtgcgaagataaaacaccaaattatcataatcaccaacccccagcctgtctcctgaagataaaggactcatgttctggtgctgatcagtggaattctcccatgagagctggggacagttggccctgtgactcaggattttttcctcctgagcccccatgccagggtcctcgctgggagccagtatgagttcaagtttcacaaatgttctgcagaaaatctgggcaagtgcagtagagcaaggagcacagcaccctggtcactttttaaaatgccaccctttcaagtagctcagcctcctctgcacccacttagataaaacacataactaatataaattgagtgttcacaacaatgcctttttttttttttttttttttttttgagatggagtatcgctctgtctcctaggctggagtgcagtggcgcattcttgtctcagggcaacctccgcctcctgggttcaagcgattcttctgcctcagcctcccgagtagctggaattataggtgtctgccaccatgcccggctaatttttgtatttttagtagagatggggtttcaccatgttggtcaggctggtctcgaactcttgacctcaggtgatccacccgcctcagcctcccaaagtgctgggattacaggcatgagccaccgcgcctggcctatgctttttatttatttatttatttattttaattaaaagcacttcacgccctgtgattgcaagctggataccgggcccctccccactcttgtcccctaccccagtttaggaacttgatacagataagtggttttgttcttctcagtgtggaagagagaacaaagccagcgtgaagcgtgggtgggagaagcagatagggtagagctgagtgctgcccagccagccctgcaccagggctcagtgccccttattagggtgccagctcagccgccaccacagggctcctgccagcggaggctgttttgactcttggcttcctttctcatcttccagagcatccccagtccaccttctttgctgaaatggaatttcctctacaaagcttctctgggaaagagccatttatatgactggttcttgtgctctcgacacaggaaacatgggtcaggtggcagctccgtggtgcggcccaccccctggtcagccggctgggtgagggagccagcccttgctcctggctctcatttctagtgggtacaaagaggggcctgggctgtggctgagagtcatcctgtgtggggagaagcggggccacgcgtggactctcagtcaaggctccctccacatcttctcccacttgcagtgggggacccagggtcacaygtgtactagtttgatcttttttggtgaaacagggcaagtggagtgagcgcagtctccattcaccacccttggctaattgcagccattcagtgcatttgtattgcagggacaatggacaccacacattccattttcctcagcactcaggcgaggaggagacctggaaatcacatcatatgtaagaaagcgaaggcaataccaattattttaaaaaggctactaggaaaagtcttgtaaatacaagtcaatggacagaacaaaacaattcatatgctaaaaaaaattggatggaaacccataattactttaggagttatggtaataaattatttattaatgtaaattatttcacaggcaaagaacatacaggaaacttgagcagaaggatcatacattatgtataaaaaggaattgtaaaaatattatagcagccctccttgtgccgccccagttcaggtttgtccgcattttaattataagcccttactttcagggtttaattacttggctgttaaagtctactctgtacataaaagggttgttccctggggcactctctgtattaatttctacagggtaaaccagttggctgtgttgagctggggaggactaagagattttgctttgagatttggtagcttttggtctttaaactcagccactgtttgtcatggaaagtggaaaatgattgcgcattgcaggaaaagcgtggccctcagagcttgagtgcttttgattcttagaacaaataaacgaagaatcaaaatgagtgacagcaataacaaaatcagagcttctcaggcccaatttttggtctctgccactttttctcttttgcagagacagccattttgaatgtgatctttgggccaggtcctccagtaagagactgctcattaaccagtgtaggctagaatgagatttgttttcattgaaaaaaaattacatccatatgtaagtatgtatatatatatgactttttagggtttgctttattatttttatttttattatggtcatatgtgtgatttttaaaaatctctaaaatagtttgtccataaagggtatgtaaattcttccttgtaccattcattggtttcaggcagtttttcaggaataataaagcacagaatggaagtagatgtaaaatgtggttggcacatggtaactgttgccagtgacgagtgaagacagagcttcccagggctgccttcttacccaggttgggctcacctgatggggaggggaccacaatagtgccagaggacagggaatggccactgccagcctgtctgggtgccatgccttccacatgaagaaatggtcaagttaggcagcctggcccaactgcaagagcatgaccttgggtctacagactaggttgacgtctgggctctgtcatttgctggatgtgtgtccatgggggagatgtgacatcgttctgaagcccagtttcccccatcagtcagatggagattgctgtgacaacccatgagatgagtcacgtgcttgggatgcacattcatgctctttctcagcttcagcaaggaccctattggagtgttagctgattaacagtaaatatgcatttattgacagtttcgtgaaaagctctgcctgtcgccagttccctcgtcggtttaatggcgccccgctttgctgtgtacatcagttaagagatgcatcaccagcagctgcccgtttcacttgctctgtgcacacccacaatcaggatggaaatccagaggagatggaccaaactgaccttgttgtcccttcagagttcttgttgccagtgcaaatactagctgttccctgtacatttatgaacgcctgtgggagctgaggggtagaataggaagtcctggtcagacccaaaagggctgtcacaagaccctagtctacccagccttgtgcagatggtgagattgwggcccctcttcccagtgccccatctggtgtggtttttaactgtgaggatctcactgggcatctttttgtaagagcaaagacttcccagaagcagtggcagctgccatgggccaccccaactctgctggtaagggcagggccctggtaatggctctgaaccccgatctttgtccttagtagcttctttgtcacctcccagagtcctgcagacccgcctgccttcttccttggatgtggggcctgatggtgcattacctctagccatcggaatcccttgttccttgtgccttgtgtgaggaacttggtgtcctgtgttgctgtccccgaatccaagacacagctgccattttacagtccatcccaggtgcgtgggcaggacctgaagctgaggcctggcaggcaaagcccgaggactttttgttcctgacactgctctgaactgagtctccttctggtcatacaggcaaagagactctccagggagccagaggctctaaagtccatttaaaaacagatgagacgattgtgggggagctcatgtcattgccctgcttgtgtccccccsacccccatgttcttttcgtaagatcagtttagcaaaaccgccttcagaaagacacctcggctctcttgattttcccattgatgggttggtgagcttctccccaaaccaagcatagaatctttgtggccctgaggccaagttagcacaacccaacccacagggcaggggagagatactcattgtcagcacaagtagataggtgtgaaatgtaagaatgagtcagctggttgtgatctgacagcaggcttgctaatcggggcatttcgtatcttggtctgtacttgaggtgcttaaccttttctggaaaccacattctgtacttatgtgaccataaggcaccatcgaaaacatagcacagagctctctagggctataaagctcctctatcttttgaaaatatgaaggtttatagtcccccaagaatctggagccctgggaattttccttcaaatttaagggtaggaatggaaataagaacatttgaggtcaaatgccattcgtattcctctgagtgtttttcttgcttcaagctctaggatctgtgcacacagcagtcttctgcccttcttagtcaaacggtggcaggaccagagccttgtgagtgcgaatttgggaatttgagtccttgtctctgcatatgtaggcaactcattctcctgttctttgtggcatagtcaaaagtcagaaactgcaagctcagtcatcaaacctcagctttggaagagaccttgcttacctagtctgtccaagactgtgagagaactgggcccagggatgcttgtgtgttcaccctcccatctgcaggcaaaggctcttgtgtgtttacgctacacacaaatgcacacgctctcgtgtgtatcatttcagacttgtgaagataatgctcagtggggacgtggagaagctttacatgccctaaaggctaaagcaacaggcgcagcatagaactgaatgggctggtgccatgctctcaggctgtgggccatcgcgctctgctcaggtctgccaggggcttggtgtcaggctgcagatggatggggggcccttctgcgtatctttaggacacagctgatgggcccttgcgtgttctcagggagaaagtgggaggcttcacactcatcttgttcataggagtgagttagcttctaaggcctttgctagwggctgtccatcaagagcatgttgtgtagcttgagaaggaagccctgagggtccccatcctgtcctgtgaaacctctgatgggtgaagtgatccttctccatacttcttcctggaattagcccaaaccaaaacataaacaccaactttcagtgttgttatgaattcaaatttgtagagaccagaattgtcaaccctcctgaagcttctgggcagtggtgctggatggtctggatgggccgccattcggacagatgtttgagaactcagttctccatgtcatctgctttccagaacagcatttctcaacatttttgcattgaaataacctggggagcttattaagatgcaaatgcctacccagagagactctgatttaccaagtcagagacggggtctagaaacctgcattttaacaaacacccccaaaggatgctcctgtaggtggcccagaagtcacactttgagaaatcctagtcagagaagccaggtttccattccagccggattccacagaggctggcaccctgttgcagctctggctgagtcaagcctcagctaggagagcgttttccagtaccgttaattatccttatgatgactgctgtttttgagagcctactctatgccctgtatgagatgcctatttaattctcataatagctacgaggaactgagtaacttacagagctgaggtttgaacccaggtccttgccctttccactacaccaagtgactgttgctcagtagactcctacatccatgacaattgtgacttgaaagagttatagttgtttgtgcagaagtgatattgaatggagggggcgggggcaccctgtatcctcttctcggaggcctaccgaggccctttgtatggtgtgacgtcagggcctagcgcttggggcagtttgccatgaaaaattagcttctattcctgtttcttttgtctggtgatctgacccaacaaatcgctttctgttccctgagcgaatggggaaaacacagggctaaacatagccttgattgtttttacttttctcgtattgtacttctcaaagcgataaagatagaaasaattacaatattatctgcctgcagactgagcaagtggtcacctggctggtgttgatacacaatagcagtgctttgcttttccaaagtattttagacgtgactctgtcaaccccatctccttgctgagtcacacatggccacatggcccaggtagggcagacggttcagggcacagtcctggttggacttacctggccaaggaagactcacctttgccaaggacaaaagacaggtgagtcccagagaacaccgcatcctcttgtagcttttatctgcagtttgcaatccactacctcattcatgcaccaccaactaaggtctgctgtgtgccctgctctgtgctaggcactggggagccacactggggctatgcttgagagtctgtggcttaggaggagaagtagatgtgtamgcagatcagtaattaaagttcaggtacatacgtgctgtacgatcacagagctaggagaaaggtgtatcttcagaggagctttgagttggctttttaaatgaggagactcttggtgaaaggaagataaaggcaggaaaagaacggtccaggcctttgcaaaggtgtggaatgttctttgcaaaggagtgaaagagctgatgtttgggggaagctgcaacttctcttcacagttaaaaactgactcttcgaatcttccctacgacaaagaaatcttataggccttagaggcttactctgtaacacagaaggagtaggtcctgtaggaattcatcacccagctctgatgcccctgggttttggtagttacctcaaggcccagcaagctggacttccagcctttctgcatatagatcttatctgtgcttgttcctgcagtctagttattaaactttagttttataaagaatcgctggtgcataagaattacccttttgggttgtctacacaaagctggggggaggagttgtactttgtgggctggttcaggaattcttcaaggatggttttgactctatatgattcttttctgacctccactgtcgtaggaggtttgatacctggagtgtagggtttgttgtggggaatgatgtggagatgggcccgggtgccagtctgaaatgcttgtcttctttcccggaaacagtggctgacagctgaagcgaatgggccacaataggtgggggcttcagaaagttctctagaggcrgtgaggaggtaggcctggagtagggaggccctgaggggtcccttcaagaagcaccaagatcgcaggctggccatgggaaaggaaggcagatgggagggatggtgtgttcctatttagctggctcccgattccccttttggaagtgatttccctagagatggggaagattccaggccagtggtgcaaaaatggaacagaaaatggtatcctctgagagtgggatcaactccttttcatgtcacgggtttccccgaggcctggcggagacgcagtctgtagtatgtctcaggctccgtgagcaccggccaccctcgctgctctgtgccaagcccattggtttcttcctcagccggccacattcctggcccatctggtgcctcagtgccttgtctcaaaagagaagttagtggccagcattttgtatggcaacttcctgaaaacccagaggagccaacccagcagagggcgggctgtgggcccccgctccgaccctggctcacttcctgagttaagcaagggcacagcacctgtgggcttggcagtcacatcccccacatattcgataatacattttttctcataggacatttggagactatagaagaacaaaagagaaaaaataaattaaccaaccagctgtctgccaatccactattaacatttcggtttatttctttcttacctttacatacaacagacatattttgctaaataggaatcacaccctctatacagttttatatcctgtttcttcatgctcagctttatattgttagcatttccccacatcatttaatattctttgaaactctgcttcttcatgctccatgttattccttgataatttatttaaccggcccctactgtaagacgttttaactatgtttaccattttgctgtcactcatcattttgatgaacatcatcatacataaatcttcacttttttcttaggataactttctgttttcttttaaatcagataactgggatagttgtgactgtgtcaacaagagtttctatttcctttaattttactttatagctggtcacggtggctcatgcctgtaatcccagcactttgggaggccaaggtgggtggatcacttgaggccagragtttgagaccagcctggccaacatggtgaaaccccatgtctacaaaaaatacaaaaattagctgggcgtgtggtacatgcctgtaatcccagctacttaggaggctgaggcaccagaatagcttgaatctgggaggtggaggttgcagtgagctgagattatgccactgtactccagcctgggccacagaggcaggtcctgtctcaaaaaaaaatttttttttactgtatattagtttattggactttcaactgctgaccagtgtcaagttgaaactgatttaatagaatggtgaatacccaaagggaatggtttccttggtggtgaagcatgtttgaacaacctaaagcaacttgcaggaagaggtactttggatgatttttggacgtaattgatccaatccagttggaggagcagatattgagacctgctgtgttcaggccctgggaaatttcagagatgagatgaacgatgtatgatgaagaaattggatgtttagcgacagtcttgctttgttgcagctggcttgcctgggcttttggaaggtttctctcctgcatcttcagcttctgaggccctctatgaatacagcctctggacagttctaccagtgtcccctgtcagggtccccagcccctcagtttgtatctcatgaccttggcaggatgcccaagaggaaggagtaccaccgttagctctgctgaccttggcaggatgcccaagaggaaggagaaccaccattagctctgcctcggctttttctctgggctcctggccctccctttggtctgcacaggtcattcccgttgagtcaatcaagtagctgctgcttgtgacgctcagctggggtatgtctcttggtgccctttgaggagtggccactggtagtggagataggtttgtagtccttgctgcctcgagcactcatgggttaaatctcagttttctgcacctgagcccatcttgcctgacccataaactccttagggccagggccagagtcaggctcacccacagtccacctcagcgctgcagtgtagtgaaaagggcctgcgctctggggcctgactaagctgggtttacatcctgtctggtgttagctgtgtggccttgggctagttgcttagtgtcccccaagccttggtctcctgatctggtccaggatggtacatgcactcagggggctgtgtggattacacagcccagctgaatgctcagtgagtgatctgcattgctgagagacccggcgtgcatttaaatacctaccaaatatcatttcaggtttcacttctattcttctcttgactgactcaagccattcacatgtgcatgatttataaatatatataggctcragaaaatagtactaacaggttgttccctgatatcatggcatattttgtaactttgcttttatactgtaaacttgaatacaagaactatgtcaaatttatctttgcatctcctaaaattcccagcacggtgcctgattccatagtagaaaaacaataaatagttcttgaatatttcacaaaataaaggttcgtgtgcaaatgtagcatttcatagcagggttggttatttatttgtgtattcaagtaaagacctgaatacataagtttaagtggttcccttaagtctgtgaagcccaagacttgttcttagagattttaattgctttaagtgaaaaatcgagtgaacacagagaaagtgctgtgattggcagccattggtgacgctgatgttgagcattttgacggaggtgacctaaatcagtacaagttccagcttctattatcagcaaaggctttcaaggtggaattggggtgaactaacctggcagtgccccagccatcttttggccttggccatccgagctgttgagacatctttggttgtggtcttctgccagggcatcgagtcccagtcctgagagctgcagagaacctggtggcacttaacagatgtcttgtcccgactctctcatcagccaggggcagggttcagggcaagtcgatttcccacccataagatgagaaacattttggatgaaaaatattgctttggattctcctgggaggcagtgtggtacactggaaagaaaaccatatcaggagtcccaggggtatatctggattctaggccctgctctgcttccaacttccaactcaaagccttgggattcacttctcctctctcagcctcaatttctcatctgtaaaatgaggttggactggatggtttctaagggccttttggctctaagatactgtgtttgaaacgggctgttggtgtggagataataaagggctggagtgaaggtcttctcaaatcctgttttctccttgtcatttatgaaccagaaaatgacagatggcgagacctggacaggaaatgccctcttcagattgaccaaccgagcaccagcatctgggaatgcctgcctgaaaaggacagctcactatggcaccgggaggcagtgaccgcctgcgctgtgaccagtctgatcaaagacctcagcatcagcgaccacaacgggaacccctcagcaccccctagcaagcgccagtgccgctcactgtccttctccgatgagatgtccagttgccggacatcatggaggcccttgggctccaaagtctggactcccgkggaaaagagacgctgctacagcgggggcagcgtccagcgctattccaacggcttcagcaccatgcagaggagttccagcttcagcctcccttcccgggccaacgtgctctcctcaccctgcgaccaggcaggactccaccaccgatttggagggcagccctgccaaggggtgccaggctcagccccgtgtggacaggcaggtgacacctggagccctgacctgcaccccgtgggaggaggccggctggacctgcagcggtccctctcttgctcacatgagcagttttcctttgtggaatactgtcctccctcagccaacagcacacctgcctcaacaccagagctggcgagacgctccagcggcctttcccgcwgccgctcccagccgtgtgtccttaacgacaagaaggtcggtgttaaaaggcggcgccctgaagaagtgcaagagcagaggccttctctagaccttgccaagatggcacaggtaagagccccagcagcctggagtcaccttggtgctcactggagcctctgctggttctgggccgtcctagacaagcatagattgccagtttcagaaatacccaggagtrggttaatttccttgtttttttaaatcctattcaaagaaagattatttccagttggtttttaaaaagcgtttatttctatttacaagcaaatattccctttcactgtgagctcagtgctaggggtacaagggcaggtggatggtgagaggcggggtgttggtgggcagactcactggaccaaacactggtaatcccctccggcccttcactggagccgtctctcccaggaagccacccctgcagctgctgcaagagatatacacacacactggggttcagtgtcccttggattatgctgatcctgagatcagggttgtgggtaatggtttccaagagctagcgattggggggacttattcctttgattatactgttgaaacatgaggccatcaggatgttgtgatcaatatcctctgagctgcctctgcaatcatccttgcccttcactgtagaagaagtatctggccacacgcccctgtcacttggactttatcctctttgtcttggagctctgccttgtgctaacactgatcttggatattgatttgaatgagatgaacttggagttaatactctgtcatcaggagcgtctctgagcccgagagttggctgcatctggttctggctggggatgaggaagtggtgctggcccttgtgacctctgactcaaggatgggcggatgtgatgggacacaacactgttggttctgtgttcatccaggaggccatcggttgcttaatgccacggtctgaccatcatcttttctggacttatttatataaacattggtctcgctgggtttcaaggggtaaagatcttcttgttgacgaagatggtttcagaggggttggttggaggggatggccttggtcactcagcattatggccagatccacggcaggcaggcttatcacgctcgctgcgtttcaggtgggcatagctgacttccttccaagcccagtgttgttctctcagttgggtcttctttccttttacaaagaacatgcagtttctcttcatggggttttgctcttctctcctttagttcctactcccaacatagaggtctacccagaaaagaagaggtgcaggtgtcttaagtctaaagcatacctggccccagagtccaaactttctggccacctttgttcaagagcctgggcactggctggggcattatgggagggcaagatggtggtatgcttgtgcctcccctgtgtcagtgggatccgcttgggggagagcctgaaggggtgtggggcagagctcttgcctcttctcagctagtttccatttcttccattgtggctctaggcgtgtgccaatctttttgctgtgtagtggaacgtttttgactttactagctggacagggattgaacacatttattggacaccaagaggaatttcccttctccagaaaaatttaaataggttaaaagtctggaaaggtgacagatttgggtgacttctgaggaaaaccaagagccccgagttctgggtatgataatggcttcagctaaatttttaatactgagcatattttattacctaatcagctagataggtaacaaaaacaacatgcatgttattatattttactagccacagttggaataacaccactggcatcattggagacatttcttgacctcgtttggttagaaactatttaaaaatacattgctcagtggggctgcrcccagttgtatagatggcttcatcagccccaggcaggcctcccagatctgggaaggtgtgcggagcctgaggaggctgctctggttcagcctgtctgtccttggccgcctgcttggcagtgggtctcgggcacagggaaagtagagaggggcctctggaaagtgtgtgtgcccaaggcctatggccagagccctgaggctgggcccgyggacgctgagccatgcccccaccaagagtctagaccctsgtcagccctctctccatggggctctgcctgctttggctctgccatcagatgatttctagcctggggaggtggaccttgcttttctgtggggccctgagaacgaggcctagggtatccctgtgtatttatcaagagccctggcgagtgcacrgccttgtgcgtgggaacctgatgagctgggcatgttgctggtgtacaaggactaacgtgttgccagatggccagtgaggtgagaccactggccacagaccccagcctctgcgtgctgtggcttcactcaacatttgggaccactgagaaggggttggggtctgctctgcatgcccatggaagcaaggcttggagttgggctttctgtatctttggaagggtaggctggtacccaggtgtggcccacgcttccttccgctgggctctggcttctctttcgtgggccttttgatcttggtttacacattcgcctttgggggtgagagctccacttgtgcattcttgtaaaggcgcccttcgtgtgtgggttctgaggccaggtgtgtgagagcctcgggttaaagctgcagagggccttttcagttagacctttggagcagctggccattctgaaaagctgcagctcccctagaggtcccgactggggcctagagcagatcttgagggtgtgtgtgagcacacgggggcttccctctggccatcattcggtgtggccagatagactgtggttagctggagcccctccaatccgccagcaggaaagggtccagggagagaacccgagagagtaagagggcaggaagctctgaggtccaaggccctgccctcatctgtatccacagttgagttcagcaggagcaagtgccctggggtgtagactctgctagaagcagaggatatcaggagatgtgacctcagagcttgtccattccagtctctcttgaggaaactgaagwtctcttggtccctgtgcccatcagagtttttctgggcatggtgttcacttttggatctgcatttagaaggtgacattgacaaaccagaaggcctccagaggtggggccagagactggaagccctaggcaaattgcctgacatgtctgtgcagcagatgccaccaccgccacaggactgtgggaggagcaagggaaacaacatgtgtggataatgcactatccatatgggtgtgtgtttatrtatgtgtatgtgtccacatctgttgatatgcgtgtgtgtgtatctgtatctgtatgtacacacactccccycagtgcattggctggcacaggccgggtgctgacagatacttatgatcatcgtcacagtcgcaggacttggagggagggtgtgggctgtttctgggtgtctccagaggcagaagtaggagcagagggtggacattcctgggaggtgccctcagtctgctgtaagaatgcctgtttttctttgtttgtccagtgttttccctgtgtttccatcctcccttttctgttcacgccactttctttgtcttgtttgttcatcttcttgcctctttgcttttcttttgtaaatgggaaggaggcctgccctgcagctcagctcagcctgtagtcaactcggtgttcagagcccagggttatgaaatggtgacaattggattcacccccccttgtcagagggagttcgccgtgtgtgagcattctcctgtctgttgcccttgaaactagggtggaaatatcctgggggcctgctggccaccctgccccttcctagccacgtccctggggcacagctgtccagttaatggcagtgggggctcttgtctgtcggggatgagacacacagggtggggtgtagatattgctttcagattgtctttgctcatgtcttctgaaaaccccagtgccaagagagcaggcagagatgctgaatgaggctgcaggtgagccggccatctggatcctgagtcggggaggctgactgtagcgaggaaagccctaatgggggaaatgacgcaaggacctagtccagcagtggccgccctccctgtacttgtaattacaaccacttggttccacagagcaggttgtccaaaggcagctcagaggactggctatgctgcgatccctgcgyaagcccggccccgtgggcctcctgcacagctttcctccttacgtggtgtttttggccctcctggctggtgttctctgtgaggctgcagccttccttttgcacaatgacaatgtctgccattgaaggcagggcccagcctgagggtgtgagttgtttattagcaggacttttgctgacattttccttactgcttttttgagacctggtttgaccacccagcattggttggctcccagcaagacttgagccatacgcggccatttagacatggatcacgtgtrtgtgagcaaagatttcagaaaaaagcaacaattaaaaagttcacccattgaatgcagtccccctaggtgtcatagtccctgctgtatttttaactccaagctggtcagcttgaaagagcaacaaattgtacttctcaacagtgcttcaaacagaagcaagatgtttgtggggaggggtcgggatgtcgaaacagaggtttgattgattgcggctgcccacacactgagtccccgaacctccctgagcaggcctcagaacaggcagcaactgttgtgttagcagatgtttgagggaccgtgaaagctggccaggggcagtttggggtagaaaagaagcatgagagaaaccagcatgccagcacgtctttgggaagcctctgagagccgtattcctgggggtgagtccaggagagctgggtgggcggggccgcagggactgggcaggatgaggggttgctgcaggaagttgggagagcttgtgcgtatgctcatcagtgactcgcagctctttgctggacaggtcctccccaggtgaagccccccagccagcttccactttccatcttttgtgctggtggggccgcctttgagggacagtggcccttsttggtcgccatggggttggctacatgacttcttgcgctggcacccccagcagctgcaggccagctgtgcctttccttggccaagttcctgtgcggcaggcccagcttgcctgcacctttgtgacttttcctgtccatcctgccagtggctgttcaccttcagctgcttagggttcccaccgccctgcaccctcagcacccttcctctcagggtgggaagctgtgctgacggcaagtagaggaattcagaggtggagcaccccttataacacagactgcagacagtgtgaagatctagtgagagaggtaggcatggaaagccctagaaagcccattgcaatgaaagaaatgckaaatacaagtaaaggcaaaaacttttgtgggcaggcacacgagagtagttgcttctgacttagagatagttaggataggcttgaacaaaggaagagagcctgtaagacctgggctgtcagagtttagggatgtcaagggggcagctttggatgctgaactagcactcctccttccgtgctcttgacagacattgctaatcaatcacggcagccttttcaggtgaacttagtggaggtcttagaatcctcctcttggcagtcttggcagccattgctaattgatgggtaattgaacgtcatccaccatctctgttctaatcccctcacttgaggatgaagcctctagagtacaggaagagttggggccttgcccaaagtcacatggtgaggcacctcggaaggtgggaaccctgacctcttgaccccaggctcagtgctcccactgctgtgcttggtcctgggtgaggaccaatcagctggcccttccagaggactgatgcacatggggcatagagagtgtggcagtgagaagtgggagcttcggagtcagataactgggggtgtgtccccattctgccacttttgagctgtgtgccccaggcctcatgtctgtgtctgtaaaatgggaatggcagtgcctgttgctcatgagtgtgggaggaatcatgtcgcatggatctggcacacggttggcactcagcaaatgccagctttgatgaacaaagaaagcccgggcctgctgcagcctttcttctgttgctcccatggtagctcgccccacaccctctgctgctctgggcagtgtcctgggctctccactcttggtgggccgggatcctgccagctgtggcgcatgctggcatcaggcttccaggagactagtttcagctctagtcctcatcttccctgcttcccttccttcctttccctccctttstttcctttcttttgacggagtgttgctctgtcacccaggctggagtgcagtggtgagatctcgactcactgcarcctccgcctggatccctcctttctgtctctagtcacagccctcaggttgcacaagcaatctgcttaaggtcactgggatcggggccgagtgttgccacaatagctttgatctcctggggaagaggagttcatctggggactgctaaggaggcagcttttagtgccacttggtgatttccacgcttcaattgagagccatcctgagcagagaatgtttgagaagctatgagactctgggaggccccggctctctgaagtaggggccctttcctaagccagccgctcagatgagagccccggccatgctgggagtgctcttggcttgccaggccctgctctggtgctggcaaagaggcttgggaggccctagcaggcgctgcccttgggaggccacagcctatgggccagagggagaacaaggccttaccagctgaggcctcaccacatctgaggacatcgccagtcttgcttcatggaagccagagtaagaaaggcttgtgggtcagctggctcttgcccctttgactggttcaactccaagggcccacagaggagggtttagagaaaccctaatgtcgttcccaggcttctgaaggagaagcagggagcgtgggctgagacgaggagacagagggctggtgggagagcagggcctcagcctggagccctgcccatggagtgagccccatcctcatcctggacaactgatggaacctcttcatggttcattttccccatcctcgaggaagggtggcgacaccctctctcactgtgttaaatgtctcattaaatgaattcatttgtatgaagcgcttggagcttagttctgtgtgcccaggacacgtgctcagtaaaagttggctgccatattgggagtcacactttaggagtaaggggagaaatttggcaaaaggaggggcctgctgctcatccagtgtgaactgtcctcccctcaggaattctttgtctctgcagcgctgaggtgctctgccgcatccctgctccccagaagaaggcctcacctgagggcgcagctgagttgttgagcggtgctgctggggtatgagtcccgggctctgtaactctgagggcagggttttgccttattgccacstggtagaggcctctcatatcctaagggaaagagaggtgcactgtcgttggaacacagctgctgttggagtcagaagagctgggtttgagaggcactctgccacctggctgtgtggtgactgtgagcccgttgccctgcttctctgagccttgggtttctgaccatgcatgcatctgcccaggtgtagccatgggcgtcaggttatctgggaagccaacacactgcaggttcctagacgttgtccaagagagtctgaattagcaggtctggggcagagccccagtacctcggggtcccagaagctccctakgtgagtctggggcttgtgggggcagcagagatgggcacattcctagcccagtgactccacagatgcccagggactagttttgtgtcatatggagatggcattgagagttcaggtccctcagtcaggaggtaccagctcagcctggattaggaagggcctgacctggaggagggatccaggtcctagggcgagtgcccactgagctgctgtacccagcagagcaatggtgtccccgcctgccaatgaaacttcccatgcaggagggctcggggttaacttatgctgagtcgagtacaaggcgctgcttcagaaatgtctggaaagcctgttctagtatatagggttgaacgtttccgaggcaagttctcatgggtgggttgttaagggcaagttccacaccctgtttgatatcctgccttgtgtgcaacggcagagtgaatgaatgacaggaaccctgagtgcagagtagaagcattagagggttttaagcaggggagcaatagcaccccttaaaaagctcctttgggacaacagtgagcagcatggactgtaggttctgggggaggtggggaggccaggcaggaggctattggcaaacatgaaggtgggctagacaagggtgggggcagtggaagtggtgataggcataaggggctcaagaaatgttctcgaggtgaaagcagcagggctggcttccaactcaccctagtcataggcctcactgggcagagaatcaattatcctaatccccaaaggtggcaactttctttaagctaccctgtttagtgtgtgctcattgtaagtccctcttgttatttaacctgcagccctcactttgactgtatttcttcttgatctgttctcagtagaactgaaatccagtggatcaccatgacctattttgtctctgtatgaaggtatctatgggactgtcttaccccccagtccttgcacatctgtgatttgctagcccagctgctccttgccactggggaggccccattccttaccctttcctgtcagccctcagtttgcaaacctctgactcctttgcccaagcttctctgttcttgtccatttgaaagtggctgcgcattctgaactctgggctggagaagggctgggggcagcttagggccacaggaggattctttcatggtttctagcgcttgtcacgctggatcttgtctcagctgtgccacatctggtcagtttacaacagctgggacagcagctccgggaaacaaggggcctgtgatggcctcctcgattctcctaatgaagcctagtaatccccagctgggcctcagaggatgcagcgaaagggaggcctggccaaccccaggaggatttcggcattccctgccttattcctgcttcctgatccgggacatcaggagaacgcctcgtgggaagcccctcccagcccgaggttagcatggtgcctgcgggctgttgagagcccagtgagggccagagcaggaagcacaaataggtgcatcacggagatgggtgtgggatggagacggagctgtgcccagagcccagcacggctggtgcctgaccgggccttttcccgacaccatgcaggctgctgccctttgtgggtccatcagtgtgaagcctttactttagcccacttcgcctttggcagcatgagcctctgtcgccccaggcactgcatcagtagagaatttctcctgctgacaggagcccatttatgtaccatttttgtggtatcagccatcyggaattaccactctttcttgcaacttcaagccacagtcaagaaatcagaaagcaaatgccacacgaagaacaaaccctttgctgcaatccccatgctggcgggaacttggtttgactagactcagagtgggtgttaattgcctatttatggccaaaagattaacaatgcctcctttgaaagttagacatagtagagctcttggataattcctttttgggagggggaggagtggcttaaaaaaaaaaactcttggaaaacaaaagcaacagttggttgcaaaatataatgcaaccaccagaggcttagtttgtgagcagtaacgcgagctcacatcagtaatgtgtcaccagaggtcatcaggcaccccaccctctccctgaagggccacagactgcatttactcctcatggagtagtggtggcggtatggaggcccccgctgtttccctgctggagctctgtgggtggagtgggtgaggcaggcctcctggatcagccagggcctgttggggacagaaaccagcccgttagatccaggtgaattcactgtgagcaatggttagctaggtttctgaaaatctgaaaagccaagaagagaaaacgaagtattaatatcatgcagaagcagctacaggaagctgctccccaccttgggctaggggaccccagggcagagactgcacttctgaaagcttggcagcgtggagtccattggccgcacagggctggggcaagacctgagaggcaggggcgccggctagctggtcccgcagaaagggaaggtgatgaaattggttctgtgaatgttggaaatgcagcaaatgggaagcaactgctgtgaatggagcagattgctcctgcaggtcacgcggcatggctgggtgacggtgacagcacaggaagcagacggggagatgtacggctgcctctgtcccccagcctggctctgctcagcatccttcagttaagcgctgtctaacgttctccagcggggcgggagatctcttctagcgygcatcgcagctccgtcctagttcttcactcagcagatccttgcctggagtgtgctggccacctggcattcagctaggccctggggatgtttctgcaatgcagaaagggggatggatgtcattcaggcctacaacaggcaggcagggccctttctgatggcaatatttgtgctaatgagaatccagcaggccagcgtggtttggatcaccaggcaggatgagaggaggtggaatgggaagtggccagctttagattggagggacagggaggccttgttgaggaggtgacattggcacaaagtcacagatgatgagatgtgttcagctttgcaaagataatcagggagaatgtcctgagtagagggaaggcaagccccagaggtgggagtgggtgtggtgagtgcagggcatggcgaggctgcggtgactggggtcggagtgggcgtggtgagcgcagggcacagtgaagctggggkgacaggttcctgagtcgggggtgcaagggatgcttgagatgtcggcagggccatcacggttggccttgcaggctggggtgaggagcgggctttttgcctggagcgcagggttggaatgccatcagggctctggggccaggatctgatgggatactcagtcacctgccttacctgactgctatgcttatcttccaccttgggggttcgaccgcagacggccccagggaaaccggttcaaggaggtcacggcaagaaggcacatgaggrtgaaagcataccagagagatgcttaggcagggccccagtgtcggggacaggctcagaggaagttagtcaggcacctctgcaagtgcctctcatggtgatgagtgtcaccgcccgccctctgttgctggacagtggcagcgagtggcctgaggctcacaggggtgtctgagttctcccctcccatatctgcacacacatcagcctcaccctggctctgggaagtgggtcactaactcctaatccacgggccggtgtttgcagggcgtcctccctcgggtgtgtggtcctcacccaccctgtaatcctcacccaccctgtaatcctcacccaccctgtaatcctcacccaccctatggtccttacccaccctgtaatcctcacccaccctgtggtcctcacccaccctgtgaggggctcctyctgttctactttccagggaagaaaagggagtgccgaggccatgtacttgctggctgcgtggcagagcggtgagtgggatccactcactctttggccccgacagcccgtgggcccccatgtctccatagggctcccttcctggggtgagctccccaccacttgtgaagcacagggccccgggaagtctgggatttgccctaggctttgggttccctgacggtcaggtagggatggtgacrtcctcacgtggggctgctcccagcctttggcccaggacctggtgctcaggtggtgctcagaatgtgtggctgttacttaccacatcctccgggcccatcamctgatggatcagtgaatccccggtggccctgacttctcctcccagcccttgagcagactctgcatttcttgagctatgagcaggctggtaargccgggcacggggctcatagagaggctctgtggccagcaccatggcctctctggaagagcgctttagttctgcctggcactgcggttcagctgtcctgttgtataagtccgggacacgagggagaagggcccagtgatctggtgctctgccacactgagcggaggtgtgtggacagtgcgcgttacatccctcaagtggacacatccagaatgtgaaataatcctcttactgcccaaagcagaacgtttgtgaaccatttttttggtgactttgctgaagacctctgagcccttggccactgccttctaccccctacaccccccaaaatggcttgtcttgaatggcggggaggaggtccaagccagccctgcactttccccaggccaggggcctggctggcctccgctctcgggcctcttggcagctgctccggaggcagcaccggatgccctccactcacttccctccgtgagaggcgcctttggcacatcaggccttgggaaggagtggcaggaaaacctggcattctgtgtcccagaaggaaaaggcctatcagtgcccatacttgaaacttggcacacaaggggaaggtggtttgagggcacactgtaacggtggctgtgccgtrccgtgctccgccaggcctgttctgtgcacacttgctgggcccactcagcctccatgaggtcccctcttgcctcatgacccctggccccacttatcagctgcctctttgctcttgtgcctccctaggaagatgagacaaggagagcacccttgtgggttgcctgggtcttgtcgtgcctttctggctctgtaccttgtgtccccttgtggaaggacaggtcctgcctggcatgggcacagtgctgtgctcttgtctgccaggcagttctaactgaaagtgcattgcccgtatcccccttgctagttggtagccagctttaaacaagcctgattcacctagagagtttccatctcactgtaatctagaacagtcttgggcaacagaattttctgagaattgatggcaaataaacatgggaataaataccctgcggcaggggagccggtggctagaaacaccctgctgtgggggctgtggtcctgctcagaaacagcttaggccaaggggcgagmtggccgtgtgtttggggagagcatttccgcagatgttggctgattatgcagcattaactgtttggcaagaaaaaatatctcatctgaaatggtgtgaggttaattgtcactcagcagagacaccagatcttcagcttgattcacgcagggaaaactacgaacaaatatgcatgccggcatctgctccaaacctaggacagcaggaaatggaaggcagtgtctggcctgggctcccctgctaggaggaatctgggctccagagataggtgggcctggtgtggggcttggtgtgcccctcaccagccgagtagccctgagcaagtcgctgcccctccctgggcctcagtgtcctcctccccatgtcgtgggagtgaagcagcctgatgagggagagctcctacagcaggcagctgtgcagtaccccctggagaggctcagcaccagcatggtgttcttgatcttattttgttgctgcttgtgatcttccagaagggtctctgcttcttatgaaatcttccatttgaggcatttctggaggcattattctcattagcttgagggcagtccagtgagggagagagcagccctctgccctgtgaccccgggcggggctgggaggctgtagtgcgagaatggggagagtcaggtgcctcgcaccccaggcaccaggaacaggagcctctcccagccctgcccggtcctcctcagccctgtggatgtggaggctcagagggcagcctctgaccacacaggtggagtgccaggccacagctgtgggctgctgactgttggcaggtgaggtgggggatgatttgcagaagaaactcacctgttgtattttctcctccagatagccccatgaggaaggcacatcgttatccattttacaggcggtggctgagtcttagaggaagcagtccagtgaaaccagaactcaagccacatatataatttaaaattcctagtagccagttattaagagaagaaagtgaaatgactttgaatagtatatttaacccagtatttccaaaatactatcatttccacatgtcatcgatgtaagtaaatcatgaatgcactattttatgttcttttttcttactggtttcagagatccactggtgtgtcaggtgacagcaggtctcagtttggcctggccactgctccatcattcagtractgcatgtagctttgctgagtggggctttggggtacgggtataagagtgtgggggggttgggggtcagccttggttcccacttggtgctgccatagacccttttcctctggaagggcccaatgccagctggtaaaggaggggctgggcaagaggcccctgcctgaggtgctaggtgctctgggytgtgccctctgcctcgggtatagcaggccccaggagacctgaggaccagagcgtctggtgcccacaggctgtccatggtggaactagaggttcctgggctcacctgctccaccctcctcgtggggctggtccgggaggcccggggagttcactgtttctctgagcatcctgccctgctctctgaggcctcttttctactgtacccgtgcagccctgcttagcctgctgttcctggcgtgtggccggggcagggctggggagatgggaggtggtgggagacggggtgatacaggaagacaggggcttctcatcagggggtgctgagaagacagctttgcagcatgacargccctgggccatttttccacggttgtggtcctgcatttcatgactgggctgtgcctttgtccccacatgtcccctgctcgagccactcgcgtcaggttctacacagctggccagctgcaagccccatccacagggagctcttcggggtgagcccccatctaccagcactctggaagtgagtgtgagcctggaaggttgcagtggcaggtggagggaaggccccagaatagaaggaatgtggcagaggtggccttggaccaagccgaaggttccagagctatcctgtctctggggcttggcagcctcttaaccatagttttcctggaaaattgcatttgtggctctggtttgccccacccttctgggagggattcacaggaatgtcagggcatctagcttatcagcctgggagcttcaggaacgtggccctgcccaccaggggaactttctgggccctcagagtctaggcagccaataacctgggaagctggttcaaatcagcatgcattgattgaacaccagctgtatacaactgcctgtgccagggctcagggaagactagcgtgtacaagaccccatccttacctgcaaggtaggtgcaggctacagggctggggtggagacagctgtgtctacgtagccgactataagccgagtcacagtaagatgagctagtcttgtcctctgaggatcgagattcaattctagattaatctctttgttcagccactatttatttacctagcatttgctgtgagtcaggcccttgtaggcaccagggatgcagcaatggagaggacagttagccctggcctcctggaggtcacagcaccaacaagtcatcacttagaaacgtggaaagggccatatcaccggcccacgtgaccaatgcccagggctgtatcctctgagccttggttttctcacccatctagcaggatccataatagcagttgccaggacgaaataagatgatggacacaggacctccatgtatgcatatgggattgttctaggaagccaggagtaggaagcgaggggcacgttttgagttctgcctgtcatgtgcagggcctagcactggctcctttgcaggggagctaagaagctctctagtcaggggaacaggcttgggcagcccatcagttggagtggagaggagacacaggcacatagatgttcctaagaccaggagcagacagttgggctggaactggggttgggagagccacctggagagttgaggctttattctgtgggcagygaaggatggccctgggcaggtggccagggacttgaacctcactcaggtgatagacaagtttggggcagtaagagaaggctatgcccacgcctttggtacccttcagtggagaaagggggctgtggaactgtgcagagcactggaggctgtgaactgctggggcctgaagcccttgggaatttcttgcctggttctcaatgagggtccaagagcctggtgcacacaagcgagggccactggctggggctggcctctgtagggccagtcaggtgggttctccctctaccttaccaggaggggaaagttcatcagggaaaaaggagctttgtcaggtttgtccttggggagccaacctgagtcagaaatcaggagccgagaaagccagaggcaacagtcctggatcgagcagcagcagaaagaagctttgggacttccctctggccccacgcagtgagaggatggggacttctgccctgggcagctacttaacctctctgtgcctcagtttcttggtctgaaaattgggtaaaagcagtgcctacatacagcaagtgcctaataaatcattgttttggaatacgggactatcccatttctgtggatggctggggtaaccactgagcatgagtactgagggcctggccttgggcacagccaggtcctgtcttttgccgtccttaggtgacttgctgagggccggagagttggctagctttgtgccatctgcgcagagttctaccctcagagctgtagccctgcgggttttgaagacttgggggccttgtagcccctggtagaaaggcagattgtgatggcggatctgggcttggagcccaggtctctgccttcccggcccagtgttgaagctccccaagctgacctgtttcctaaaggcgagcagcatgccagggtgcaccagccaccattggcttttggccccggaggcctgctttggctggggttttgcccacttcccatgcctggggtaagcgggccccagctctgaacctcccttcagggactccatggaggtgctggaggctgctctctggcaagtcttgtgcttgatctgctggtgtcaggcagccctgggggccagccctaggggaggtgccagtgtgtgcaagctccatcccttctcaagtggagaccggcacctgctcaccacaggtgtgtcttggccargtgaggcctgagcctcaagctcctcagtgcctggtgctgtgtgaacctggtacccaagctccctggaaagcatggaggcatccaggcagcactgaccgcagggcctggcacggtgttagctcacttaaaccttgcagtgttcatggggtacactgacgaacagggaggctgggcatacaggtgtcccgtgccaggctcgggagacctgggagatttggcccagagcctcctgggttggtgggaggaggtgaggagcagtagcatcggtctctggagacgcccgagggtagaagcacagggaatataggctgctggtaggcgccctggaacaaaatgagccctggggtaaatgaaggcccatgacgaacccttgttaaaggcccaaaatcaccatggaaagcttccagctcccagagtgcagttcaccttccggcacgaagacatcacctggcagcacgatgggacttcagaacctcggtgcccaccccagacctgccggatcagagtctgtgttttaacaagaccaccaagtacatcgcgagctccttcaatatggaaagtgctgaatatgggagatgggccctctgtgggaggccacctctggtttgtctttggtttgggcagccctcctctggctcctcttgcagctggggacggattgggcctgttctgcagaggtggggccggagccttacttggcagccgctccagtgctggcctttctctagcctctgatgttggtctcctgctcgcattgtctcttttcctaggaacgagrgcagtgtggttcatgtcaggaaccttagccagagctctgtacctcctttggcctaggccccactccttggaactttggtcarcacacaaatgacagcactgatggctttggtcatgcacaggcttgcactttatgtgtgtgtcctgtctaccactgcagctctgagaggcagggatgaggctctgggaggagaagcagcctgccttgtggtcttctggggtccacactcacatgacattgaaagacaaggacaagaaggcacaggcttagatttgagacttgcccctcagtgtgcaaaggactcagtgaccgtttctcgttcctgctctgtgtgagaccctgtttcacctggtctaggcttgtagacaggtgggcattccaggcttgaggtgcggtgaccaagcagtggtgacagctggcccttgaggccagggcctgtacctgtctggttctttaactagacctctagcacctaccaaggtgtgagtggtttcccaaaaatcgattgattgacaggatcttgctctgtcacccaggctggagtactgtggtgtgatcgtagctaactataaccttgaactcctgggctcaagtgatcctcccacctcagcctcccaagtagctgggactacagatgcatgccagtatgccaggctaatttttaagtcttttaattttttgtagagacagggtcttgctatgttgcttaggctagtcttgaactcctggcctcaagccatcctcctgcctgagcctccgaaagcactgggattacagatgtgagctactgtgcccaccctctaaaaatttattgaatacatggatggatggatggatggatggatggatggatggatggatggatggatgggtgggtgggtgtgtgggtgggtggatggatggatggatggacggacgaacgaactcacaaactgaggcaggaggcctggattcttccccattgggcacatcagctcctccattgatgatacttagtaagcaaggatgacagcattgtttactggggacagtgtggcaggcactgtgctaagcgtttgtgtagctgtggattatctttattacagccctggaaagtgggtattgttgtgcttgttttacggaagaggctgaggttcagagtagcggccacggtcacaggaccagctgtggccatgaggcccatgcttgttccactccccaggagggggtctgggcagggctctgggtgccaggcccctcccatctcaggtgttgtccacaaaggggtctggtccagtgagggctagagtcatggaggtgaggggttggctaggccttcctgccttgccgtggtggacacatgaggatccctggtgtgaggcagccaagcagccgggctcaccgatcggagcccagacctgggatggcagcagggatctcacatgacgtcatctagggagcttgctctggcccctgctaggccagccgtcagagccatgtaagacagtctaagatgacagttgtcactgttgtggatgaagcaggctaagattggatcattactgaaatctgaaacttgaatttaagtggggacaacgagcagtgtccaaacgggggcagtaatggtggccttggtagagcccaggaacctgttgaaggaaccccctcgtgcttttgacagggcaccagaggtgttggggtggtggtggcagaggacagtaaaaggtcccttccctcctccccactgccctggccttgaggcctagagagacctcgcagtgcgggacagtggctgtaagattgtctcagagcccaccagctgggagaaggaaaagcacaggacaggcgcagcttttattccaggtgtcagatcctgtttgggccctttcaggaggcctggcttacaaggagagctagactctgcctttttcctctgcagttgaggtgggttagagggcagccatgggcccttctgctcctgggcctctctcaaccttctggggaccattctcatcacagcatgacctggggaacactcacagaggacagaggtcccagtgtctgttgagttctgtgtgggatgcgacacacctccgtttaatatgctaactatagatctgctgagtggacagacccctggaacctcctgattcaggggacattcactgtactcatgactccagttatggccatgtcttccaggagtggtgacagctgtcacctcagagaaggggtcagcacaccatagcccacaggccagatccttccattgcctgttttttttttttttttttttaatttcagtagcttttggggtacaggtggcctttggtttcatggctgaattgtatagtggtgaagtctgagattttagtgcacctgtcactcaagtagtgtacattgtacccaatatgtagtgattgcctgtttttataaataaagttttattggtacacagctctgcctggatacatacatgttgtctccagctgctttcatgctacaacggcagggttgtgtagtggcagggctgggtcattatgacagagcccgatagcttacagaacataaatatttactctctggctctctaagaaaagtttgctggcacctgatctagatgaccttacgtctcgatttccccatttggaaagtcactggatttgcttggcaatttctcaccaaaagctaaagctggccctcgatagggcccaggaatgtggcagggctacaaggcagctggctcggctgtctcaggctctgccgtgctcaccgttggcctcgagtgggcccttcccatgcccccccaggtgataagcaggcatgctggcgagggggctgtgggaaaggggcacttagtgctcgtgaagcttggctaactggagccttggtatcagggtgagttgtattcaacggatctcagtgcacaaaagtgtaatttttacaatgaaaatggcattactctggggcattcctctggacgtaccagctgggttgcttgtctggtcccagtgagatgtcttttccaagctgtcttgtgttgccctcatgcttgagacagtgtgggccagagcgaggatggatcgtttgctctgcgttcgtttgctgcctcaatttcctctgtctcctgaagcattttggtggggctcttccgctccatrtggtggaacgaaacccaaacgtgaacagcgagggcagcactgggcttctcgccactgaagacaaacccctagaaagttcgctctgggccaggcacagcggctcatgcctgtaatcccagaacgttggaaggccaaggcgggtgggtcacttgaggtcaggagtttgagaccagcctggccaacatggcaaaacccygtctatactacaaatacaaaaattagctgggcatggtggtgcacacctgtaatcccagctactcgggaggctgaggcgggagaattgcttgaactcgggaggcagaggttgcagtgagctgagattgtgccatggcactccagcctgggtgacaagagcgagactccgtctcaaaaaacaaaacaaaagcaaagttgactctggcctgggacccagaaaactctgtcagccagatatcttctggccccttaggtggacagccagctcagaagttgctagaggagatgagcytgtggtaatggagcttggcccggcaaggtggttttgcagccactctgtgaaaataagggtggggatggttggctcagatttaaaagcctcagctggctgtggttttatcctgtgccccacctcaaagttaggcagtggaggctgtcccagggcagatgctgccattgtctgagaaacctgcagcagccagcctggagccaggaggctgttgcrtgggctggagcatctttggggacccrgaaatgtgttagaaagttcttactgtaaccaagaccacttccaccactgctattagctctggccctagcactggcctgttttgaaactgacaatgaaaagatgaggggcaaggaggaaaagctgctgatcagttgtatctctccctttaaataaagctgctccttgtggctcctcttagtccttccttggtgagcagctctgctcagactttaggcctatcatggctgaaagcaggaaggctagaggtggagggagtcacgattctccaaagggtagtttagcttcaaaggctgtatgtgtcctgcaagtcctgtcagtgtacactgagctcccatgatgtgcaagrtgctggcagaaggggtgggtgcacgtcagccaccaaacctgcccatccccaccatcgccatcccagtatctgggacacakctactgttattgtcatgccaggttaccaccacagacacagaagcacagacctaattaaataactcacctagggccatggtgccggttctaggcaggtaagggatttgaacttgggtggtgtggctagcagtctgtgtgctgagcccgtgcagcgcagcctcagtgggggcacagggagcagggtttgaggaccagcaggctgsagaagctttgacaggcggacacggggagcatgggtggaggcagggaacgtggccttggtgttccatccccaggctgtggccctttagctcactgcactgcagttgtggcctgggttgccggggtgaagtgcagggatgttgctggaggcacctggcctgctcctaggatctcagcttcctccacatgccgtgtgcaccttcctccctctctcccacggtagtttgctgttctccaggacttgtatggatggttctcaaaggtccagcaccattaaatagatctcactaaggtgacacttctccaggtctgaatatgcttgtgtctcctagaaggggtgaagaatactcctcttagcccattttgcatgtatgagtgggggccacccacttggcaaagcagcctttgagaaacaccagtaacatgtaaccagggtagggatgtggcaatgggcaggagggtcccccttgacatctattcagaggtccatagcctgggactcctgctgaggtgacctggggcgcttctggacctgaaacctccttgggtggcattgtgtatggcagcaccgaatatggccagaggcctccgcatttgccaagcgggatccctatccccaagcacaccagtgttttccttagtttcttgcgtagcaaagcccctcccctgggttcttgctcgctgcccctgtctctgccccagactgtctgctgggtgagcctgggaactgacctggttctttgactgtgggagaaaagtcaccagtcacaaccaagatgctgccaaagtgcccacccagttccrtggtcttggtaatatttgtggttagtatgacctacatatcgtcacagctgctttcagtggccgcgtagaaaagcaagcaagcagaaaggaaccttcctggctgcggagaagctgtggagtaggctggctgcaagcaaggcctttggagcagatggagctggttgcggctctagctgtgggactttgagcaagtcattggatttctctgatcctgtttcctcattcgtaaaatgggcatgaaaagagggagttargtgaaatgtctgtctcatgctcagggctaacagcacacaacaaatgctcaattcatggtaaatggtaatattcttgttagtagagggcacaaacacttgtatatcagctcaggagtatgtcagtttcacattcattgacatttactgtttctactggttaaaaaaattaatgcatacttgtaaaaaagtttaaagttcagaagagaaaaaatatagtttggaaatgtaaaagaacagaaatttaaattcctctgaaatccacctacagagataatgatctttaaatatttggtgtagttccttgcagtcctttttctgagcagttataacgctgagaagtgactcttgacaccctttctagccccaggagtccatggattccacaggtgcaaatacagattttaaatcatcatttaccaatgtgtggaacaatgacaagaaatacgaatttgttgctttaaaaaggggaaagaaacatgagttaaaacaaaatatattagcttagcactggtttcttactctatccaatatgaaaagcagacacagttttttttcctttcttttaatctgtatactgccatttcttatatatatatatatatgtacatatatatatacacacatatatacacatatatatgtatatacacacatatatacacatatatatgtatatacacacatatatatacacacacacatatatacacatatatatacacayayatatayayacayatatatatacatatatacatatatatatatatttatactttaagttctagggtacatgtgcacaacgtgcaggtttgttacgtatgtatacatgtgccatgttggtgtgctgtacccattaactcgtcatttacattaggtatatctcctaatgctatccctcccctctccccccaccccacaacaggccccggtgtgtgatgttccccttcctgtgtccaagtgttgtcacagtttttaaaaaaactcctggcttgtgcaacatagaattgaattattttaggctgttcagtttcaaagactgtgaatgttgatgctcttgtatccttagtttgtaataatgctatttcctctttaacaccacagaacacactccatcagtgggagggcagcacatcacctatgatctcatcaaccctgttgtcccttcgggagggtcgtgttgtctggccttaggggctgggctggcctggccgcaccaagcacaatttgaccaactgtttccagcctgtccgtgaacaacagtcgtttccaatattggtctgtgccatggacactggagcaacggtgctgatggagcagtgccctactattagtttggttttgttcttaacaaatagtctatatgtgagttcagggggtctgtgttcactgtggcattgtacccaaaccagccctccattagggccatggcgtcggggaacacctgcgctcccactacagcagggctccctggagcctttggctctcttgatcattcagagcatgcttatcgtggggcctggggtgcctccagactgcgcctccacagtgggagtgcctgctgtaagtgagcaaacctagacgcctcttggttgtatgtccgcctcccagatcttgggccttgccctgttccagtgggcagaatccaggcctcctcctcatttcctttgtactcataaaggacccatgttcaggtttctctttgccacctgttcaatgtgtctttctgggacctactgtgtgctgggtaccgtgctggtactgtagagcaggaaaaacagaagcaatgccccattgcctgctgctggatggatcccgttctggggctagttctgtttggtacgtacctgctgtgtgcacatactgctcttggcactgaggactgtgtggagcaggatggccatgggcccttctctctggcagcttccatctagtgtagacagatagacaatattaagagcaaagcagattgtgttggacaragtaagtgctgcaaagacaaggagcatgggtagtgggacagaggcgacgagcagagaagtagaaggatcttctgcgtggaatgagagacctccaaggctggcgtgtgtgggaggagctggctgtggctggggcagagggaccccagcagagaacaggctgctggatattcatctgtgcctgctgaacccctgctgcagtcaggagccccagctctgccattaagcagtccctggatgacagtgggcgttacctggagtggccacgctcaccccaaggagaggctgtctccagagccccagtgctgggcagctcttcctcattcctcggcatcccgtgtttcctgctggtatcgtcctgagaagcttcgtgggatgagatgtcttggtggggaaagccaaggaggtagcaagttcaaggagcccctagtcttcctgttgacacccaggagggtgtggctttcagrcccctccccaggccagcaggtcctgacacctgaattcatgtggaaatgctgagcctctgaatggcctcctgctgtgtgagactgggtggtgtccaggaggtagtcccagggtgtgggtggggagatgggagatgagaatgtcctgaagctagccttgtcacctgwatgtgacaggacactgtggtcagtccaccctctccagccaagagtgtccaatgtggagtgaagttatgaatgggcccctaagctgggcctgaggaggcagccccgggccctggagctcaaatctgtgttgccatcatctaaaacgggattgtccagaagcccatcacctgtgtgcccctggggctcctgtaacctgggcacgctttgggacctgtggctcactgcagtcttggctgttggcaaagcaatcattgtgcatttcctgcctgtcttgctttcaaaaggagcccgaggggcctggtgtgacttcccccatggagctccttagaccagacacagacagggcgagcagaggcacgccggggcctccttacctccttctggaaggggcctgctcacaaacccagggactcagagctgggggagcagaaggtcccaggcctcaggaaggccaaacacctacagccctacccacaacaccactcatgtccgcagagatgtcccttcctctgtagtggaagggagtgggttctgccaccacccgagctgggggtggggaccctggcacatgcctggagtcgggctttctaccctcgccctgggcagggagggccacggggagatgaatcagaggcggattctgccttccagtaactccttctttgttctgctgtaagtggaaagtcagccctcaccatctctgctgccatccccatgactgcagacctttgggaagccaaacaccacctccctgggagcgctcttccttcccatccttgccagcatggccacagaccggaagtggcccttcccagagctgatgttccagtgtggtccagtttctgtyctggtgtggagagaggaagtccgctcagacccaggggttgggagggccaggccctaggctccaggtcctttgtttgaagatttttttctgagcaccatagcgttgcatgacgatgacaatcgcacttcgcatggctgggcgcagcgtttcattcacaacatgcatttttctcacaatgcttcctaattatttcctttggcaaggataggagcctctttctttaggatagcacctgagttcccagagccacagtttttccaaataaggaggcatgtggctggtgtccagcagatcccttaatggctctgaatgcccctcctccctgcgtcctcagcaacctggcagacttcagcccaggaagggtgctgattggagctgcctggtcggcttccagaaggttaccaggtgggaccgggctcctggggctttctagctgagtttctgcacagcactggtcagtataaagaagctggagaatccagctggcatcaaccctgaactgggcagcaggtgttccagacctggccacacatggactcccccatctgtccagcaccttggaggtcccaaagtgcgttcttgcatcctgttcatttcttcctcacaggatccctctgagataggctctgcttgggccatgtggacaaggaaagcgaggctgagactgggagggtcctggccaaggttaccctgagaagatagtggttaagagagggctttgacccaagtctggctcatgagtctgaccccactgtgccagcgagacccagctgggcctctttgccctacagatgagtgccgtcagctgggccagtgtcctggcaggggcccgcagcccatcttgttcttgcaagacctcttgaaagtgtaacacggagagtgaggcctggccatccrggaccctggcagtgcctgggtattttcagctctgtgagatgcccctgttgagtccatcagggtccccacgccagagcccttctggcaagcccctgctttactccaaccctcctggcataaaggaagctggttgtcccagcctcaggcacagctcttctggaaatctggaggacattacctcctggctggccttgagcttggggctgcatctgagaaacatatccaagcctatgggcttctccccattcactgagcagggataaaaatcctatcaaaatagtttttgaagagcaaggccctaccagtgtcattggggcacatgaggtgaggcaggcagccctcaaggctctgtttaacttagttatctgcagagccctccgggacctggttgaaaaatgctgtcctggcctcaagggcacgtgggtcctacctcttagggcctggcagcacagtctcctcctggccaaggcatctgggtgcacaagggaaggtagggccattttgtctacagctcctttgattggtcgagcacacaccaacacagggcgtcgtctgcctgtgtgggctggagaggcaagaggctcctctgccctggggactagcctgagggttccagctagtagatttttgcctttctgtggtttgctcggccgttccctgggtactcttgctaccttccatattgaaggaagtggaccccgaactggagccatataggacagatggggaatgctgctgcttcaggccctccaccacaaggcttccttgtgtcattaaaatacatactgtcctttcccactacctgtgggactggtgtttgtgatagccctggaatgtgagcaccaggaaacactgaatgtcactcacctccttggaccccttgcctctgcaggtgaagccactgaggccagaggagggaagtggctggccatggtcacccagggttatcaccgtgggtgacaggctgggaccagatgtgagtgcagctgtgggccgggccccttcttctctctaaggctgtggccacagcctcctctgacacctgacaacagcatgaactcagcccatcccggtgttgcccagggcctcagtttcctgatctgtgaattgggcatgagttccttgctcarttcacccctgggcacggctggatgtgaacgtattgtgcacatggtaagaccctggctagtcctaagccctggtattatggttgacacctactgagtagaaacagttgggaattgatagcttttccctctgcgggttttcataaccattgctggacaccggcagggacaaacttgggaaagtcttgggacccaagtggaagagaggactataaatgaaaaactagaggggataattccagcctcaaaagcatgctcgtgcttatcacactttgatgttggctttgaaattctccaggtatgccctttggaaagggactcctggagggcaggggcctcgcttcctggcccctgagttcacattgctcaggagagcacctggtggaccacagatgcttcacagatgggggacaaataaaggaaccagcaagcaaaggctgtctgggttgagaaccgccctcagtcgcagttgtcctgacgctggggctggcgtgaacgttccaggcccagtcatagtagacagcaggggtggcgtgtccccgccatgtgccagtgcccagtcactgccgacctgaggcaggggctagacatctgtggggctctgctgaccttgaccctccagagcaggcaggccccagggtcggaagtcagctgacagtctccacagtgctcccctgaggaggaaatgaggaggccgctgggcctcactgtctcggaggtgggggtggcaggggagagcagcaggaggagtggggtgcatagtccaggtccctggtgccgtgtgtgggattgtgattccgtccagcggctgggctccctgctacagtgcctgcagttcagcagtgaggggccacagcatgcctttatactgcctcccctggcagccctcttagcttcatccctgcctgtcctgtgtagctgggaggacagagcagagcaggctcaggaggatgccaggcagcaccctctgctcagccgcacccctccagcctccttctgcacctttgggaaggtgcagagggaaatggaacacgagggaactgagttagggccctggggcctcagctcctggaaaaggctagcagcaaggccacaacagagcgtctgagggcaaggtggtggccacctggctctgtctccctgtggcacaaagggagaaaccgaggccggcaaggacagaaggcttggctttgcccctgtgctgagtgcagctggccctgccttgctgccacctttgctgcagtggctttggctttggggtggtttgggcaggaagtggcctctgaagggagattggggggctcccagtgtctggcgtggctaattcacatgcgtggagcctctcggtgtgactcagcgcccgtgagtcctcgcatttcttttttctttgttgtcttaggtttgttttcattctcgttgaaggcaagaggggggtttcagagtttagggcacagaaaatccactttaggatgaaccctttcttttcaaacacmtctctctctcgaaacaaatggctgatggcaaaggaatattggcctcctagcagggctggggacattgtactggggaaatagtctggaaattggtcatctgcagaagtagttttccttctggaggaggaatgcctcactctgggaggcattaggtggaagaaaacagcgcctctggagtcctggggttagggttcagctctcggcttcgctgtgctctggccaggtaaactctgagctgcagcgtcctcatttgtaaagtggagatgagaagaataacttgcctcacagggttggtgtgaagatcacataggccaaagggtgtagagcgcctagcacatctggccacactgtgcgtgcttggcagatggcagctgctgtcatcaccatcatcaccataaccaccgttactttcagcgtcacaagcaccactgccaaaaccaccatcattgtcatcatccagcgtggagggtccaactggaacgcttagaagacctaggctcatgcctggttctcagattcagggtagacgacacctgtcccgcgatgacctgggcctcttttacctttggcctcctccaaccgatagagagtccttccttggagggagaggtctgcctccttagtgcttactctgggagcagggcacagcctacagtattgtaaaattatcctatacttaattatattactaagaatatcccagctccattagggagataagtcatctgatcgataattatgtcatctgtacctgtcgccagcttgtcttgttatgacgttagttttactgctagaaatatctagtagatggctggaaatctgcaggcaaagtgcagagggagtgagcctgcgaggagagggcctgggcaagtgactgccctgggccgcagagttcttatctaaaaaatgggaacagtagtgtcttcctaaaggcaccatggacttaaaatgaatggcacgtttcctgggacttatgtatatttggttgcttatggggacttacgtatatttggttgcttttggggacttatgtatatttggttgcttttggggtctgaaggagtacaaagaatcaagtgcacacttcccagtgtgtgagggagaccagggacaccgccagcctgagttctgggtagggcagctctctggcagtaagccctccatcttacagggggacactctgcatggaaggcggcctttatccagctgtgagaaagcagactgaggcttggtctggaagctcgtttagaacaggcattgtccacatccttgcagtggctgggattttggcaataccttgtgttatgcgacggagggcagacatgttgggagaaacagctgctgacttgcctggaggtggggccggccaggcctgctgtttctctttcccaccatggctttgttgcctgggccagcctgccctgtagcaccctctctaccccatcctccattctgcttggtcagatgggtggtcagagggtgccaagctggtccaacaatagcaggaaggcctctgccagggttagtttgctgccatctactgagacaacaatattttttcttggaagacatggaaacttcgaaataatccaggctggtttccttactcccaggttagaggttgaagaggtaggtgcagaaggttctagctggagcctatacgtttcagaactggaagggacctgtcattatgtacctggtgaaacaggcctagagagttgcagtcctttgccctgggtcacttagaaagttagctgatgatggggcagtgaccagacctggccttccactgctgctgttgcctgcctttggcagtctgcccagcaggcctgcagctgcttctgcaagtcagtaggatacagctctcatcccccaccagtttcatcctgtctcccgcaagtggctcgcttgttgtggcaagcactttccaccaccagtctctccagtgacgctgcacattcgttaagggctgggacggtgctttctcttctcagggyggcttcccacaattgctaatcccggccagaccccttagcagcaaaaggagccccraacaggcgggacaggtggactagctctgagttctgtttcatctgtaggaccttgggcaagttacttaacctttctgagcctgtttgctcatctgcaaagcaaaaaagagcacctttaggggcttgttggtgcacgcaccatgcctggcccattgtgaggrcatggtggagggctctgctgttgcatttctagtgggttctccctcgtgaagccccatggcaattattcttgaggtctcatggcattcctatgaggcaggcaggacgaggtcattattgccattttacagrtgggggaggctcccaaggagsggggagatgtgtgatgatgttatggcaggtggtggagagccaggccaggacacagcaggccgcagcccatcctaccccagcttcccagaccttcccctccatggagactgcaggctcgtgggcaccaggcacactgggctggaggcacccactgcccatctgtccctctccatcctggaggtttcctgcccaaggcttggccctctgccgtgcccaggcctgtggtcttgagcgtggggttttccaacagacgctcccagagccttggatcctcgatgtgtcttggtttcctcccagaagcttggctgctgcagtgttctcagagagagggttttctggaggaggcagggtgtgccattgtgccctgcagggccaagcagattttcagcatcctaggaagaaccaagaatgcagaagtctgggggtggtgaggcctcagccagccccatggcgtccccagtgcatttcctgttgactctccccgtgcccacacccacttcctttcccatccctggctccaccctgagccctctgctggctgatagctccatgtggctactgacctgcttcatgcacacggggctgttctgggctttgtaggaaacagtgaccacaggccagggtcatcccttgagctatgaagctcctcctgtgtctggtgaagccgaagacattttcctcggctcatctcaagcagccatcttgggtctgccctcaacacttcagtgaggtgccctgggggagggggtgaccccgagggagacatagccaccccaccccatggggtgacatggaaagggtacaggccttccctgccctctgctgcttcctagctgtgacactggacacatacctgcctccctgagcctcagctgccacaygagtgcattggtgacatgcatctctgctcacacttgttctgaggacagtcctgctaatggaaagctcccgcatgtggtggggtcttggcgacagctttccttttcttctcttgcctgcctgtctacagggagcttccagttcctttggaacttcaaaatgtacagatcaacactctgcttgagaccctgaaaaatctgattgtcgcagcttggggagtggggtttatgagcaagagaaacacccgaggcctggagccttggggccgctcctcagagacagggagatttgccgtggctttctgcgccattcatccaagtcacttagactcagagtccccatttatgaaatgggtctagtaataaacttgagagcttcagggcagtgatacacattaaatgagatgatattttccccacgtgcttggcagagtgcccagcacagcctgaccatcagcacatgcggccccgatgcctcgctgtgcatcccttcccagtgtgtgccgctcaccagtcctgcctcttcattgagtttgggcttctctgaggtggaggctgttctccttctgctcccagttcccatcgcctgctgcagggtctgccaagggagggcttgctacccaggaatggcccggccaggaggctggctgtgtgagattccagggatggggcctcacttagaacctggagaggtcgacacccatacacccacatttgcctgtttgcttgccttgggtgcttctgcagtgggcaagagatgccagtagttttcccagactccctggcatccatcatggctgcttccagcctccccttaaagtaatgggatgaatcaccccagtattgcaggctcatgagttagataagaagggaagtcagagttcacataagggggttggctggaggccaggtctcccagcagcaggaggagactgggcaaaagagcgtcacagggtggccatctgagctggagggcagggatactgagggagccgtaaagccctgcacctatcgggaacctcgtctcatgtattccagaggctccgggctgggagcaaaaagaccagggaggaaacagaaggcgccggcacagcaatgggagggccttggcctgtggtagatggtaacaaaacggttccgtttgttctgggattccttacacgcttggctgtagaatggcacgtttctcctcctctctcctgtcaggcattagaggcctggggaagatgtttgagcccattgcggggccagagcagatacagcccatctgtattgaagccacgatggaaacattcttgaaggcacatagcaaatgcctaaagaaagcgagctgcactcacacaggcaatcagagggagagacgctgtgatgtggagtgacatggggcttgtgggtctgtggagagctgtccttcatgggaggatccctgactccatccgctagatgctcattgttccccctcccgcagtcatgacaagtggtcctcagctgggggcaacattgctgtggtcgagaaccactgactggagtaaaaggccttgacctccctggtgtctgcagtccctgaggccctgttacctgtttggcctcagacaggaaagctgatccttctgaattgggcagtggcaaaggagacgcaccttctcggtgcccactcagctcaaatgccatgcagtgtggggtggagctgggcggcagggcatcctgttacctgtagacacagaggcctgctgcccccgggacaggctgtttacccttattggccccaggttttccatcctggctatccctgagtccaagtccctaggagctgggaaggatggtcacatgatggtttcctggcgcacttctgccagctcccgggtgatgctggggtctcctgagcccctcgaatgaggccaggcaagcaggcgttatgccagacagccgccaacagtgtgcgtcgctgctttccataagaaaaggcgcctgagacccactgccaaagcacagagccatcttgcccattaatcaggatttcaggattcttggagtgatcttagcaactgcctggcaaaatccctactcaatttaccctcacctgtctgccttcagcagaggctgggaaggctgtgggtggaatgggggtggggtggggaatgctgccggcgtgggcccatcttgggcccctagagcctgtctcaggggctgagattttgcatctctcagcagggcctgagggggcactctgaattagtgttattgttattattgctctcaatgattactgttctccattttcaattttaaaaaattaaagagaagaagggattttcccagttactgtgttgaggaagaggctgagagagcagataggcggtcttaccacagaatggcggtgatggcagggcccactctgcacctgaggcctccagggagggcccgagttgccccggctaccccatcctatgccgagggctccagccagctccttgtggccacaggtaccctgggcccttgcttgaggctaaacctggtcatgactttgctgcggtccccaaggtgacctctgcttggcgcccttgccttgtggcctggcttcagccctgcaggtgacagtcatgtggctcctccccctggcattcagggggagagcaagaggcaggcccctcagaactctggatgtggaggggccaccatcacctacttagggacagatgttcttgcagcaccgagtcctgcagcagagggactgatgcgccgtccccttccatctcccagcctacctgtcagagcaggctctggctggaaaagccagcccaaatggccctcttctgcctccctcccccatgcccatccctgctgccacccccaggacccatctgcactctcgggttccctacccacagccatgtgggaaactgacatcccaagcttctctgagcaccccaggaaggtcacctctcaggcctccctcagtggcaaaaccctttgagtggtacatttctgagctgttcctgccaggaggaaaccctggtaatttggagaagggttgctgagtgccaggcaggtcagccagaagtgatgtgcatttcactgaaagaacagagttgccacccacatcttcatttctaggctaggagctgtcctggaattctaaagggaaggaaggaaggagggcgggcagtgagcagccccagccctgtctctgggggttctaattggcctttgcagagccaaagctcctaggtttgctggcagaggacgtgaaggggctgtagccactggtagtgctatgagttgcggtcttagctgtcactgggtaagggctgtgtgccatgactgtgctagcccagctaactcggtgagctagctctccttaccagcattttccaattgaggcaggctcggwggggccaagtgaccaggcggtagacaaatagctgcaaagtggccaggcctgggtaccctcttcccccaactataagcagctcaaggcctggtggcttgtggcccaccaggtgccctgggagcaggcaccgggtggtgaatttacctgagtcacatcttcgttggagcaaggccagttttgccctttcttcccgagcaggtgtggaggcccctggcatgagcaggaaacactagaatgttccagagacccaagggaccagccttttctgggggcagatgccatgtacagatgggcatctccaacctctggatgccctgtgtctctctgaggatggggcggtggtcagaaagggccctgtcttcctagcctgcyggccgctccaggagccgcccagcgtgcaccgctgygcctcatcttctgagccttccatcctcactgctcctgggggcagcyctgtgggggaaatcacgtttttaattagcctggttcgggatggcggctctaaagctccgggccgtgaatgcagcctcttcgcctttggaatccgctgccagtggacacaatgtagctgtaggaatgaaaacaagagagagaaaggcccacaggctcagatttttaattggcactgtcctcccagccctgcacccccccgctggccctcccggggctctgtttgggcggccgggcccgggcgacgagtgatggaggctttcacagcttcagactgatttaagtggacctgtatagattcctgcagccacgctgaaagagccaggcgcaatcaccgcgccgagaaaccctgggaaatttatcagccacctgcgcgtcgtgaatagggagaactgctgagggccctgccgagccgcctgggcttcaatggccccacagcccagcctcacagaagagatttttctaaagctgcaattaatttttttcccctcaatcaattggaagttgctttcttgctttcagctgggtgagtgtgatccttgattctgtgattctcccttaacctgagcgttccaacaattgacgtttctctccagagacagacagctttatttcctgtcggccatctaggaagagacatttttgtttgtgttttgtgtgtccttttcgtgctctttcttttctttctttaagatcatctcaagctaacagtgagaaaaaaggcatatgtgagcgattctgcctcgacaggtcccacgataccrtcaggaatgtccgtttttcttgctttcatgaaaacactgtggggtcttacttagaggagacagtggtagagatgaaagaaggaaggagaggagtgcatgtaatgcggaaaggagaaaggcagtcttgccggactgccagagagccgtgtgctgcagcttcaagaggtttctcctagaccgacctccaccctgcaggaacagttatggggacaattcttggctcctatttaattttacaatgagaaccaattccactgcataagaagagaaggccaccctttctgcctggagtcactgtctgaaagcttctgtgatcggcagttgcacgtgcccctgtgtctcggggatcctgactcacggggatttcaggttccgtgttcactcagggacattgctgccgaaggatggcaaccattctggctgctgtggcagagcgggacrcctgcaagccagcctgagcacccatctgcctgttgggccaccgggcagcttctgcagatgggagtcatcaggcttgagaaggtgacatctgggctatgcygggctgcccttctgttttggtagagtcactgccttcactgccccacccttgaarctggcttgcttttgtcacaaccaccggagaggcgttggtgtgagagtgagacccgtcactgtggacgtgttcacacgcatggcgctctggctgtcctctccttccctggagcccgtgcctttgttaagatctctaggacctgctggcatggcagcttgcccgtaaagcctctcagcagggagggctactgttcttgagggtgagagacagaagtggccgccctgtggtctgagcctgcccggcacagccactgactgcacttgtggtgactgtcagttagggctccgatggcttattcttcctcgaggaacactcacgttctcagggtgggcatgtatgcacacgtgtatgcacrcacgccatttgttcagttgtgtacctgctttaggcttccggctctccagctgggtgaccttagcaggttcctcagcctctctaggcctctgtttcctcaactataaaatagtatcactggcacaggcctcctgggggttctggaggaaccagcgagtcgcggtgtgccaagttcctttcgcagtgcccagcacatagttaggatctagttcatgggacctgtaagtcttatcagtgcttgccgtcttaataagacccacctgttgacacctgggaccgagggtcaagaaggggctcctctcctctctggctcccaaggaaggggcctcttgcaggcacagtggatccagtgtgttgggggtgggtggtgcttttcccctaaggccatggtggttgctccctcgaggattttagaatcttatctctgagttccccgtgactctcggctcctgttttctagtgaacatgggcctcagtgatgacacatggttgtctggcagttcctttttgtggtagccacttgctgatagaaggagaggcacctccccagtgggttctgtgctttctctgaagcaccagatgttggtgccaggacagagttggctcatctcctaacttgggctgagccagtgatggtctcagccagaggctggggccctgtcctgaagctggtcttggggtagtgttctcactattccaccacagctcacacttcccatctgcactggaagggttactgggggctcagagttaaactggccccagcattattggtcactgtagaaactgcaacatgttgaagtgaatccaacatatcgaggaagaggtatgtgtgtgacgtgtgagcatttacctttaagggaaggaactggatgagagccagtcggggtccgttggaggctgcccgggactctggacagcccctgagggtgtctgctctgggcactgtgctggtttcttcctgttttgtcttactggttttgtcttctgggtgctttcagcctctcccacacacatcatttgtcacctaggcggggtatgctccagaggaaagtaaaatacccacagcctttgtcccttcctcccatctggctgagggctcttcctagtgtggggtcagcggggcgtgccctctgcggcctttgccgggctgttgcctcactctgctctgccgcagcgggggctgtctttttcctcctcctctcttcctgcgctcggggctgtattgcatggtggtcagcgcctgatcccggattcagactgctggcacctagatcctccccactcactccctgtgtggcctcaccaaacctctgatgacagtagcgccccctcccaaggttgaggtgagggtttagtggggcgatcccatggagctcagggtaaattcttagtaaacattagctctgccatcattcgaggctctgcagctgctaggacaccagaacgaacctccagaaatgccctgcctttgttcccaggacaagacaagattctaggggatgacggactggtgggattcatggcatctccacctttgggttggttttctgcacaggaagaaacacrtggatttaagaatgatttagggtggctccaagccctgcacattcttcaggggccatcttggtgtgccccctactccccttgttatcccagccactgcctgcccttttctgggccaaggcttggctgctcaggaacacgatccctccccaacctgccgcgcagagctgtgcaggctgagggtgctggccggagaggtgtggagggcctgaggctgtgctgctcctcacactcgcagacaagcccacggggtgcacctgagaatgcacctgtagcaaggtgcagccgtcagggctccctgaattgccttctttgctgctccagttggtgtggtggctctgcccaagggcyttcagccttgtagttgggaatttttaccaagcagcaggcaaggcttgctgggggttcctaggggtagaaagtgattttctgccatcctgaattctggtattttatggtagcagtgaggtgcagcgtggtggttaagggtgggtgcaggctttgaacagacagatctggatttgaacctggccctgccactgcctctcggtgggagtttgcccaaaccaacctctgtctctccaggtgtaaaaggaggctggcagagcctgtcccttgtgcctggatgatgagctgatggaggtgagaggtccccccatgcccgccccaggcatctgtctccagcactttcactcagacgcagctaggcactctgggatgcgggcgctgtgtttgtatattctgccaagcatttaaacagtaatgaacaaaaggggaaaatatagaaagggggggaaaagcctatcagaaaattcatagttatgttgaggtgtgtccctgggaaagtcaaaagaacagagacccaccccggccaacccttctggagcctgagttgggcctctgagtgggagccccacctgccaagcaccctgggccttgagctgggtcttcccaggaccccttctgatccagcctgcacagctgcctcgagaggtctgcctcgtgatgcccaccatgacccgcccaaggccactcagctagacagagcagattttctatttctgtgtctgtttggtggcaaacagcatgccccgggctgcatgcccactgctgaggatgggccctgtcctcagccctcttggggatctcctggcacctccagtactctttaaggaaacatttcctgagtgcctgaacctggcacagaatcctgacctcctgctggggtgggtctggcccggtcctggtagaaaatacagaacccaaccccccatggcccacctctgaatccctgtggtccagaagccctgaactaggggctccctgtcaggtgtcacattgggttagagagacgggacttatatgggcaagaggctgagccaccccaggaagggtccctggtgggtaagtctggggtgagtctccccacatctccacccaatagctaagccagtatttggtttgcctccaggtgagaaaagccttagcaaatgcagtctccagcaggtcctgtggggctcagggaacaccagggccctacatatactttgtccccaccactcacttctggcgctgcaggtggggccagctgagcccagaggagcagaatgtgcccaggaatgtccttccacacccaccaccagcgggcatgtccatggccagctgccctgctggacgtgctgggatgtgctggccaagccttgctggtctgccaccttgtcctcgcccctgaagggctccagtagccagcgagggccagcatggcctcccccgccccagcatgcctggggtctctgctttcatggactgtttgtgggtggggtgaggtggtcagtggtcctccttgtgctgtgtctgcctggggctgctcgtgggcaacgtgggtcactccctctgtcgtggtgcagctggcaccatcaggtgctgttcaaacccctctgagccccgagctgcttgtgatctcatttcaactccatgcagcccctctagggcagttttatttccccattttacagatgggaaaagagaaactcagattgcgtaacatgcccaaggaagcaccggtcccagtgttttgttttgttttgttttgtttttgaggtggagtctctgtcacccaggctggagtgctggagtgcagtggtgcaatcttggctcactgcaagctccgcctcccaggttcatgccattttcctgcctcagcctcccgagtagctgggactacaggcgcccgccaccacaccctgctaatttttttgtgttttttgtagagacggggtttcactgtgttagccaggatggtctcaatctcctgacctcgtgatccgcctgcctcagcttcccaaagtcctgggattacaggtgtgagccatggcgccaggcccggtcctagtgttgacaggcaggatcccaccccaaatggatcatcatttcrgtccttcattcagccacctgaccctgtttttccaggcatcagggttgcagcccacagaggcactcagacagggagggcccaccagctcctgggtgcggggggctccagaatggagagcgaaattccctctgcctgcacagagaggctccatggaggctttgatagggctggggtggctgtttcatttcagctgggctatgcaatggcaggaagagtctttcgggagagagaggtttaggaagygggcgatcctggcctatggagggcactccatgggaggggctccatgtgtccaggggagcctgagtaggcagggagggtatgagtgagattggcctggagataccgggcctttagccctggagtgaggtgtttgctttttattctgagagcttggggaggaaggtgctggatcaggtttgagacacattgagctgagaggagcgtgggacatcagcagggacatgcccattgggtctggagctcaagatgggatctggcctatggtggccattagggtggtcagcagtacaggtctgagttggatttggtgcccggtcgcaagttgcatcgaagctagtctcggtgcagtggctttgcagggtagggcagggacacccggggctcaagccgaagaccctcattgtgcagatgggcccagagcaagcaagacttccccagggcatgcccagcacaaggcggctggagccaaagccaggcacccrcgtcctgccaggtacgtcctggacctgcgctgcctcatggcatgtctggttgtctcctgccacctgcggaccctgtgaggcccagcaccagcaagggtgacccagcccctgctcagaatggaggagagatggaggtccccagaggtgcatctagaccccatttccaagggggccctctcgagtgggagcagggagcattttgtcagaaagggcagcctctggagggttgtggtgactgcttgctcctggagttttctgtgctgaggcctctttgggcagataaatcagttgtgtttctgcagcgcttgcctgccttctccttatgacttctgttttgatgttgggaggaaagaagtctcgctccccccagatcgagaggaagtctagctgcacctgactctgggaactccgcctctgcatctcttctgcttggtgggtgtgaaaacacggccagtgggagcggggctctggcgtcacagacatcagaactgcagacacctggcccaggtgtccgtgttctgtgtgtcctgcggccaccgaggctgctcacagacatgagaggccattccccacccagaaccattggtgacaaacaggcagcctcctctaacctccgcaggatggggcccggcctggcagctgcccccagtggccaacgtgggcctctgtggacaagacaggtgcagctaaggctgcaggtgcaaagcaatcccagggtgggcgggcagggggccacctgaacctctgtacagcaaaacagtgttttcctgggatctccctcttcctgttgttctgtgaaagcacctaccagccatgtgaaaagccacccggctaaccacccacatgcaggcgtctggcacagggtggctcactggccgttcaggggtcggcccctcctgatgtttgcatgtcccccttgtgtgaaactcagatttaatttggtgattattaaagtgcaggaacctggggctggtagaggttttttgtccacagattttgcaaagtgccgttaaaaaaaaaaattcatacgctttgttgctaccaataaagagaaaaggaaagaaaagaactttggtagagaaacatcgagagattttaatatggagatggggtgggaattcgaccttggaaaacacaagcgatcaygtgaataggattttggccttttctaacttagtgtgtgctctgctcttaagataaatacacacacacagagatagacatggcatttcattttcggacagtacattcacgtgttcgaaaattaaaacaacatacagagtaaactcttgccccatctctcccatctcccatgccctcagatggaccgctagtttcttgtgctcctttttacaatataagcaaataggaatttcaattcttattataacagaggagataatagcatgcaatacataccttgctgtatcttgttctcttgaatagtaaaccctggaggtgttctcatgcccttttttttggctgcacggtgttccactgcacagatgtacccactttgcggggtcccctgccgactcctccgggctgcttcagctgtgaatttcacgtgcatgagtccctttgggcatgggagatccgtcttctgcagggtccgttcccattgggattgcttggtcacacgtcgtgtgcctttggcctcttggaggatgtcgccaggttaacgctgtaggagcccttcctccctgcatctcagagggccacgttcagggtggtttgtttcccaccccacctctcagtagaggctggtccagcagttgacattttcacaaccagataggtaaacggtttctctgtcattttagtttgcgtttttctaatcagttgaacatcttttgtatatttaaaggctatttttatgtccttttctgtgttcttttcatttgcccttttaaaataattgtgtcggccgagcgtggtggctcacacctgtaatcccagcactttgggaggccgaggcggatcacaaggtcaggagttcgagaccagcctggccaatgtagtaaaaccctgtctctgctaaaaatacaaaaagttagccaggtgtggtggcgggccctgttttcccacctactcaggaggctgaggcaggagaattgcttgaacccaggaggcagaggttgcagtgagccgagatcatgccactgcactccagcctgggtgacagagcaagactctgtctccaaaaacaaaaataaaaataaaaaataaaataattgtgtcattggtcgttttcttctcaattgtatattagggagattaatttttgcctgtgatatgagttacaaatatttattactaatttgttctttgttttctgactttgcttttgacattcttgagctttattgagatataattcatataccacacagttcacccatttaaggtgtacaacttagtggtcttgaatatattcacagagttctacagccatcaccacaatcaattttagaacatttttatcacctcaaaagaaagtccataccccttagcagtcactccccgtccccttcagccaccaccactcccagccactggcaaccacaaaactgtgttctgtctccatgggtgtattagtgcgtcctcacgttgccataaggaaatacttgagactgggtaattttaaaggaaagagtcttaattgactcacagttccacatggccggggaggcctctggaaacttacagtcatggcggaaggggaagcaaacacatccttcttcacatggcggcaggtgagagaagtgctgaacaaagccccttataaaaccatcagctctcgtgagaactaactatcacaagagtagcatgaaggtaactgcccccatgattcagttaccttccactgcgtccctcccacgaaacgtggggattatgggaactacaattcaagatgagatttgggtggggacacagccaaaccgtatcagtgggtttccctattctggacatttcatatcaatggatccatgaaatatgtggccttttgcgtctggcttccttcacttagcgtcatgctttcaagggtcatccacaccgtagcatgtatcagtatctcctttctttttatggccaaataatattctgttgtacagctagaccacattttatgtgtccattcaccagttgatagacatttgggctgtttctactttttggatattttgaataacactgttgtaaatgtttgtgtacaagtttctacatagacatatgttttcatttcttagacatggaattgctgggtctgatggtaactctgtgttgaacattttgagaagctgccaaactgttctccgcaacgactgtaccatcttacattcctaccagtgcttttggcattttttgacatgtaaatgtttttatcaaatttattacttatttcttttatggctctggattttgagttttagaaaggcctttttttctcacgagatgataaaggaagtctcctgttttcttctagtactttgatgggttatattacactctttggtctgtgttgagtttatcttgtatgtggtgtgagtatggagccagcattttctttaatgtagctgcctgtctgtttcagtaccatctgttgagaatgccatcttttctcctctgctttgagattctacccttatcatataccaaactgggtctatttcagaacattctgtttcattggtctctgtaggtatgcatgtacgttcatactaatatgctgttttagttatggaggcttagtaatgtgttttggcatattatatggtacgggctagtctaggagggttagcttccccactgttctttacagagttttcctgactaatctcacttgtttattttttcattaaaaacttgaaaattagtctgtcttaagaccatggggattgggagtactgttgatattttagattgggatcatattagacttctgaattaatttagggagaatttacacctttttgaggttgagtcttcctatccctcacacaggatttatttctatttgttcagtcttgcttttctgttctttaaagtttttttttttttttctatcaattttcccagttcttataagttcattcctgggtattttatcttttgtgttgctggcgtgtcttcttgctcttgaaagcagattgttgttagcaagagtggttggatataagcagagctcccagacccctttgctgtggccttgctgtgtccacagagagacagaggcacagttgtggggtggagtgtgggaaggggggatcgcacccttggtggtctctatttatccctccaaacacttctgaggctttgaggctcttattagccttgtacacatgagaaactgaggcacagaagtttaatgatttgccaagttccctcrgggcacacccgagctgggattccagcccaggcctgtccagcccatactaccccaccgtcctgccggaggactgcatgctttcctgagcacagcccagagtgatggggtgcgattgcacatcacgcagctgtgcagtctggggcatgtcccttctcctcactcggcctctgtctgctcatctgcaagagtggctaaaccagttggtgatttgctcacttctccaagagtgtgccctccatggaagacaatatctggaacagagttgtgagctgctggggtggagcccagaggccgtgctcagcagtcctgtcttcagcaccccgatgtggccccaggcagctgaatgcgaacgagtgcccaccagcccctctgagagccttggacataccttctgcatcgctagtcctgctcagaagccacccccaaaactgtgagccctgctggtcgactctattcaaggtctgtgggcgcaggcagtacattagcctcggccccccgccagaaccctgtgtgctttggaaaggtcccttgacttttgttaggcaaagaattctcttcacgccaagctgcgagcgaggtggtttcacragtcctgtcctgagtgtgtgctggctggaatgtacaccacagaaacaaaatgtttgttttccaattgtgagagcaccgggaggccctttggcgtcagctcccacaccttctgtgttcgggcaggccatctgccatctggggcctggtgcagaaacgtcgccaccgtgtggcctgtggggtrccctcggagaggggcccctgggttggccaccattcagaggacacgcgtggctctgggcctccaaggtctgttcttacccacggcatcctggggtgtaggcctcaggaccccagggctgtgcaaacagaggcccagttgggagggccgaccgggtgggcccttccttcctacctaccctctgccmccaggctgcacgatgcacccactgtgaaccaggccgtggcatgtggggtcagggttccctgcacgcttggcaggaaatggggtacacacaggagcttgggcctgcttccggagtggctgctgcagaggcgggttttggtgggagagaaggaatctgccagtgaagagggagacagggcggggccgtcaggatggtgctgacccagggctggtgcagagggggtttatgtggctgaaagaggtttgctatagaaggagtcagagcctgagtgggagcagcaagggcggagggcccaggaagcagagcctgaggaagaggggccttgggaaaggccagcccgagagtggtggccgggctctggcctgcgtggcgggtttggcccgatgagcaccactctggtgaacttgacaactccccaggccaacggagtgactttctagggctccgttatgagtaaccctctgttgctgatagcccacgggatgagtggagtccacagggcmcctgctggagcccacgcttgccttccttgggtctggcagggkagatagtaggctgggcctgctggccctaggtccgtcttcagaggcctgggattttaggtgtctgggctggggatgggctgtccccaagatcaactcctccttcccccactccttcagcctccggaggccataggtaattttccttagagtccttgtccccagctgggtcctaggcctcgagttaccgtaggcaaggctacactgtgtaaagaatccagygggaggggtgcccccaggatgcacagcatgagggccccaagagagccaccagagcggggacagcaaggccaagggatggctgggggtgtggagaccatggagagagccccaagctggtgccacccttcccgaagtgactcagcgtggcctggactggccgccacacagcatayctggctctggcaccacctgggcctcccagatctggaggggatgtcagatttggggcaagataccttgtccacagaaaaggaaaaatggcgcctgccctgtgagtctgaccagyctgagacagtgccgccaaagtctgtcccctgctgtactggcttctggaacggggtgaccacagtctggctggcatgtggcaggcgctcagtacacatttgttggcctctgcagaaatgagctaaggaaactgtcacaggaaggtgggaactttcctagtaactgaccagggccagccttccaccctgaagatatttaccacccccactgggccatttgcttctagaacctgtggtctgggaagagtcttgagtatccattgccaaatcagtggagcttccagggccctggagtaccttcccgctcctggcaacctgatttccctattttcaggccctggcaacctggcttccccatctgggttttgctgccagtgttgccctgattcctgagggtaaggaggcagtccagactcagaagggctgcctctttggggtccaaaggtggtaagcatttcacaaaaatgggctgggcatgatgctgtcccccgcttttctttttttggagagacaggtcttgccctgttgcccaggctggagtacagtggtgcaatctcggctcactgcgacctctgccacctgggcttcagtgatcctcccacctcagcctcccgagtagcggggaccacaggcatgcgccactatgtcaggctaatttttagtttttttggtagaratggggttttgccatgttgcccaggctgatctcaaactcctgggctcaagcaatccacctgccttggcctcccaaagttgtgggatgacaggtgtgagccaccccgcttggctgatgctatccctttttaagactgggcaccaacacggccctgggcgagcagctgacctggcctacacaggaggtggctgggcagcagcagaagaccagatgcccaggggaagggccctgcagagcctgggcagtcagcccctagggaaaggttggccatgcccacagccttcgaggcatctctagcacctgcagcctcagaggaaaagaagccaccaccacctgacccctctggccccaggggcaggggcagcagcttcctgtgagaaagagtacggccttcacgcaaaatccagatttaccagagatgggttaaagatgggccaaaaatatgcttgtgcctttttttcttttctgaaatagttttttaaaaagcctaggaaaccacatgccttgccgtcttggttgtttctgtgccagcttccagcacaaatgggacttagaaaatttccaggctgttggccatccattctcatagcctggtgttttcttgatacttggagaattctgttctcatgcaagcgtctgtttggggaggaaatgcgtccactcagccagagcctggggcccctgcagctttcagcagggcagctgccaggccaggctggggaccagctctgctcgtgacttgtgagttgggcttgttgatggccctttctcagagggactcgaggtagctccatgaagacctctaacacagagcgccataaaactggactaaaaagagggagagagcaagggaaggaggaaacgcagctggtcccgccatgaggagcagtggcacaggagggaagtggtcttcgcttgcccaaaagggaggcacttgagcacctctgggagacgggcttggcgcaggcaggggcccagaggaagcctcatgtgggcactacacttaagacaccgactaaccgaggagaggcgtccccaacaaccacccctccccagcacatgccaggcaggctggggccaggaactggactccccacagggccccgtggccagtctctgaccatggcttgacattcccgttctagaaagaatagtagtactaagaagcaggtgcataacctataactacattaacacccagggtgcttttacctgtggctttagattgggtctctagaagcggggcctgagccggggattctcrtgccagtgacacagagagggatgctcccagcaagaaccttcagggaggcgagggaagcccatgaactgcagaggcccaggaaagaggtgggctcagctgaagtcgcttctcagcctggtgctttgggagctgcgaagtgtgactagcacgtgggacttgatcccgcccaagaggagggacagctcctgtccctgcacctgttggtcattggctgggggtgaccccaaagggaaagggtaacctccttcctatcctagatctcccagcccagagtagttccggaaggggcagccatgaactgtcagagccaacactcacagcagtggagagtgggcactgctgtgggtttgggactccaggygggacaccagcagcctggctttcctcttaggatccttgcagtggccctgtgaagcagcctggccagagacagcagttctgcttcccaggggaggaaacgggaagtgaggccacttggccagtggaggatctcagtgcctccagctgcagagtctagtttcccactctcctctccggaaccctccaggttcagtggagagccagggcccagggggtgagaataccgcagcctccttcrgaggaggcaaccgggacaaaggggagtggtcactatctgctcccagacatatcacctgaccagccagctttgtctttgtcaccggatgcccactcctgcatgtggggccgtagctcatgagttctagggacagcagtccctagacaaatgctggggctgtttccccctccactycccaggccttgcccttcggagcccagagtgggttctgggtcactactgataaaacatgtggtttagttcagctcaggagatgtttctagcgtctctattacgtgttcaccctgctggcccaggaacagcagcacctgggagagggaatgagcttgttgggctgaggctggacggagtgagtagcagtctgcctggcagcagtacagagctgatatgttgagttgatgagtttcctgaggcaggtctgtatttcagcttgtacctagaaggcaaggaccaggccacctttgtctgtatccccgtggactcaggagaaagtatgggaataaatatctgcacagaacagccctgcagaagaggggtcattgctccaagctgggaagccctagggaggccggctggggcaggctgagcaggaaaccccagctggggccagcgggaatggccagggcctctttggtggctagagctgaggtctagggggtctgatggaaaaggcagggcctccatcccaaagttgcctctctagcaggctgctgtggtctgccttttgcagactctaggagtaggtcttgatccatgtccctggccactagcctgaggccatagggacagttcccactgagctttttacctgggcaggcctgttccagagtaggtggcccagcccagggctggggctggatgtcaagagagcagaagtcgacgggctgggggacagttggtcctggagcagcactttcaccttggaataatgtgttcatgcagcactttgaacttagccattttgcggctttttgcagacatttttgagggcacacaggcctccaggcttccaacttgcctgtgcagtgttcttccatggggtagctagagctgctaggagactctggggcgggaccttgccccggggcatggagggcacagggcagctgcagggcctgggtgtggcacaccctgggtgtctgcatgggggttgctcacgagggatggggctctgggcagaacacacaccgccccattgtggcagtcacattccttcctgacaggtggggctcgccaccagctggggcaaacagtgggtggttcttggctttcttttactgtggctgaaatggctgttttgagtcaacggaattctcaaggtttcgctggctttgtggccaggaagcaggtatatttgaagaatactggagactcagtggcattctggggtttgcttgtgacgagattcaccagcccttccttgtagactccccctgcttcacagcagaaagggcccaattagtccagatagccctgaacaccctgactcggcaggcaggctggctgcagcccagaggtggaagagttgcctggcgccgtgatgcccatgtggatggagtctgcctctgtattgcctgtctgacctcagccccttccagggcgcagtgaggcaaaagccacacgtctgtgaaaggtctagctaatgggtctccagtgcccgtgcctggctatggctaatgcataaagtgtcttactttgtttgggctgctgtgacaaagatgccttagactggggaacgtataaaccgcagaaatgtatttcttagttagaagctgggaagtccaagatccaggtgccaacaggatcggggtcttgtgagggcctgctcttcatagttggcactttctcacatccttgtctggctggagaggcacctgcgctccctccagtctctgttatgggccctcatcccatctgtgaaggcccctacatgacctcatcacctcccagaggccccaccttttgcactgaggaatggtgggggggggggggggcacaaatttcgaccgtagcaccacggttagtgccgagacccacacaatcatggtggccataagttaggcacccccgctacctgcgccttatgccagaggaggtcagtgggaagctccgagcaggaccgagagggtgagcacagacaagcgctgtgcggcgtctgtccgatygcgcaggctgcgctcctgctgcgttcacgtgcgaggccacagaaaacactcrcagcaggccacgccccaggcccctcacatgacagctcgcagaaaacgctggcacgcgttcgggcgtcaggcacacgcatctcaacagatgtggctgacacccaaggcagtcggcctcagtgccctgtcacccacctagaacctgttcacagcatgtcatccgggctgctctggccttgactggacatgattatttatccttacacaccgtggctgctctacaggccaagaaacaggctgctcagccagggtcaggagaargtgggtcaggctccccggggacctcaggccctgacgcatcctggcctcaccctaggcctcctctgtcggggcagcctggctcagcagagcccgggacacacggctgaggccacccaggctgggccrtcttgcccctgttttgtgccccctactcagttctccttctgtcctggctcaggtstaggccagtcaagagggtggctgagaagcaggaggagcctcagagaccctcccctcgaaagcactggggcttccacctcacaagcggcaggttcgctttgggagctgctggtccatcgcccaggcctggccaggggcaggcgaggatcctggttgccgatccatcgtccaggcctggccaggagccggtgaggaacctggggctgttgtgcaggggtcgccgtctccagctctctgccgtggtgaggggattgtgctgtgtgcacaccaccgggctgcatcgaatcccaccatggcccagagggtggacctgtggctccttggggggccagcatctccagtctaatgggtgcccctgccactctcctgagttcccgtgcagagctccccccaacacctcagccttcacctttctcagttaatcaaaagattccaaaaaaagcaaacccatcagaacggcttcctccaccgagtgttcaggaacaatgagcgtgcccatggcaggcacatataccttcctccagagagagcgccttttatttcccatccgctgaggctggttcaacagcttgttggctgtgacagccagtgatcacctgtatttcaaagagacacacaaacactgcagcctttgaaagaatcaggccctcgggacaggtctgtggtcttggcgtcagcaggcgtgcggcgagggaggcggcgggtgctccaaggccctgctttgcttccccagtccccacccatctgctgggaagaaactaaaggctggaattcccccctgccctctgtgcgcagctcttccctcgctcccctctgctattcgacctcgttgctgcagtccggttggggatatccaggactgcgccgggagtgcccctcactgtctcagcctctgtcctgtctgtggcrtgtgcatcattctgaggagaaggctggattttgtgctctgccctgggagcaggtgttgaactgcacccacttgtgcacagtgtcagccctacccccatcgctggcagctgacgccaagcagaactggcctgcgtacccttgaaatcctgttcaagctctgcctgccgctcgggcaggccccaggctgcctcctgccccaggccagcctgggagcacacttggtgcctgggagcacacagagggagcacacttggtgagcggagaagcttctgcgcagcctactctctctctggggcctcaaagggcccakcaaggcaggcagggagcatcatgcacctcttccagatgaggcccccagctggcgagcaccagaacctggagcctggcccctcctcagcagatcagacctcccagtccccagcacctgtggagggcacaggaccactcccttctagagactctgtgtctccaggtgaggccgagaactcatgtttccccagctccctgcatggctctgttacacaccaggctcaggacttcagctcggccccttctagcctgcggctcccgctctggttgtggagagtgggtagagcgggcgtcgtgtcgccctgtgtggggcagttacagcctgggcttcctccaagtcagatcccttctcaagggaagtatcgcggcgcgtcagttatgtttgcatagaggtccctgcttgaaaaacattgatttcaccaccattgtagggtgtttgggttactctcttcttttccatttaacggtatgttgccaaatttttacacacatcttagaatgttttcttaagataaaaatccaagtagtgaaattacctgatcaaggaattggatatattttccccaggttgcgcttcagaaaggctgtggacgaagtgttaggagcattcctgtttcaccgcagccccccagaactgggtctgcatcaaatttgtgtgctttgccgagttagtaggtgaatagtggaattgcgcgtgtctttatgagcacagagcgctcattggccggaggtgcatcttcatgagtacgttgctcatgggcccgtccttgcctggataggaggaaccygggacttgattggtcttgccacagcctggtggtctagttgctttgtggggtgtgcagtcctggggctgcgggaggggagtaacccttagtaacctgtgtgtctgcccctccacagaactgtcagaccttcagcagcctcagctgcctgagygcagggacagaggactgcggtccccagagccccttcgcccgccacgtcagcaacaccagggcctggaccgccctgctctcagcctccggcccagggggcaggacccccgctgggaccccggtccctgagcctcttcccccttccttcgacgaccacctcgcctgccaggaggacctgtcctgtgaggagtcagacagctgcgccctggacgaggattgtggcaggagagcggagccggctgcagcctggcgggacygcggggcccctgggaacagcctctgctccctggacggcgagttggacattgagcagatagagaagaactgagggggtgtgggcccaggcagggctggggtgtgctggcatcgacagcccccactctgggcactaggtgggcccttgaaggggagcccaactcgtgggcctgatgaaagcttcctgagtggtgtcgggtcccagagagggagcccacctgctgcctgggggagagcctggcctggccgcgtcatacagcgggtgtgtcagcctctcaccggctccccgagcgtggcagccaccaggtccacagaactactgcagcccagaggacagctttgaagtttgcgtcttttctgcctctttccctgtgggatgttgggcagtstctgttgtccccggcagagctgggcaccgctctgtatccccctggtggtgggggctgtcagggagggcctggggtgggggccaggggccatctgctatgtcagggcccttcttggcctcactcaggttcacttctggggagtcggccccgcagcttctttcactcagttttactccgtgccttctctcccaggtctccctgcttcaggcttgggaaggttcgggagatgcttccttctgtaacaccagaaccatttggccttaattccaatgtgagagacagaatccctggggtgctggactggccctccagagggtaagccatgtccggagtctcgggcccaaggaacgatttggagggtgcttgttagggcctcccgtgttgggtagaaatttggtggatctgttggctgaaaagacggacttgcttgcctctcctacagcatggagaggctgaccccatggctctgccaccgttggggcagggttagcagatggcagcccttctctgtggctgacaggtcactgagtgataagcatggttggttccggtgagtgtagggatggcacgataccagggcagcctcttgaaaacggcctcgggagacgggagctgcgagcaggtgggcagatgagggccctatgcgcactcaggggtgaagggcgtccgctggccactctgcaggggcccctgcaggattccaggcacctcccrtttgtccttgaggactgctggctgtaaccagggcacatcacccacctcaagacaagcccacgcccttgtcagcttagggggagcccagtcctgagggctgcatctctgttgtaggcccagccaccggcacaaagctggattcatgctccctgcccctaccccaccctggctcctcaccctggggcatccgaggagcctagccccctgagggtttgctctcctctcaaggtttgtagctcctctccggctgccttgcagacaccaccacatgggctctgctctatgggaatctggcttttagcgaatgtggcgtcttctgcaaacaatagcaattgggctggcttaggagcaagtggctcattttcccataaggctaaaaataactggtgcgctcccttgtgttggctgacacgcgcgttcaaagcacttttgtagtcactttgcttttgctcgtcttcatggacgagtgaacgcctcgcttctgcaggttgagtccagatgcttctcaccttctttctcctcaagaaagatgctttttgggaaacgttgtttaaatcttatttttttactacatcaaaaggatggtggttcaagttcccaatatgtgggtggcacttcttaaaaatcagctttaaggagctggcagaaagcccccagccccacagccctgagagatggtgttgctagctcaggtggctgacacatggggtatgccgggcactgggcaggtcccagagcyggggaaccagctcacctctggttgctgtagctcctgccggaggcatgtctacttgtgatcccggacagccgaacccaagagctggtggctctgagcagacagagacatcttggcctgtccctgcctgggggtcatggagaccatgtcttcttagagcaaatgtggaggcggccagggcagttgttgggtgaatgtggagagcacatggccatgtcttgcccccggagtaccactgggcgtggggggtcctgkcaccacatgcccggtgtggccgagggcacacagcctctatagcaggccttcctgtggaaggcagaggcagtgagggaggtggacggtgccagctgaggctgaggcatgcagcagcccccagctacctttgcttagggctggggtgggaggcacatggtgacaggtatatgtcgtgggactggggtgtgggtgacctgccctcaaaccttgcctgccacctccccattcaggcctggtggcaggaagggacaagctgtggagctggctgagtcacagccacctccccacctccccgcaagctggtcccatcgaccagcaagcccagccccagggcgcttaggsagaaatgacccagcctcctcagaccccgcctgcctgtcctgtgcccaccacgcagcagtcaggggagaaaatggtggctatcccttctgcttagagaaagaaatggcctttagctggtttcatgtttgtgttttgactggagggagtagaccctatctataaggtgccaccccatcatccaagctgccacactgcccggagcagcctgttcctgcactccaccctgctggccccaggacttctgatctcagtcctctgggagggaggttcgcctaggaggtgccccccacattggtgtccccatgggcagcaggcagacagctcacccccaccagcatgatggccccagctgggggcagtggcaggagccttacttttgtcacagccttgcccacaaaccctgcctctgaggggagactgaggaagggcagagccagaagcaagccgtgccaggccatctgcctgctcatggggtcctaaagcgcgggctaagcctgcaggaaagccggggcggkggggggggcttagtgccacatgcaccccactcattccaaagccaccaaactgccaggggctgccgtccacccgtggggcccaggggctggggccacagccttgccattttcgttgccataccctcttgccttactcgcggtggaggccggatttgcacgggcagacgtgcacctgggcccgtggggagcttgttctgaccagacgtacagattttcattctcagaaagccttacttttcaaccaaatttytgtagccagttttgtgaatttgtacactgaaagaaaatttaaataaaggggaagtccacattaaaaagaaaacaaaacaaaccctaactaacttccaaatgggtctcctggtgcgggggcgtgagtggccgtgccctgggtgtgctgcctgtctgagcaagcttccctagctgtggaaccccgggccccctgctgcgggctctgccttggtgtcatgcctgctgcacccccgtttccactgacgtgccgtctgtggctatgggggtggtcactggaatgacggtcactccagacgtcagccggcagggatgcagcaggctggccgcgcaccggggctcgggcaccctctggccccacactggcaatgatgccacaccttgccatgtccacgctgttggtcaaacccctctgtcatgcctctttaaagagaaaagaagagaaagaktttttttttttttaatggcagaccgaagtggagatcttgtagcctagataggatagtctgaccttctagcatagtctttttggcaaatgatttgtgttttcagtgtgtggggaagctgtcctgggggctggggcgacagatagcacataggctgtttctggggctgcaggggcttccctgagctggatgttgtgggtgttgccgtgcttcaggaagtgtggcgaccagaaagcgtagacccgggkcccagrgtctgcccgcccctgcagcctggcctccccgcacaggctgtrgcttgcactccagccgctctagtctctcaggaatttgcttgttacttgtactgtgtaaataaagcttcctggttcaatacccaagtgcctggtgccagctgtgtggtttctgttgggtgtggtgaactggcaggtcccccctgctcacaggagcattagctctgggcgcagagagacctagactggacccttctgtcccctccaagcctcggggtctgaatcgataaaatggggctagcagacatcacagagctgtggagacgccgggggacgggggaaggctgcccatggccacagctgcatcatggggagcccttctagggccaggagccccaggacagcagtggggagacactccttgtgtcacttgagttagaagccatggaggagtctgcccttccgagcacagcagctcagccttcgacagcgctgggaggtgaggccacacagcagcgtgcggagatgggcccagcctggcctgcagccctgaggggcctgggatggcccccaccacccacccaccagggtagctgaggtggcacagacaggctcactggctccgggtttctgcccccgctgcaggcagcacagtgcagacttctgctgcgtgagtgagttgcgggggccccagaagcacgaagcccagcccggcgtggcccactgtctcccgtgcatggccctctgcttacccggactcaggagaagggcgtgtttgcggcctggaggacaggcgtggagaggtttgcttgatttccataactcaacacttgcccacacaatctgcccatggaagtctggcctagaatgcttgttagggccagagcagcccctctgggaatgaggctctgtagcccccgcttttcttttggtttttgcttttagcaagattttttttttttaagtctatgagcactgaactcaagaaacaaacatgtgaagtggggctgctggggggaggtgagccccttgtcctcactgccatccctgcagccctgccttacccaaggcctagggactcactgattcgaggctggatgcattgacttccccagcacaccctcccctcacccctgcctccgtatctgacagatgactggtgggccaggggctggcggggggcttctacccagcgcagtgcccccacccttgtgccccacctgagggtagggcacagagtggccctggaattacctctggcccttaccagccccttgctgcccccaatccctagatgaggtccctggctggatggatagctccgttctgcccccacgtggggcctggccccaggcctcacccccagtgcagtgcccaggccaggcacaggtgcttctgacatggggcacacgtgtagtctccttacctgcacagcgatcataaccctgtgggcttacgagagagactcagccactctgtccagtgtgcagggaaagggctggaaggaagaaggccgaaaggaaaggccccagagagcacagtgctcagactcccgggtgacttctggtttctttttatatacttctgttaaatttcctgtaataacacatgctgcttttataatgttaaaaaaaccacgtagaatgtaggctgccccgtgtgttcacctcctaaaccaggacagttctgaggggcagctggaactgttgacacgcactctggcacgggaggcggacccaagagcacccaccccagaggggcaccacactcgcccgtcccgccctgtgtccccacctctgccctgaggtgaacacaggaggctttccacctgccagctgccagccaacctccccgagaggggcaggaaccgaccagcaggacagacccacccaggacagcggcaccaggtcaggcctcagcctttccgatcctctggagggctcaagccgaacggaaggagggaagaactgcagtcacctgggccggtggcgctcacatctgacgtggaggcctctgcttcacttggcccagttcccagccttgtcggcagtgaggacatggaccctcgctggcatccgtcctccgtctggcacaacgtgccgtgttctctctggttagggtttgggtgggacggagactgcgcccctgttcctggtccgcctaagtctctgccagtctgagtctcgtgggccttttctgcaggccctggggttgcggagcaggcagggggacgtcggtggctgggggacatcccgccacctgccaagtagctgcaatgggaagagatgcggttcccgtgacagccaggcctggatgttcaagtcatgtgagaccaccaaataccttgttgcactaagccaatttgaattgagttttcataagtggtacattgagcccagggcttggtactgtgtgggccctagagctggaaggtgcaagggtgggtgaggcccgagaggcctgctctccctgtcctcccctccaccccccaccctgctacccttcacggttgcctggcctggcagctcccgagcctgggaggtgtggctgggcctaggctgctgctcactcccagcctcggtgggaaagacccctgggagcaccccggacctgtggtcctgagtctttttttcacgacagttccgcgacatgtgttgaacacagggccttagcccattggcagccccgaactccagccccgcatgcggccggcggttccacaccgtctctgccagggcccgggccccctccacatgctggaagtggccaggctgccggaaggagccaggggtgaaggaggtcattcctcacttctaggcaacaccgacccccaggcaagcatcacaccacggctcatcagctccagccagagacagggcaccccgcagggccaggaagtgcctgtaaaagaagtgaatccctctgttttatagacggggtaacaggctcgggctacaccaccccaccacaggtgtggctggacctcacccctcagaagagctcatctctagagtgaggacactggtgccctggctcagccggaaagtcagccacaggggccaccacatgcgtcccccacaggaggattccaggcaagggtgggaagcagcacggcaacagaaggggctagaaagggcctgggaggcggggctggaccttcctgcaagtcgcagctccacccctcactaactgttggccctcagcaagccgcgagctcaccgcaccccagactctagacccgtgcagtgggaaggatgacaacacccacttcactgagcccaccgcggctcagagggtggcatgctcccgccccaacaaagcagggggctgcacctccaggggctgtccctctgggcaccccactcctgggtagcaacttgaaagaggaggtctcggctgggcgcagtggctcacgcctgtaatctcagcactttgggaggccgaggcaggcggatcacaaggtcaggagatcgagaccatcttggctagcacggtgaaaccctgtctctactaaaaaatacaaaaaattagctgggcgtggtggcaggtacctgtagtcccagccactcgggaggctgaggcagggaaatggtgtgaacccgggaggcggagtttgcagtgagccgagattggccactgcactccagcctgggcgacagagcgagactccgtctcaaaaaaaaaaaaaaagaggtctcagcttgaactccttcccccagaggggttgctgtcttggcgggaagcttccccattaaacacaaaagaaagaaaaaactaaagacctacaaacaaaccggcatcacgcacagcctggcatcacgcacagcccggcatcacgcacagcccggcatcacgcacagcccggcatcacccccagcccggcatcacgcacagcccggcatcacacacaaacccggcatcacacacagccccggcatcacccgcagcccggcatcacccgcagcccggcatcacgcacagcccggcatcacccgcagcccggcatcacccacaaacccggcatcacgcacagcccggcatcacccacaaacccggcatcacgcacagcccggcatcacccgcagcccggcatcacccacaaactcggcatcacccacaaacccggcatcacgcacagcatggcatcacccacagcccggcatcacgcacagcccggcatcacgcacagcccctccaggctgccactgaactgcagccgccgcctgaacgtcctgtattgtctcctaaggagctgccatcaggggactccatcaaggagccagccatctgcatattttccaactaaggggccaaatggccctccctcaaatccagtgacactggcccggctggtggcctctcatcttgctgaaaagactgtcaccgtttcccccaatcctgatttaatgggcggccttgcgggggctgtacttgcccctccccggcgtgggtcccacactttcttatcgtccaccttcatgtggtggaaatcctgctccggagacccatggcttctctcataagaagcgctctccaggccgggcgcagtggctcatgcctgtaataccagcactttggaaggccgaggtgggcggatcacctgaggttgggagttcgagaccagcctgaccaacatggtgaaaccctgtctctactaaaaatacaaaaaattagccaggcgtggtggcgggcacctataatcccagctactcgggaggctgaggcgggagaatagcttgaacccaggaggcggaggttgcagtgagctgagatcacgccagtgccctccagcctgggcaacgaaagcaaaactccatttcaaaaataataataataaaataaaataaagaagcagtctctcaagggttatcagtagcttctgaactgatttggggagaaatggagcaatcaagttatctgttcagctgactgattctgaaacctgaaacttcagttatgagtgatttgttcccagggcccctgtgggaaggccgccgcgcccttggtcgggaaagcaaagctcaccacccccaggccacaggctgttccgttagggaaggcagtgccaaagtttgccctggactgccttgttccagatagggccaacagcagctcactggcccctctgggcctcagtttccccatctgctaagtgaaggggctggagcaggtgaggtgtttcagggcccttgtccctcgcacctctgatattcagtggctcaagcataaggcaggactagagacagtggcccagaccctgctggtggcctcccccatacggttcttcctagcagtcaaagcctgagtcaaaggctgctggtcaaggcagagtttactgaactgttagtttcctcctgcacacaccgggcatgacaccttcaagtctgtccagcagtgggtccagaaagtaccctgtgtgccttggacgcagaggctacagttctcactgtgtggcatgggagccttcacagtgccctcgggagctgcccctggtctttgtctgcaaaggtgactgggaggatagaaaaagcagcgggctggcattgtttcgggggtggggtggtgggcagtgtgcctgggcagtcgcagggaggctgacttggttctgggctgcaagatctgtgcataggaggcccctgggtttcttccaggctcttcactgaaatgcaaagagtctgaagaggaggcagtgggcatagtgcccctgaatctggttaggtggagtttactgcatttaaaggcccatggtgagtggtgagttctgggatttgggagattcccagaggcctgacaggcctgtcccaccctcctggacttcactacagggagctgaagtcagggcccaggcaggggagcaggccacccaggtagggaacaaatgcctgcccatgcagggcagagggcagaaggcagggctgtcagggccttggttggtctgggcactggggcaggtggaggggaggcaggggtggaggagaggcaggggtggaggaggtggggctctcctgggcgggtggaggagaggcaggggtggaggggaggcaggggtggaggagaggcaggggtggaggaggcggggctctcccaggaggccatcacttgtcggcgtgctgcagcagcaggtccactgcctctgcgaggttgtccacgtacccatcagccttcacttccggatggtgctcgtcactgggcctggagaggatggccggaggttagtcagtgcccccacgctgacccctctgcagccacacccaccctcccagcatctaacatgggcctggccttagcttgaggaaacctccaggtcctgccaggcagcctggcccgtggccact

SEQ ID NO: 96797 - DNA, 88459 bp, Homo sapiens
  misc_feature (1)...(88459): n = A,T,C or G
atcacttctgtgcaaaggttaaatttttttaataaattaataatggaatgtttaagccttcctcagtaatgagtataatcttatctctccatctgatctgatgggtcaactatatagtaactaaaatagactgtaacagctgtcttcatcattagtttttattttcaccatgcatgtagaatgctttatattgtagtcccttattatctgaggtttcattttctgatgtttcagttacctgtgttcaactatgtccaaaaataggtaactacaatgatattttgagagaccacattcacatataacttttattatagtacattgttataattgtcctattttcattgttaatatcgtactgtgcctaatttataagttaaactttatcataggtatatatgtatagaaaaaacatagtgtatactgtatggggttcagtattagctgtggtttcaggcatcctctgtagaggtcttggaatatatcccttgtggataatggaggactacatatttgactggttggtggagttaacctaaggagaccttttcatgactctttaaacttttaggtttaaaggttgactcggaaaagaaaaacaatttatatcaataaatctaaggtaggcttatatgaatgctgcatacttttcatcactgcagtgttgtggaatgaaaagtaattgtatggattttatactatacaacattaaactcatagttatttggaatatgagcaaccaggaaaagaaaataaccaggtattttgtttgatttacatagtaatctacttttagtagtcatgacaggatgaggtatggcattttaaaaaaagtaattcctagtattgcctaggtttggtactactcagattaggttacatttgcaggagtactatacaacaactgttcactttgatgaatctgaggcctttaaggttcagaactgctttccctatatcaatttttttttttcaaaaaaggctttacaaaataatttaacattgagtatttaattttacattgcaggtactggaaaatatttgttgaagaaattaattattccttaaaactttattattgagttaaccaaaactttaccaaatctcagtccttagctattctgttgcgaagaagtgagagtttactaccattaacaaggctgcagatgtacactgctactggcagaactatccctagagtggcaaaactctacatttcccaagggaacatatctgtgggtcatgttttgctttggagacagtagtaactctaggaggtgaacacagaacgttctacatatttagaaatagaaaaaagaaatagcccttaacaattaatcccacactctcaccctcattacctcttcattctatagatgctctcaagcttcttgtgacttttgttgcaagatgttgtgacatggcatctgactccctattgatcagcagggttaaaatcctcctgggttttcctatccacaatgttctgtgaattgctatatttaaactagcttttttttttgagacggaatcttgctctgttcccaggctggagtgcagtggcacactgtagagtggcaaatgaagacatatttatctgatcctctgatatgaaatcccctattaataaacacctttcttaaaagtgctatataaaagtatgcttataataggaatgtttcctttaatttgtctagaattgaaagggaaataggcaggggggttcaaaaaacaaaagggaaattgaaggcatccagaaacttattttatttttgagaccgagtctcgctctgtcacccaggctggagtgcaatggtgtgatctcggctcactgcaacctccacctcccaagttcaagcgattctcctgcctcagcctcccaagtagctgggatgacaggcacctgccacggtgcctggctaatttttgtatatttagtagaggtgggatttcaccatgttggccaggctggtctcaaactcctgacctcaggtaatccgcccgcctcggcctcccaaagtgctgggattacaggctgagccaccatgtcctgcctaaaccaacttttgtgaaatggctttttaaggtaatgtcatgaaccacttcattcctctgccagggtcttatttaacccttcaaaaacatgggtgggccctatataatgtgacttcattctacattggatccccacaaagctagtcttggcttttcacttggaacatgcccaatgctgatacaaagtaaagattcactatagatcttattgctatccatcgtacgttataaaacttgtctaaatatttaaaggtttaaaacaagcctgcgcagtggatgtcaagagtaaagtacgtttcatagtaaaattaaaatgccattaaaattttgttcttgtggggctgggtgtggtggctcatgcctgtaatcccagcacttgaggaggctgaggcaggcagatcacctgaggtcaggagttcaagaccagcctacccaacatggtgaaacccctgtctctactaaaaatacaaaaataagccaggcatggtggctggtgcctgtaatcccagctcctcgggaggctgaggcaggagaattgcctgaacccaggaggcggaggttgtggtgggccgagatcacaccattgcagtctggcctgggcgacaagagcaagactccgtctcaaaaaaaaaaaattgttcttgctttgtaaatgctgctttcttttcttcattttggagcggggagccttgccgatagtcagtgacttgtacatttgtttactggcatttgataggctgctccttatcttgcatgaaaaaataaagacctagccagtctaatcctgctgggattcatatcagtggccccagggggttgagatgcttcaaagctactgtttaaatggcaaaaccaagtatcttacttggataatactaaagtatgtcctttatggctttattggaatctgaattgtaaacatttggtacagtggattaaagttctgctttaaaattaatttctgagtatgtgagatatgccttttctttgtgacttttgcagtgcagtgaattcaggctgtttttaaaaggtcaagtttttaaaaggcaggggcattagtgctagggctgcttgaagatgaacagctaatggagaaatcctacagtgaaaggggttgtttttttttttgttttttgtttgtgttttgaggtgtcattctattgagtgtttatatatatatatatatatatatatatatatgtatatatctccatcctaattgttggcataacattaaaattagtgacacaacacaggtttcttgtataggttttcagaaactagcagtcctcaaaataacagaccaagcaatgtagtttttgctaatggcacttgctgtgactcatgatagtctactgttgatgagcattccaactaaaatagctttcacttcaccattgattaacatggctaccttgctaaaacattttctgaaaccaaaagctagagtgatcattcatagcattgtcttattaaaagactatgtcatactgtatcgtagaaaaagccattctgggtagtaggatttgcttcctggtctattaggttatctgttctcccttctaacttgaggtaatgtctgaaaacagtgccattcaggtattgcttaggtaactaaaccagtgaaaccagtgaaactgcctttatactgttaccaagaacagcagactcccattaaaaaaaaaaaaaaactcttattaccctactcaaattattcatctttaaaaaggcatagggtttttttttaatgtttatcatcttgactttttttttctcttgaaaatttttggattaatttgaagatcatttcaaaatgacccaggatatcacgatctatttttcctcttcctaaattatttctcaaaacagtgtaatttctatgtgtgatgacgtagcagtcactaacaacctcagcgcactttttggttagatattccactccaaatagctaaaatcaactgcttttgggattctaaatgtacttaaagttacagggtctgtatgaaaatgccagacactaattaaattttggtggcccattcatgatacggctcttttatctccggattctgagattgaaaaggtgacttgatcaagctattgaattactgtaataaaacaattactcccttagaattttaatttagaatttgtctacttccaaaaagggtttaaagcagttattactagactggcattaggttatttcaaatgttgcggaacagaggatcttcgtgtatttagcttaacaatacaaaaagaaattttgcaagcataaatattcactcttacaacatggtggcaaggcttttctttgcagaacaatctttgccctcttacctgccagactcttctctcatgctcagtatgtgagacagttaagtaaagggaaaaacactaaaagcaactaaaatgattggcaaacttctcactgtaacctaaactgcttagcatacaaaattatcgtctacccaatagggttttatgtcctttaactgaaaaggacactaaaaataattattgtggacttgagcttttctctttcggcggggcggggggtggggggggagaatcacctctcttacaaagataaaaggcacagaactaacgtctttcatcctttattgtattggtgcgattatgaaatattattatggcttatactttagcaagaaagtaccaggaaggttattattaatcgacaatgaatgccgttgataccttcatgctctttgaagacaggatgctccggctttgaagcgctacatttctacattgctaacctacaggaacctatgttgaggtggtcccaccgaaatacacggctaatagttcatctctttcctccaggaaccttcaggtttttttttgtttgttttttttttgagacggagtctcgctctgtcgcccaggttggagtgcagtggcgcgatggaaccttcgggttttactaagcatccttaccctaattatctaaatctttgagacgtaaattatttgatgtggctaaaaatcctcctgctagaatttaggtccaatcctttaatgttcggatactcaaattctttaacgaaactgatcactgagctaggccgacacaagtccgccaaaatgtccgcagaaacgttaagaaaagctgtcataaggccagcttgaaagacatcataaaaggccttcgctgtcctttgagttaattatctaacacccgaagagagtgccagttctagttagaatccgcgcgtcaggttctccaacagtcagaagggcttgtgtgagggcagggaagattttaaaccccgtttcaggccccctccctaggctgtaggaaaccacccactctgaagcccggcgggggaggagtgctgcagccagctgccgagggagcgctctgcggcgaggccgtttccctgagtcacggagagggcgggaggctgcgcccgtctgcccccgccacgtcctcctgtgaggggctcagtcgaaacaggcagcggtcgcagggaaacgaagcggcacccgtcatgcctcaaggtggcccaaaagcctcttcactcccaggagacgccgcatttccttaaaacgagctctccatttctggcagcaatcagccgacccttccccatcagtatcacgtgcacctggaagtacgtgggtgggacctaaagcgcccacggaagtgacgtcggtcgccccgagtcgcatgatgtggcaaaatgaaaaaaaaaaagtggggggagaaagagaagactggcgaaagtgatgagtctaaaaaagtagtccctccggttcctctgtttccccccatgtggcgtcaggaagcgaggcaccgggcgcactgcgccccgaattcctgcgcccgccgcgcgcggcgctccgtggaggggtacataaggcggagggggtgaggcgactgggcggagttctgtcgccgggatccttccgctgggctcagccgtttccggagtctgcgctgcgcccggttccgccattgcggctctcctggcccctggagcctccgcccccgacccgagctctttcgtctgcctgccagtttcctgcgtccccggagaggatcctgctgagcccagcctcccccctccccttctcctcctctcccttggagagcccgggcagccactgccccgcagccccagtgacaggaggagaccataacccccgacagcgccatggcccagattctgccaattcgttttcaggagcatctccaggtgcggccgggcccgggctggtgagggctgtggagaaggtggtaggaaggatggaagacgctggagtctgggcccgagcagtatcggagctggaggggcgggggggttgtcggtgattggggtaggtggaggagggggcactatcttggaaagcttaaaatattaaatgatgtggggcttggatggaaaggacaggagttggggtgcaaagagctgcaaggaccaggcctggatccaaaggcctctcgatcttgcttcctggatggccagaactgcgcgtacaaactctctccccattttattcatttcattcatttgggtaggggagtgggagggggattctcccttgtttctaccagagcaaggattcttatcccctgggccagtgcggggctgtcaccttccattgctctcctctttccctcatcgtgtctgcacccaggagttgtggggcgggtgggttggggaggagcaaccttttttttccctccctctgcggctctcaactgagaaaggcaccttctccggtggtgggggttgggggtggtggtgaggcggtggcttttctcttgccttccctgaggcagtagggacagaaggtcactgaaagaacggaacgagggtagaatgggagaacgcatttcttagagctatgtcaatctcagagtgtgtgsggtcaaactccctaaggaaactcgcctccccttccccctttttttatttctctggggatgttgtggctcttaacccctctttggttctggaaggtaggaaagagtgatacagaggttatcttttagtcttctcgagtagtagcaggtagttttgaatatcttcttcaggatcgcatggaattgaacagagccctggggacagcacagctgctctgagacctgcagggctatttggtctgtgactggcttccctttagtaagttctagagttcttccccatggttccttatcctggaggcaacatattgttatctggcaacatgccagtggcgggcctaggcaggtgaccattggaaggcttcactgaattaaacctcttcagagcttttgattttcctgtgtcaccaatcctgttttttactgtagcttaaataatttattcctattaatttgctttcttcccaaatatccccttaaagaaacctgcctcagctcagtcgtctgaagggctaattccataatgacagrgaatgcagtggtttgacatgacactgatatcagtgacctattagacactttaccattgaagaccatttttatttacatttccccattggcatagcatacataaaggattcttgttaataaaaggttttaacattcaggctataagtaacataatttcatatttctttgcaagtattaccatgtttgcactagcaaggacttattttcctttaaggcttgaaatgtaaagaataataaatttttacccataaaatgagttaaataatgcactttcctcagtcatytataattttcaaataactcatctgaagtaatggaatataccttggcaataaaaacacttttacagagggttaaaaatgttaaataacaaaatggacatttttttttgatcaatccaagtttagttgctgtggttgcttttgttaaagtggggtggcaaatgaatgtggagagttgaggggtgctgttcttaagtgtgaggggaaaacgsgggcttattttcatattaaactgcatctgaaatatctttctgcagacaaatgtttataaaccacacagagaatcaagtacagctgctctttattttccacggcagatgtgtagctcactactaaatcttgtggtggttggagtaatagcttttcatttcttttaaagaggagacaagaattgttaaatgatcccaaagattcgaacccaaccttgtcacttattaaagacaaatttaatacatgtctgttttgtaactggatcaaagtttctgcagatgcttgaatgaagccattttcttctcaaataatttgaagattttgaatataaagcgatttgcaaattgaaaaattcagtcctctgtgttttggattgctatgtcatgcctaaacttaagcttgcttagctaatatgactgtgctccagttgattaattgtggagcccaaataactacagcctctttcatgataatatatctcctaacttcatatcattatctcctccctttttaaaaattaataagcattttgtttttttgaggagacagggtttttgctggaggtcagtggcaccatcacagctcactgcagccttgacctactgggctcaagccatcctcccacctcagcatcctgagtagctgggactacagccatgagccaccacacctggctaatttttgtattttttgtagagatggagtttcatgttgcccaggctagtctcgaatgcctgggctcaagcaatcctttgccttgrcctcccaaagtgctgggataataggtgtgaaccaccgagcccaactaataaggattattttaattggcatctttggtctttgacctctgagcttctaccagtttgctaagtagcagaaaactttctgaaacacgtaggataaaaactggaaacaagaaatggggaacttaagtgtgagtgtagagttaccttgtgaaactgtaaatgaacttatttttataccctttaactacattgtccaactgaaggatctcttgtcatcaaagcttggacctacagcaaatgaatgtgaatatatraagatttctcttttcctagactgtttagactgatagcagttaataaatgagtgcctatttgagcaagatactgttggaattgaagattctataaaaatcctaggctacatatataaaatattgcctgtgattcttaattttttggtgattttcaattttctggcacattaagtatctttaggccacttgacacattccattgtattcctagattctttgggtcttcaattaaaaatctccctaccctgttctttcccctttgatccatagatgcaggcatggaatgtgttgttgagtcaaatgttaggggttcttgctatagttagttcggattgtgaatagaaagcaatgctaagtactgggatttactacatgcttagttgtactctctggaagaggtagacttcctggaattatgcggcagtctcctgggaatagcttctaagtttaaaatgtatcatattcttcagaattttcttgatggtcagtttacccagcttaaagtgtgtggttaattttagtgaaagtgctttcactctgattaggaaataagacacagaatggtgtgtatgtagaacacaatcattttcatttgagtatttaggaaaattcacatttcaggaaccatggtagttgctcttgaacaattgtttctgaccataattggaatttgtaccttgcttttaaaagattccatttatatcgaatcctcagcttctttgcaaaattgttttttccatacatatgtttatatgttattcaaattatatttaacaaggtgttttccctgtcattgttaccgttgtggctttttctctttgagttattgtccagtagaactttcttcaatgatggaactgtctacyagctacatagggatattgagcacttgaaatgtggctgatgtgactgaaaaactaaatttttgctttaatttctttttaatttaaatgtaaatagccacatgtgacaattgactcctacattggactgcacaattataggccatgctgatgtgttttgtaagtttgaagatttatctcaccactcatgtttatgtatttagaatatttcgttagctaaaattaaaacactcattgttcaaaagttttaactgaatactgtctgtcttggaaagtggtggtgatgaacaatgactagcagcagacttcttgagaccttattatgtgctgtaaatttggctaggtactttcagatcttcactcaatccccccagacacctttctaaaaagtgagactcataaagtagtgggaatgctgtccgaatgggatgtgtacctgagtcttctgacacaaaatatttcaaagaaattggataattgaccttaaaaaaagaagttatacagtatcctagagtgctttttgtctgttggacttaggcccagagaggtgagttctctctacttgtttatagattaacaatgtggtatagtagacagaacagggagggctttaggggttgttgaaacaaatgctgtccaatagaaaaataatatgagccacatactttttttttttttttttkttttttgagacagagtctcactctgtcctctgtcacctagactagtgtgcagtggtgcgatctcggctcacagcaacctccacctgccaggttcaagtgattctcctgcctcagcctcccaagtagctgggattttaggtgtctgccaccatgcctggctaatttttccatttttagtagagatggggttttaccatgttggccaggctggtcttcaactcctgacttcaaatgatctgcccacctcgacctcccaaagtgctgggattataggcatgagctgctgctcctggcctcatataaataattttttaagttttctagcagccatattaaaagtgaaaaaacataaaattaattaattttgggtttttttggtagagacagagtcttgctatattgctcaggctggtctcaaattattgggctcaagtgatctgctcgccttggcctcccaaagtgctgggattacaggcgtgagtcaccatgccatgcccagataaaattaaatttaatatattttatttaacttgggatatgcaaaatattatttcaatatgtaatcagtataaaatttactaatgagataccttacattctttttcatactaaattttctaaatctagtgtgtgtggtttttttttctttttttttgagacaaagtctcactctgtcgccaggctggagtgcaatggtggatctcggctcattgcaacctccgccttccaggttcaagtgattcttctgcctctgcctcccgagtcgctgggactacaggcgcgtgctaccacgcccagctattttttttttatttttattttttggtatttttagtaaagatggggtttcaccatgttggtcaggatggtctcaatctcttgacctcgtgaaatgcctgcctcggcctcccaaagtgttaggattacaggtgtgagccaccgtgcccggctatgtatattttgtacttagagcatatatcaattcagaccctattttctttggaaatcctggtccgtakttagagttcataaaatttacagttagaaaggcagatttggggctgggggtagtggctcatgcctgtaaactcagcactttgtgagccaaggtaggagcattgtttgagcccaggaattcaagaccagcctgggtaacagagttaagacctcgtctctatattaaacaaacaaaaatgaagaaaaaggaaagcagatatgcaatacttcagtgatcccaaacatacttaagttttccagtaattgaatcacttactggttattatttaattttaattactttaaaattacggtaaccacatttcaagtgctcattatggtatgtaggttgtgacttgtggttaccatattggacaacacaggttaagtctaacctcttgcttttttttctctgggaaatgggcatacttatctcacaaagttattatgaggatctgagatcatgtatgtgaaagtactttacgtagcattttaggagcattaattattggctaaataatttttgtccagtacattttattcaggtatctcaaccaatgacacaatattcatttacagatccagtgttttatggtgtataagtatttggggttaacacatttacctaagatttgagtacttactgcagatgaggaactgtgttagactctagggacaaggtggtaaacaagatggactacaccttgcattcatgcttccattgatgagttggcaaaggctgtacacttgttattccaaccattgatgttgtctacttgattgtggatcttttatgtgttcgaacatttgatattgtgcacagtttaatacaaatattgatatgatacaaagttgattacactctgaaactgccccccaaaaagaaacttttaaataaatcttttattatgttccacgagtctcattgtgtgccactggtacattttaaattagggttccttgaacagacatatttgaaaaaaaaacttaatgaatcatatcggataaaatacccatatggaatgccggtcaggcgattgttagagttattgtatgtgttgtatgtgtccttttttagggtggtagtgttgaagtgaatcttctcacttagatgagcagtaggttcatggctgatattttagtcctgtatattagaatgaggctgtttctctaagttcatgcactatatgccatgccaaaactacttcatgaaataaacctgtcttctgagccacagcaaagtttacagctctgggtgtcttgtctttgcttcttggttaagtgcctatggctaatgctcttaactcaaaagatggctgaaagcttggacctaaatgtgttatgcaaaacccatctgtcagacttttgtgagtctcttcttttgtattatctccttaaattaagacataatttaagatatttttgtcctactttttttggggggtggggacagggtctcactctgttgcccaggctggagtgcagtggcatgatcaaggctcactgcagccttgacctccctgggcttaggtaatcctcccacctctgctccctaaatagctgggactacaggcgtgcgccaccaaacccggctaatttttgtattttttttgtagagtcggggttttgccatgtttcccaggatggtctcaaaatcccgggctcaagcagtccacctgccacagcctcccaaagtgctgaaattacaagtgtgagacaccaagccttgtcctatttttgaggcagtaactattcaaatcttaattgtcctgtaatctaatccataaaatcaaaatacatgggccattatagttgtttgagcacctattacgtgccaagaactgtattaaatatttaatgtttattatctcatttaattagcaagagaacccttgtgcttaggtcagattagccttattgtagagattgggcaactgaagttcatagtaggtaacttttagagtcacacagctagtgagcagttagacttttaatatttattctttcatttggctcattgcctcatttggtaaatggtctgtatcatttgaattgcaaaatgtaccacaattgtttatatctatgctgtgatgttctttgattctagtagtactgtcgtttgtttatcgtgaaatattttttatattatgagaaaagtaggagacagcaaactaacatctgactttatgccttgaatgattatttagctgtatcttttttaaggactttatcctgtttcctattggaaaattgtgcaggatgattgggatccggttaacttgtaaccaggattgtctgcatccctctcataagactgaacttgtcacacttttctatagactttttcttactgaaaagaatgagtgtgttccagtctgaagccacttgtgaaaggaggaaacttctgctttctattttactgtaaattcatgtttttgtgtttatgccaagaaatagaagcttgaactcaacgaaggcagttgtgcatgaaagggataggaaatgaaggtgacaatggaatatatttgctcattttgagtagcatcatggtagaaaggaaaatggttacagacttgtagggttgtgctttggaggcagactgccagtactgttaatacttcttgttcctaatccttaggtaaataaggattttcttcaagttctgaagtaagacggttttaaagattattgctgaaagaataggaaccagatccattaaagccatattttgtcacattaaaaaactctgcagtgtgctattctggaaaatgtctcagatgtttaatctgggcttatctattgattatgtcaggttttcaacttgtctcaacttcctcatttattaaaacaatatttcctggcaattttaaagttagactacagtatgtttttgtatttgtagtataatatttagccccttaaccccttacaggcactcgaatattagttcttcccctccaccctggaagagtttccctttgtccacttgagttgaatatatgtgccgtactaaaggagaaaaactaccatctacccagttattgaagccaagatcttgaagttacaccagactctctaatttctcattttctgcatccgtcgatttctggagttcctcagtgatgcacactgggggtctcagggatgacagtttttcatgaccctaggttgaaactgggagtcatagaagacgaaaaaacgagaattggattgggagttgactctgttgcccaggctggagtacggtggtgcaatcttggttcactgcaacttccgcctcccaggttcaagcaattctcctgcctcagcctcctgagtagctgggactacaggggcccgccaccaggcctggcgaattttttttgtatttttagtagagatggggtttcaccatgttggccaggctggtctcaaactcctgacctcaaataatctaccctcctcagcttcccaaagtgctgggattacaggcgtgagccatcgtgcctggccaacttgcatttatttctgattagctgctcatctgagaaaggtggcttaaaaaaaaccaccaaagtggacagactgaagctaaagactgtcagtatatatgctctgcttggcaaacagctgactttggatagatctcattatttaaagatgaataataagggggaaaaacgtgtagagagaacatggtttacaaaaacccatctctttctccagtctctgcaatattctatatttggtcatattgaactatgaaaatctaaggcaggtttctttattttaccacagatatcctcaggaaagagtctccttattaaaagccttactgaatctccatagtattgtgtcctctcacagttgcttctgttctgagcaccagaatgctgtttggcaaaggctgctgtaggcttgaaatcaactggattagtgagagacaaattttacacatctaaaattctcctgtgtatggcctcacagttggaactgttggatgttataagcagatgatttaaatatcccgtgaaaagcagtccattcgggcatgtttctagagatcataattttttttttttttttttttgagatggagtcttgctctgtcgcccaggctggagtacagtggcatgatcttggctcactgcaacttctgcctcccgggttcaagcggttcttctgcctaagcctcccaagtagctgggattacaggtgcccgccaccatgcctggctgatttttgtaattttagtacagatgggatttcaccatgttgtccaggttggtgttgaactcctgaccttgtgatccgcctgctttggcctcccaaagtgctgggattacaggcatgagccaccacacccagcctagagatcataatttacatagaaagataagagaaaaacaactctcctgataacgcaaatagatttgatgttacaaaactgcaccattatgattgctctgtaatggatttttgaaaagcattgtgaaatggagatgactttccagtgctgatgtcaaaaatgcatatgcagagtttaaatataattttgtgtgttttgttttttgagacagggtcttgctctgtctcaagtggagtacagtggcgagatcatggcttaccacagcctcaacttctcaggctccagccatcctctcacctcagcctcccaagtagctaggactacaggcgtgtgccaccacacccagccaatttttgtatttttttgtagaaatgggctttggccatgttgcccaggctggcctcgaactcctgagcccaagcaatctgcctgcctcggcctcccaaagtgctgggattacaggcaggagccactgtgcctggcctaattttataattttaaatgtctgtaaagtaagcaaaatgactagttgaattgtacattaaatatatctaatccctaagagtttataatgraaagggatcaaaactttttcaattgcgataaaactcacataacaaaattaaccattttaaagtgaacaatttagtggtatttagtgcattcacagtgtcgtgcagccaacacctgtatctagttccaagacattttcatctccccaaaaggagaccccatacacgtgaagcagtccctctcccatccccctcctcccatccgctagcaactgctaatttgctttttgtctctatggatttacctgttctggatatttcacataaatggaattatacaataaaggaccgtttgtttctaacttctttcactaagcatccatgttatagcatatatcagacttcattcctttatgactgaataatactttgctgaatggatatatcagtgttttatttgtcctttcatcagttggtggacatttgggttctttctaccttttggctattgtgactagtggtgttgcaaacattcatgtacaagtttttgtttgaatgcctgttgtcagttcttctagatatatacttagaagtggaattgctgggtcatatggtaatttctctgtttcaactttttgagagaccacgaaaccgttttccacagtggtggcaccatttgacatgcccactagaaatatatgagagttccattttcttcacatcttctgacagctttttggggtgttgggatgattcgtctaattgggaaaataagtaccttatttgggcctatatggtatttttaattctgtgtgtctgctcccaaactctgtagccctgccctcccttatattgtgtatcctgtttcagattgtttccgtttcttctgagacactgcatatacccctacatgtatctgtgctaggcatacatccctgtaacttcatggcatttttgtaattgctgtgtacctgttacgtatactgagtgggagtgtctcatttgctgtagaactctctgcattagtgtagtgtctggcacacagtagctgctcaggcattttttaagtatatgattattgggaaaactacagagctagggagagatctgaagaaatactagaaatttttttctgcaaagaaaactttagaaaattgttgacatcatctgtggcatgcagcaaaagttgatgtaaaaggaacagaaagacctatggagataatgggatgtaataacagaaaacatacakaaacaattggttctgaaatcagttaagagcagaactggaattcatactctgtggaatgaatcagcaatgtggaaggagtaacaagattttttaaaaagattttgaatttaggctgggtgcagtggctcacgcctgtaaccccatcactttgggaggccagaataggtggattgcttcaacccaggcattcgagactagcctggacagcatggcaaaaccctatctctacaaaaaataaaaaattagccaggtgtggtggcatgcgcctgtagtcccatctacttgggaggctgaggtggatggatcacctgagcctgggaagtggaggttgcagtaggctgaagtcatgccactgcactcaaacctggcggacagagtgagaccctatctcaaaaaaaaaaaaaaaagattttagtttagaagtaaatcccagaattaagtaaaagtggtgtgtgtgtgtttgtgtgtgtgacagaataggttacaaatttaagaattttagaaaccgggctgggtgtggtggctcacgcctgtaatcccagcactttgggagggtgaggcgggcggatcacgaggtcaggagatcgagaccatcctggctaacacggtgaaaccccgtctctactaaaaatacaaaaaattagctgggcgcggtggcgggtgcctgtagtcccagctactcgggaggctgaggcagcagaatggcgtgaacccaggaggcggagcttgcagtgagccaagatagctccactgcactccagcctgggcgaaagagcaagaatccatctcaaaaaaaaaaaaaaaagatttttagaaaccaaaataattggaatggaagctcttttcaatgaaagaaaacttttgtaatttgaaaraaccaaaattaaaagggcttagtgtttggaacaggcctgaagaagttgtaataccatgaatttaaaaaaacaaaacaaactcgggaggccaaggcacaagaattgcttgaacccaggagccggaggttgcagtgagccgagattgcgccactgcatgccagcctatgcgacagagcgagactctgtctcaaaaacaaacaaaaaaatccctaaaactataagcatctagggcacatcctcttcctgaccaaaaaaatcaaagtaatactagttttttaaccctgaattttagatagtgaagcagtgtctatagtttttgagatggaaagtgtcttcacttgtttttagaagacatgaatcacaatttgaacccccaaagagcctctgagagcctaaaacctgttttttctcctataggttgtttcctcactagtaatgacaaagttataatcttagcacaaaataagcaaaggggacagtttcacacaaaaattgtacttaaaatattgagtttgtgttaagttgctaaataatggatgctcaatatgtattaattgaaagcaaatcatggtggttgtcattttaatcattttaatgtcattttaatcattttaatgtcattttgaactccctgaatttgttaatattaaatcattttgagataatctgtaactcctcatgctgattgttagttaattcattcactcatttgaaaacagtatttgtggcatttaagctcacaggaaaacactccaggctgggtgcagtggctcactcctgtaatcccaatactttgggaggccaaggtgggtggatcacttgagatcaggagtttgagaccagcctggccaacatggtgaaaccccgtctctactgaaaaaatacaaaaattagctgggcgtggtggtgcatgcctgtagtcccagctactcaggaggttgaggcaggagaatggcttgaacccgggaggcagaggttgtggtgagctgagatcatgccattgcactccagcctgggcgacagagcgagactccatctcaaaaaaagaaaaaaaaatactctagtgactcaattgtaaaataaaatggttctagtcttataacttgtagcacctggtagactgagtatgccttaaatgattgatctaactagaataatgtgggatagagcataatgtctaatttcctggcaggtccctcagtatagggtagaaagataacatgaatatgtacaatagtgatggggttgacagaatgtaacactaggctcccacttaaatgtacattttgtgaagtcgctgggaagttgtgtcatagaatgaagtttatcaaggatctttataacttgaatattaaggagactgtccagatgttttattcatatcaggaaaccaagcctttaatgtctccctggttacattcatttataacatcctttatgctaagtcagcaataagtattatatatattttttgagatggggtcttgctctgtcacccaggctgaagtgcaggggtgcagtcacagcttgttgcagcctctgcctcctggactcaaacaatcttcccacctcagcctgccaactagctagaactacaggtgcacaccaccacgcctggacagtttttttattttttgtagggacagggtctcgccatgttgcccaggctggtcttgaacacctgggctcgagaggtcctcccaccttggcctgcaaaagtgctgggattacaggcatgagccactatgcctggccttgaaccctcaaagtaagcccatttggtaggtttggatatattctgcacaacttctcacccctgccattgaatgtagctgtggttgttttgtgctgctgaattgcatttatacggggggcataatcttggtaagtcatatccatctccaagatttggggcataaaaactcctgtatttccctgcagcttggttaacattggcctaattgatctgatatcatctaattattggcttattttttaagaatgcattaaatataaagtttttgaaaatttccaatcagcagttgattacaagtaggaaaaattctttgagtctcctggtagtttaccaaagctaataatagtctgacaacctctctccaactgtggttgcttcctgaatatattgcttaaatttggagtttgtgaccagaatcaaaaattctaagagccagtgattctctcaaaggctaacatggagtagaaaaaaactatatgtttaaatgtggggacagcaagggttaaaggcatttttatttgttgcttgaaatctgtggagcctacagaaaacagtggttggtatcctgttgatggaagaactaaaggaatgctgcattctcagcatttcttatttcctgtagaatacagcaactgcagtttttatttgacattctgctagtttccaggaagggctcaatgaagtgactgctgtcagcatcttttttcaccgcgactgatactagagaaggtagaggatgtttaggagcttttaaaggaaattatgtttagtgaaatacttgggttaggaagttaaccaaatctttaagtactgacttaaaaatgcttgtattgagagatgaatggtatcagaatgacatacaagtatcagcaggtctctcagattgttgacctattaactctacagtggtaacacttctaaagtccttggtaagatacaagattcatttgcagaaaatagctccatctgaaaaacagtagctcatacatacttcctttacattttccctattcagatgaaacaaggaggatctggaaaatgtgaagccaagcaataattgtgaaacataagtccttagtaatgctgtcataaaccagttttcatgtagtttgattttcagctgataaagctggtaaatgagttatactacaaatctatgattcattaggaagcaaactccttaggtatacttacagagaagccaatttccaatgagtttattcttaactaatcagatgtgagaactgctggttgaaattagtaggctcaaagcaaacctattactcctttaattatgtggcgtctgtaggcacaaacagatagattatgaatgattgctgagagtgtgccttggtgctaatggagagttgtctttagatagtttaagaattgggccttgaaaaaattatggttttatttggttgtatgtcttaagctagcattttctgcccttcttaaggtatatagtattgaattaaatatattaataggaccatggcctctttggtcctcttaacaatattttcatagtttgatcactaatatattctgttaagatgctcatacaacaccattaagtttcctgattccttgatgtatcagggtttccccattctgtctttaggagcatgtgaacaaagcgaattggcccaggtaaggtttgagtatataacagtagcatgatgctaaaaccagtctgtttaagaacagtctatatcggccaggcgtggtggctcatgcctgtaatcccagcactttgggaggccgaggcaggcagacacctgaggtcgggagttcgagaccagcctgagctactccggaggctgaggcaggagaatggcttgaacccgggaggtggaggttgctgtgagccgagatcgtgccattgcactccagcctgggcaacaagagcgaaactacgtctcaaaaaaaaaaaaaacagtctatatcataataccatagtcccagaactagaagttcatcaaataatggagtgctctgtgctcccacactaagtgcttgatgtgtgttaaatcaccttaacctttcatggagcacctaggcatgctgctttgctccctctcaagtaaggatggatactttttttccctttccattttccatatttacaatcaaatggagtatatttttaaaaccaagacaggaaaaacaaagtttaaaccattaaaaactgatgagcattcaacgtagatttctgagtctcattgctgatgtgttttttatttttattttttatttttttggagacagagtcttgctctgacgcccaggctggagtgcggtggcgcgatctcagctcactgcaacctctgcttcccttgttgcccaggctggtcttgaaccgaactcctggcctcaagctatcctcccatctcaacctccaaagcactgggattacaggtgtgaaccaccatacccagtcttgtatttgcttgtatttgtttcttttgcttaaacattttaaataaagtcaggctatcatattttacctgtaaacacttcagcttgcatctttagaaaataaggacattttctttctttttctttttgagatggagtttcactcttgttgcccaggctggagtgcaatggcacgatcttggctcactgcagcctctgcctcccgggttcaagcgattctcctgcctcagtctcccgagtagctgggattacaggtgcccaccaccatgcccggctaattctttttttttttttttttttttgtatttttagtagagayggggttttgccatgttggccaggctggtcttgaactcttgacctcaggtaatccacccaccttagcctcccaaagtgctggaattacaggaatgagccaccgtacctggccaggacattttcttataatcataatattatttatagctccctgatatttaagaacaatatcagaaaaccagtccatattcatattttcctcattgtccctaaatgttgtttggtttaaatcagaatccaagaaagctcatactgctttcagttatgtctctgaagtttcttttcttttttttgagacggagtcttgctctgtcgcccaggctggagtgcaagtggcacaatctcggctcactgcaagctccgcctcctgggttcacgccattctcctgcctcagcctcccgagtagctgggactacaggcgcccgtcaccacacctggctaattttttgtatttttagtagagacggggtttcactgtgttagccaggatagtctcaatctcctgacctcatgatccgcccgcctcggnnnnnnnnnnnnnnnnnnnncaccgtgcccagcctgaagttttttaaaaaaaaaaaaaaaattttttttttagccgggtacagtgactcatgcctgtaatcccagcactttgggaggctgaggtgggaggatcccttaagcccaggagttggagaccagactgggaaacaaagtgctgcctatctctacaaaaaaaaaaaaaaaaaattagctgggcatggtggcgtatgggtggtaccatctatttggaaggctaatctattatcagtagttaaaagaaattcacacccagagtttcagccaacctatggacagctgaattaagcagcccaggaggttgaagctgcagtgacccatgattgtgccactgaattccaccctgggccacasagcaagaccctgtatgagaaaaaaaagaattggaagtcctaaagtgtaatttccttttctcctcacttccccaacaaaaacaaacttwaaaaaaaaaaaggcatttcatagtgtctgaggcagttaagcacccagagaccactaatctagtatcagtagttgaaagaaattcacacccagagtttcagccaacctatggacagctgaattaagcagataataaaatgcaaatgcaaaaaagctaaccttgagctggcttaaagtactgatatgttgtatgtattaatagttaatatcagtgagctctgggttgcttgatcccaggagtttaaggatacagtgagctgtgatcacatcactgcactccagcttgggtgacagagcaagaccctatctcttgcactccagcttgggtgacagagcaagaccctgtctcttaaaaaaaaacagaaggcaatatctgttgagctgttagatgtcaggcattgttctttgcattcacattaaatcttcacacctctgagatagatactgtcatctcaaatgtttcatatgagaaaacataaacacagcctgtgttctctagatcagtggtccacaacctttttggcaccagggaccagttttgtggaagaaaatttttccacyggttgggggtgggagtgggggtgggatggtctcagatgaaattgtttcacctcagatcacaaggcattcgttagattctcataaggagtgagcaacctagatccctcgcttgcacagttcacaatagggttcgcgtgcctatgagaatctaatgccgtggctgaaatgacaggaggtagagctcaggcggtgatgactgctcattggctgctcaccttcttctgtgtggcccagttgctaayggaatactggtctgcggcctgtggttcgggatccctgctctagattatggggaagccgaagtactattttctcattataaaaacagaatcctaccttttactccccacctccccctgttaatagaagttggaatggagaaggaaggagatgcattttaaaatcatttgtaacatgtaactccagggtacttcagagttttaaagaataaatagggaataaatttgtttaattgcctttttagatccaggtttaggtgtcaagtcctaaagtagtgccacttgcagaccaaaatcgaatctggaaaccaaatgagttacaaagtttgggtgcttttctgtaaaaacaaggaagcagtttatttgtatacttttgtgtcttgtgccattctgttggaaaagggcggaggaaatacatactttcatatgctacaggataactctgaaatgcaaaagtatctctaattgcttaggggagaagggtattactggaaagacggggtgggtgacttttcatagtataaccttttgtaagattttagtgctttactgtatgcacrtgataactattcaaaaaaacaagcccctttttttggacccagtttattgactccatattcttataacagcaaaataaaaattcttttaagttaaaaaaaactttatcataggaatttccaagcatatgttaaaataggatatctccagcttcaacactaatggcattttgcagattgagaggataataaaatgtagctgtagtttggatacatgtatccagatatattacatgtatttcagatatgtcctctgaaaatacctgcaagtttatagagaatgttgtatatgtcctttgactttatccatgcttagttccatagtgtataattcagtttatggctgggtacagtggttcatacctgtaatcccaacactgggaggtcgagctgggaggattacttgagcccaggagttcgagaccagcctgggtaacatagggagaacctgtctcttaaaaaaaaaaaaaaattagccaggcatggtggcgcctgtagtctcaggtactgaggaggctgaggtaggaagatcacttgagcctgggaggtcgaggctgcagtggtaccactgcactccagcctgggcaacagggcaagaccctgtctcaataaataaagaataaaaatacaattcagtttctgtggtatagcttatatgccatcacacctttataactgactgagaatactttatggttactatgtgctgttttgaaaataaaacctgtttaaaaatatgttgcattttaaaagttttaatctatattgatattactagacatagttatatagtttggccaccctgttacatgctcctactgtaagggtatacctaaaccagacttgcagttaataagagtgacttgtcctattattgtgtgctttggcatatttctcttttgagtatataacaggaaaatatgggaagaattgctgagtgttctagacattctcactcaaaaggaacatcagtaaggaaaacaatcttacctaccttatttgaagaggtggaagcaaatttaaccttctsttagccaatacggtcacttgaagttcttttttttttttttgccaaagtcttgctctgtcactcaggctggagtgcagtagggcggtcttggctcactgcaacctccgcctcccgggtacaagcgattctcctgcctcagcctctggagtagctgggactacaggcgtgtgccatcatgggcccggctaatattttgtatttttagtagaaacggggtttcactgtgttagccaggatgatctcgatctcctgacctcgtgatccacgcccccttggcctcccaaagtgctgggattacaggcatgagccaccacgcccagccgaagttcctgtctttttttcctcacaattaggaaggctatataggaaggagcagggtcctgttcagttgtgtaaatgaccaccacttaagtgtgcttttttaatatgtttaaacatgtgccattattaagaatttgacacggctggacgccgtggctcatgcctgtattcccagcactttgggaggccaaggcggacggaacatgaggtcaagagatcgagaccattctggccaacgtggtcaaaccccatctgtactaaaaatacaaaaattagctggacgtggtggtgcacgcctgtagtcccagctacttgggaggctgaggcaggagaattgcttgaactggggaggtagaggttgcagtaagccgagatcatgccactgcattccagcctggtgacagagcgagactcggtttcaaaaaaaaaaacaaaaaacttgcaacttcagaattatgttcatgtttgctggtgttttaactcaaactgggacataaatcctagggaagtaacccatatcactgttgttctaataactgcattcgtagtagaataacactacattcactagtagaggctgagggagagaggaaaagaaggaattacaggttacaggctacttttctgttcttgtctagactgaggctgactgacttgtctagactgaggctgaggcaggtggaccatgaggtcaggagatcgagaccatcctggccaacatggtgaaactccatttctactaaaatacaaaaaattagccgggcatgttggcgcactcctgtagtcccagctactcgggaggctgaggcaggagaatcacttgaacctaggaggcagaggttgtagtgagctgagatcgagccactgtactccagcctggctggcgacagagcaagactccatctcaaaaaaaaaaaaaaaaaaaaaaaagagtttgtcacttgcctcctgtttaattttgcattttttaaataaagtatatctattccacatggactattttgattagtaccaatacattcctgaaggagatcaaagatatatatgcatagctctcttggtagcatatgtttaatgagaaagtaatataaggattacatagattagggttgcaggcagttctgtcactttaaagccagatcttttatttaccttattttttaaagtttttgcagagatggggtctcattatgttgcccaggctggtatcaaactcctgggctcaagtgatcctctcatctcagcctcccaaagtgctgggattataggtgtgaaccaaggtgccaggccaaatctttgttgtttttkttttttttttttttttttacaagtaaaataccctgaggctgaaggtcattgctaactgatgcagcgtgtttttcttactgctttttttctggggatctaacaaggaattggaaacacaggtttttgactttcctttttcctcctcattgttttctgatagtgttttcttaaagtcatcttccacctgcctctgaagttgagaagtaggaaggaatctgttagaatcacttggggttcagttagtagtgtctgtggtttgcttccttttgtggttttgaatttaatttcactatttgactaacactatttttactccgacttcctcaaacactgtgggacttaagctgtgacaggtgaaactcagtgccttagatgaaggcttggtagagacttagaaacatagaattcttacagggtagcttaggattcttacaksataacttactgcttttaggtatatagctctatgaactttatgagcccactggaatgttttctccaattatcggaaaggmtaattatcaattaaacttaaggagtctaaggaccctctactcagaaaaatagatgtgagatcctgtctcaaaagaaaagttaaagtcaggaagaagttaaaattaatggtttataaggctttactataactaaatacattataagttacatactttaaagctagtgtatttgccttgcattacagcatatacttgagcttgtaaagcaggttaatctactttattacgatgtttgtattaatggttagagagttgtttgacttcttgcccctatattcagtgactgagttactgtaactacactttataactgagttataacattaataacttaataccagtagtaattgagatagaagagtgaagagaaagtaaaatgtagccttgtagtcttatgttatatcttattcagagcctggcctggttatgtttaagcactattagcagaagagtttcagaagagaatttaaataaaatacagttaacttggctggtttagtccataagataatagtgacagtggtggtgtttgtggaggaaaactgtattgctagaggacaagggtgacagaaagacttgatttttttttttccatgctttttcttttctggggkgtgtgtgtgtgtgtgtgtgtgtgtgtgtgtgtgtattttgtaccatgcgaatttattatattacctttggaggaaagggggataaaactagtctggccaaggctaataaaataaagcctccatgtagcttcttttagtaggacttaatctgttacaacatagttagtcacccagagtattaataacccactatggtagagatttcttcctagtaacaagtgacttttgttcttacatacttaattggtttgcaaagacctaccatctttagatccactatatttgtttagcagatactttagtattttctgagtacacaaagcaaatctaattccattattttccttgttaaaatccttaagtagctcccttcgcctgtagaataaactcaggattcttactgaggtatgtttagcttgttggtctggcccttgctcatttctctaaccttaattgtgtactccctcaatcctatagtgttacaaaagtacttgtagttcccttagccaaccacacttttacgtctctgtgctttaccacatgctctttctgttgagaattctctcgcctgcctcctttgaacacattgctttagctgtgtagcctttgacaagatccctcttacatatctttgttttggcactttttgcacagaattagaacttgtttgctcttgctattcaagttcctttatttagatcaagaattctgtgacattttagatctttttatgcttgtaacttaatttttcagcttcttgaagcgtgaacaaataactgctacatgttaaggggggtgagagaggactggtccaatagttccaaggtcttaaaataaatcaagaaactcaattacctcaaatcccttgaaccatgcatgctaccttgcagatgttgctctttcctttaacttcatctgtatttgttctgcctcttatttgaaacagttgaatggcatgtttgtttgaagaagagaaggtccaatacttggctattaatagtctctctttaattaacataatgtagatgttattgtgaccttgaagcattaatgttaagtgaggatttgtgttgatgagcatatatgaatgtcaagtctttggaatccacttggtaacatggtttcttattattttttctagctccagaacctgggtatcaacccagcaaacattggcttcagtaccctgactatggagtctgacaaattcatctgcattagagaaaaagtaggagagcaggcccaggtggtaatcattgatatgaatgacccaagtaatccaattcgaagaccaatttcagcagacagcgccatcatgaatccagctagcaaagtaattgcactgaaaggtataaaagaatgtgggttttccttaaaactcttcctatgtttttgtttttttttgttttttttttgtttgtttgtttgtttttgagacggagttttactcttgtcacccaggctggagtgcaatggcacgatcttggctyactgcaatctccaccccccaggttcaagcgattctcttgcctcagcctcccgagttgctggaattacaggtgcctgccaccacaaccagctagtttttttgtatttttagtagagatggggtttcactatgttggccaggctggtctcgaactcctaacctcatgatccgcctgcctcggcctcccagagtgctgagattacaggcgtgagccaccacgcccagccagctcttcctatgtatttatgcaagtacaataactagggtttacctttttaagtatattgattaagtttggttaaagaaaatagatctgctaataccgaacttgatttaaaccactttaattacttttacttggaatgtatctgtggaatgtcttaacatatatctacttagaataattttaagttttagaataaatgcatttaaattttgtatctggtataaaactgtgctaaacatatctctctacagaggaaagaaattagtgattcatattctggaatagaacatactttactaatattagcacctaaacattgcagaattttgttatgatgataaacttgcctttgattctgtgcttttttttttatacttcgggcttgtgtttcacttagattattgggttctagaaatggcttgaatttacagtaattgtttaaagtgtgtttgtatttaggtggatattaaagctcttgagtgaagggtatttgagtttattcagactaactttttaattgtcccaacaagggaactgtgcagcttaagtctaaacagagttcaaagactcttagactgtcacggaagctgtattcctttgaactttagaatgagactaattgaccctttaaaacagatgtttttaagagggctcggtgacaaactgactcttaaaaaggcattcgattgcctgctttgtttttcattttgatagaagaaagaagagttcaagttcgcagtaatttgttgataaatttgtgactaagttattagaggtgctgaactttgacttttctttacatgatttaaactttgtatatagtaataatactagttggagagtgaatagggttgggtaggactaggatattcaaacaaataagtcactatcacatatctaagatagaaactcatctcatctcgaggaaaaatggtccagctttcacataggaccagatgttttgtgacagtaagtgttttacttctattacttctatttagggtattaagcttccttcagactctttaaagaatttaaattcaggtccttagcaattcccatgcctctctattaaaaggccatcattttaattttgccaaaattcttttctatttttaatgttattgttatcttatcacatttcttaatgctttcttatgtgtgcagatggtgagttatcttaaattagattgtattagttattgtcctgttctataaaaagaataaattgaaaagattttcggagcattgtacaataacatcatagatttgtccctatatgtctgcactatggagtcaagctgtcatcccttgtccccctccccaagaccaccccacttatgtatatattccaacccctaataatctgggagttgaggaaggcagcaaaggaaagtaagtcattccaaaatactgcttccctctgaagccagttttgaaccccttggcttctttttataaacaggactgtaactctcacaatttttcaagtctggttgtggtttacatactgtgtgggatgggaataacattcttcattttatgaaagaaatttttgcacatgtgttacggagggttgtagtacaaagctgtatgttttgccccccttctttgtccccccagcacccgaatcttaaaattttggtccttcaggagccagattctctgtgtctcaggaatggtgtttttcttagtctttaaagactaatcttgatagcctagtgatagttgtaggctttggcctctattaatttataccaaatcacattttgaactgatggatttcaaactacaagtacaagcctttgcatctgactcagtggactcttaacactcaaggcaaatttcatccttttttaactaaatgcttgctttcttaattggatgaagcttgcactttgttcttatctccagtatattaacagcatctgaaactatcctcttcctttgtctccctctcctttcctccagcacctctaccttccctttgttatcttaagccggttaaatgtagcaggcacttctcttacgtgctagtggcaacaagacagaattgaagcagatcctctttttaaaaagcagtttccacaagatttatttagatgagagatgactgcctttaaaaaaatacattttctttcccccatgtgtttgttatcagagttgctttgtcttgtgtacatgcaactaagtttatgtgtaaagtaaacatacttaattacaagtatgaaggtgacagctttgttttcaattattgttaagaaaactattcattaggcttattttcagttgggatttagaattccatggaagtcatactatctgtttaargtgtgtttattagaggtaatgtagtttttgcttaaaacgtagatgtagattgtttgcttagtcttagctgttacctctttaatggttgctgctgtatcgatgcaactcgtctcgtaatagaactatttttgtttggaagtgacagagctagtctaggtaggtattcattctaaactttactcttttaatgatttataattcttgattttgtttttagctgggaaaactcttcagatttttaacattgaaatgaaaagtaaaatgaaggctcataccatgactgatgatgtcaccttttggaaatggatctctttgaatacggttgctcttgttacggataatgcagtttatcactggagtatggaaggagagtctcagccagtgaaaatgtttgatcgccattctagccttgcagggtgccagattatcaattaccgtacagatgcaaaacaaaagtggttacttctgactggtatatctgcacaggtaacattttaactakttttttatgaagaagaggtttagaacacggttgtgcccagaatgcagtttgattttgaaattaggtctttctatactcaatcctgttgaatttcacttattttggaagactttttttttccttcctcccatcccttctcttctccttcctccctcccttctcttcttcctcgctcccttgctatactgacatataatttcagaatgctcttaccaagcgtttttagctcttctgtggagattgagtagaaattgagtttctgtaagaatgatttgggatttattatggagtatttactgcagaatgaatgcttctatacctttttgtttaagacgtatatgaggcatattttaaacatttatgttaggctttaacaagataatgtttggggctgattttaagttaagaagtatcaaatctacagtgagagatgaagtracaaataattataaatcctgctaaagatgacaaagcattctaattatttcattacttgatgaatctgagagtttttgatttatgggtcttcaaacgttattctctttgatcctttatagcaaaatcgtgtggtgggagctatgcagctatattctgtagataggaaagtgtctcagcccattgaaggacatgcagctagctttgcacagtttaagatggaaggaaatgcagaagaatcaacgttattttgttttgcagttcggggccaagctggagggaaggtaagttttggctttggtaattattttaatgagaacttgtatttggctttctgctatgaattagtcatctaatttcaaaatagccttctcccttcctaagtaattttagtattcacatttgtggtgacttaatttgttcaaattttgcatctagtgatacttgtctaaaatgaataatgttctttcacaactcgttctgttggctgtttatattctttgattgctaaagtgcacatttatatgctgtacatctagagagtttgatttagtaggtgttgcctataattttttttgtttatttgttgctttttgagacagggtgtcactctgttgcccaggctggagtgcagtggcgcagtcatgggctcactgcagcctcgaccttctgggctcaagtgatccctctgtctcagcctcccgagtagctgggactacaggcatgtgccaccatgcctggctaaattttgtatttttgtagagacagggtctcactatactgcccaggctggtctcaaacctctgggtccaagtgatcctcccgccttggtctcccaatataatctgcattttaaataccttatatggcttgatatagaggcaatgtagactacaggtgaataacactgacttaagttagaggttttcaaccatgactacacattggaatcgcctggacagattgtagtactttgtatattagacttagttgcaggtaatagaaacaaggtctggttgattagagcaatggtctgtttagtgaaggatattggatagtttacaacagctggggaggctgtaaaaccaagactgggaaatgaggagaaataatggaaaatgagcagtggtcagggtcccagccaacaactattccacagaactctgaggacacttctggatccatgattgcatttctggatgcttggaaattygatttgactactatttccactaccagagtagcatctctgaaatcctaatacttttgtgttcctagctccctgttcaaagtctagttttaggcaagatcagatgcccacatcttatgtctgagaggtttggaaataattatttggtgtttggtgctcctaaaacagaaggctggttctaccaccaacaaaacttgtaaagagtatcttccctcttgttgtcccatcaggaagagggtttagattctaggcagaccaaaaaatttgaacttcacttttgttaggacatgtgtctctctctttgtaagtaagcagtttttaaaaattgagatagagattgcttaagatatcatctgtagcctgtcaggagagaggaaacagtaagtaatgacatacaattctgcttaaaatttcacgatagcccctgaattgaggataatgctaccaacacctcaatgtgacagtggtagaaagcactgatatttagatctgaatagatgaaatttaaacagaaaaaaacacatagttttagaaattagatattatccttaaaacataaggccaggacatttattgaaaagttctactagaaaaaagtttcaatgtcattttgaacagtatctggaaacctgtttataggttattgagcctattatttcatacatggtgctatcctgtctgccatggcttttgaaggaagataccaagtttttcagtatggctagtcatcctaatgaaggatgatgagaccctataacattcatatggtatgtgtcttggaaactgaatttttttttgtctgagttcatttctggcatgactaaggaaaatatatagtactttttcattgagattatttacttttctcttgcctggcttatgtgcagcattggatattttaaaccaaaatgttctcatttagtttatgggatgtttgtgattagagagrcaactcaaattaggtatatacattcattctgttttagtgtatatgtataggtagagaagaatttaacaacttaggtttctatttggaaatactaaattaaaatttaaagctaggagaaaagtaccattgtaggtaatgtattacccttctataccatttatttcaggtagattatttgaggtatgattatttcagatattcagatgacttttttttttttttttttttttgagatggagtcttgctctgttgcccaggctggaatgcagtggcacgatcccggttccctgcaacctccacctcctgggttcaagcgattctcctgcctcagcctcccgagtatcagctgacttttaaaaatgcatttatcttaaaataatacagatttataggaagctgtaaagacagtacagaacagtcccctgtgttctttacccagtttctcccaatggctacatcttacacagctgtagtacagtagaaaaaccaggaaattgacattggtacaattgtataattctgtgtcattttatcatgagtagataactattttatcaccacagtgatttcccttatgactgtagcgtcacacccactccccctctctcacaccatccctagctcctggcaaccactaatttattctccatctctataattttgtcactttagaaatgttacataaatggaatcatacagtatgtgacyttttaagattggcttcttttttttcactcaccataatgttcatgaaagtttgttcctttttattaccaagtattccatggtatggatgtaaccaaaaccatttaacattgatcttctgtagaacatgttggttgtttccatttgggggctacaaataaagctgctgtgatcaactgctaatgtataggtttatatacattttgattttcttttgaacagttacatattattgaagttggcacaccacctacagggaaccagccctttccaaagaaggcagtggatgtcttctttcctccagaagcacaaaatgattttcctgttgcaatgcaggtattttaagcaaaataaatgactttttaaaaatctctcctcttaaaagaaattaacccaaagactattcatggtagatataatttaagtgatgcttaaaagaatacttttttaaagtttattagtgaagctttgtaaaataataccttggcttttcatgtacaggactaccttaggcctattatgaggtttggctccagaccaccacaataaagtaaataccacaacaaagtgagtcataagaattctttggtttcccagtgcagatcaaagttacacttaacactatgctgtagtctactgtaaagtgtgaaatagcattgtctagaaaaacagtatacatactgtaatttaaaaatactttattgctaaaaaatgttaatgattatttgagcctttagtgagttgtaatctttttgcttgtggaaagtcttttctcaatgtcgatggctgctgaataatcagagtggtggttgctgaaggttgaggtggctgtggcagtttcgtaaaataagacagcaaagaagtttgctgcatcaattgactctttcacaaaagatttctctgtgcattgctgtttgatagcattttacccacagtagatctttcagaattggagtcagttctttcaaaccctgccactgctttattagctaagtttctgtaataatctaaatcctttgttgtcattcagcaatgttcacagcacctttaccagcagtagattttatctcaagaaacctcttttctttgcccatccttaagaagcagctcctttactaggagattacagtaattcagtcacatttttaggctctatttctaattctggttttcttgctatttctaccacatctccacttacttgctccactcaagtcttgaactcctcagtcatccatgaaggttggaatcagcctcttccaaactccttttaatgttgatattttgacttcctcccatgaatcatcagtgttcttagtggcatctagaatgatgaatcctttccagattgaccgttacttaaatttactgtggtgaatcctttccagattcacttaaatttactttgcccagatccatcagatgaatcactgttcagggcagctgtggtcttatgaaataatatttcttaaataagaagacttgtaagtcaaaattacttctttggtccataggcttcagagtggatgctgtcttcgcagacatgaaagcaatattaatctccttgtatatctccattagagctcttgggtgactatgtgcattgtcgatgagcagtaacattttgaaaggaatctttttttttctgagcagtaggtctcaacagtaggcataaaaagatttagtaaaccatgctgtaaacagatgtgctgtcatcagggctttgctgttccatttctatagcataggcaaagtagatttagcataattcttgaaggtcctaggatttttggaatagcagatgagcattggcttcaccttaaagtcaccagcatcattagttcctaataagagagtcagcctgtccattaaagccaggcattgacttctctgtagagaaaatctgttgtttagtgtagccaccttcaatgatcttagctagatcttccatataacttgctgcagtttctacatcagtacttggtttttcaccttgcacttttatgttatagagatggtttatttgcttaaacctcatgaatcaacttatgctaccttcaaatttttcttctgttgctttctcacctctctgagccttcacagaattgaggagagttagggccttaaactagattaggctttggcttaagagaatgttgtagctggttggatcttttattttatttatttgtttatttatttatttatttattttatttatttttttttttgagacagagtctctctctgtcgcccaggctggagtgcagtggtgcgatctcggctcactgcaagctccgcctcctgggttcacgccattctcctgcctcagcctcccgagtagctgggactacaggcacccaccaccaccctcggctaattttttgtatttttagtagagatggggtttcacggtgttagccaggatggtctcgatctcctgacctcgtgatccacccacctcggcctcccaaagtggtgggattacaggcatgagccaccacgcccggcctcctctccctctccttctgcctctccctctcctcctctctccccctctttctttccctttccctctccctctttaaagagataggttctccctctgttgcccaggctggaaggcagtgctgtgatcatagctcactgcagccttggaactcctgggctcaactgatcctcttgcctcagcctccagagtagctaagagtaggtaggactacaggtacatgccagtacgcctggctacttaaaaaatattttagagacaatgtctcactgtgttgccctggctggtcttttttttttttttgacactgagtctctctattgcccagactgaagtgcagtggcgcaatctcagctcactgcaatctctgcctcctggattcaagcgattctcatgcctcagcctcccgagtagctgggattacaggcacccgccaccacacctggctaatttttgtatttttagtagagtyggggtttcgccatgttggtcaggctggtcttgaactcctgacctcaaatgatctgcccaccttggcctcccaaagtgctgggatcacaggcgtgagccaccatgcccagcccaggctggtcttaaactcctggccttaagtgatccttctgcctcagcctcctctgtggctgggatacagacacataccactgcacctggctagtgtataacatttttatttgtatttttatttgagacggtctcgctctgtcacccaggctggagtgcagtggcgcaatctcagctcactgcaccctccacgtctcgggttcaagtgattattgtgcctcagcctcccatgtagctgggattacaggcgcgcaccaccccacctgggtaatttttttgtatttttagtagagacagggcttcaccgtgttggtcaggctggtctcgaactcctgacctcaagtgatccacctgcctcagcctcccaaagtgctgagattacaggcatgagccactgcacccagctgtgtataacatttttcttttagagacggaatctcactctgtcgcccaggctggagtgcagtggcaccatctcggctcactgcaacctccgcctccggggtcaagcaattctcctgcctcagcctccccagtagctgggactacaggygcacactgccatgcctggctaatttcttccgtatttagtagagacagggtttcactgttttgcccagggtggtctcgaactcctgagctcaggcaatccacccacctcggcctcctaaagtgctaggattacaggcattagccactgcacttggcctataacattttaaaagagaaaaaaactgctcatttagatagttacataaattcaaaagtagaatcgttttatttctctttggcctgcaaaacattatctcaatatggcaagtacctagagtttgactttgtctgtggtmggtttcttagatgtgagaaaatgagactgggattacatttgtaagccactgcaccagtgcactttctgcatatcagcaagaaagctgttaggttttcttatcattcatgtgttcactggagtagcactttaatttccttcaagaattttcctttgtattcacaacttggctaggtcaaaaggcccaccattcagcctatcttggccttggacatgtctttttcactaaacttaaaattacttctagctttcgatttaaaaagagaggtagaacacatagaggcaattgtagttattatattggcctaatattgttgtgtctcaggtaatagggaggcctgaggaaagggaaagaaacgggagaacagctggttggtggagcagtcagaacacacacaatatttatcagttcagtttgctgtcttatgtgggtgcaattcatcacaccccaaaataatagttacatcaaagatgactggccacagatcaacatracagatacaataatgaaaaggtttgaaatattgtgagaattaatgaaaacgtgacacagagacactgaagagagcacatgctgttggaaaatagtgccaataggcttgctcgatgcagggttgccataaaccttccattcgtaaagattcatctgcactgcaaagtgcagtaaaatgaggtatscctgtaatacgtaaactgtgctatctaagttttgaattgtctttcctcttatcagtttcatgttatataagagcttgggatatccatatttaaatgtgctgyagaaatgaaggaaactttaaatattagcttataatttttcaaataaccctcttgttctggaattttaccatctctaaaatggaattagactgaatgtttttattttctgtttgtagattcattattttactaaagtgttgattttctttctgtagatcagtgaaaagcatgatgtggtgttcttgataaccaagtatggttatatccacctctatgatcttgagactggtacctgcatctacatgaatagaatcagtggagaaacaatttttgttactgcacctcatgaagccacagctggaataattggagtaaacagaaagggacaagtaaggaaaccttgaaacttaagcaataaaataagataacctgatgagttgggaacaatcctgtccttttgagaaattactccccaagatwaaaaaatagaaaataaacatattactgttagtttttttccaaaaagtaaatagtaactttggatattagaaaataatatatatcaaagcacgatgtaagctgataaaaaagaaaataatatatacctaaaaatagagatgtgtatgaatacaaagtctctctttaatcctgtctcagagaaactggtttatagccatctaggactgtatagatgcattactgtcaaaagaagtgattccccatgcaaagaaacaatttagggtcatatttgacagactatttttttaaggaattttctgttatctccaaggcagagcarttatcaactacagggaaaagaattctacctacatcccttttcctagctccttaattaagcattactattacatgttagaaggtgatatgtttcagtacctcttgtgggatgcctggaaagctaatcagtttggtaggaaaaatattatccgttctaaatttgtcatttttgaaaaacctcttcataccatctagcaagtgattctttatctgtcatcttattattttaattttttttttttttttttttttcttgagatggagtcttgctctgtcacccaggttagagtgcagtggcatgatctcagctcactacaacctccacttcccgggtttaagcaattctcttgcctcatcctcccaagtagctgcaattacagatgtgagtcactgcacccggctaatttctgtatttttagtagaggcgggctttcaccattttggccaggctggtctcaaactcctgaccttgtgatccacccgccccagcctcccaaagtgctgggattacaggcgtgagtcacggcgcacagcctattttaatattaataagaatattttaccaggagctatgttaattttctgaaaaatggctaaacattttaaaaatactgttactggtcttgccttttactcattttcttccaaattagtatttttcccagataataagcaaaggaagtagatagattttgtttctccttcattcagttaatttttgaaaaatgttatgtatatgaagagacaattcctctagggaaagggagtgcatccctacctacccatgccccaccttaactccagacctggttaggtgcttttgctctgtactcctagaacttagggctttctcctcataacatttaccatacttattaaaattgctcgctaagctgttgcagtcactattcatcattagaaaaagggattgtctttagtaaattatatttctagcaccagtcagtgtctgggacaaaagcagttttaaaaattcagtagctttcagatattcagttatgagtgtcttgcttagaaaaatcaagaataaggctaggctcagtggctcatacctgtaatcccagcactttgggaggccgatgcgggcagattgcctgagctcaggagttcaagaccagcctggccaacatggtgaaaccctgtctctactaaaaatacaaaaagttagccggctgtggtggtgcatgcctgtaatgctagctactcgggaggctgaggcaaaagaatcacttgaacctgggaggcggaggtttctatgagctgagatcgcgccactgtactctagcctggatgacagagcaagactctgtctcaaaaaaaaaaaaaaaaagaaggaaaatcaagaatatattggtcttttggtgaactagattagtgataatttaataatcatgaagttgtgaagccaggggcttttttttttaaactcttaattaattaaaaaaataaaaaaaaagacaggggctgggcacagtgtctcacgcctgtaatcccagtactttgagaggctgaggtgggtggatcacctggggtcaggagtttgagaccagcctgaccaatatggtgaaacctcgtctctactaaaaatacgaaaaaaaattagctgggtgtggtggcaggtgcctgtcgtcctagctacttgggaggctgagacaggagaattgcttgaacccatgaggcagaggttgctgtgagccaatattgtgccattgcactccagcctgggtaacagagcgagactccgtctcaaaaaaaaaaagagagagagcgccagggtcttgctatgttgcctaggctggtcttgaactcctgggctcaagcgatcctcctgccttggcctcccaaagtgctaggattacaggcatgagccaccacgcctcgccactttttgtttctgctgttgtgctgttttaagatagcgcttaaccttaaataatttcatgacacattcttggtgttcataactctaattctgggaacttgttgattgttactttcccttcctcccaaattttatgtgccagctactttgagtaaagagatgagtatttacagtaaccttagggctttcttctactctttgctaaagtctaccaacttggcatattccctgaaggaatgagtaagtggcttctatgggttgaaaaagcaaaatcaattaaagtgatattatagtcaacatctgacttaaattcttaatttgatagaactgagtactttagaagacactggagccttttctgtttcctgtagcagatcttactaaggactggttgctagaaatctgctagaacagtctttaagtatgataacgataaaactgtggattcagtatgtggggaaacctaaggtaagatttgagttaaggttggggctcaggaatgcaaataactataaagaaagtaattattacttcctttaaataagccttgaggatggaggtcggacctatagaagtaaaatcttggaggttgaaatttcttcattttccctgaaaggagtagtagaatyggcagggcagactgttacctatctatctatttggttcactgagttctcaagtatttttcaattcttactgatttggggacagaaatttcctatattcatttattcaacaaattaaatacgttttatgctatactaattgcatattgctagtaatacagttaaacaaagacaaaccccctttcctcatgtgaacagtaactgagaaaaaattatacaattatattaggttgagaagtgctgttggggtaatatgagtagtttataagctagggcatatgactagttctgcactggggaatgggatggatgggtagagaaggactccctttctctatggcagttgacagtagttcagcttttggggcaagccagaaaatattctgtggcattgagaggtttgagggtaggtaattttccaaacaagcaattagaaattggcctttactgatattattattattttatttttattttttatttttaattaatttttttttttttttgagacagagtctccctctgttgcccaggctggagtgcagtcgtgccatcttggcttactgaaacctctgcctcctgggttcaagcgattctcctgcttcatcctccctagtgactacaggcgcgtgccaccatgcccggctaatttttatattttttttttagtagaggtggggtttcaccatgttggtcaggctggtcttgaactcctgacctcatgatccacctgccttggcctcccaaagtgctgggattacaggcgtgagccactgcacccggcctattttttcaagcacctaccatgttccttgtattatgttagctgcttgaggattcagtggtccctcccttcattgagtatataatctgctctctaggaatgaaaatgtaattaacgaaaattaccaaaaaattcttgtaaagaaaaatcctaaaattaaaaggagtataccttaaacaacttgcaagtgaaccctaaatgtcatttagatatcatagcttcttcagtgtcattttctgtaggttatcaagattgmagtcctcaagaagttttaaattatgtggagttgtctttcagagctcaattaagtgggaatgttaatttttgatactgactgtgttaagaatgaatagatggtatcaaagcagttagtttggacaatgaagtaagttatttagattatagaatagccatattttaggaaccacataatggcctaacaccctatgacatttgttttcaaatctccttaattttttttctccttgtcttccttcctttcattattttttaatggcagcaagaaaacagctgtcacaatttcattacctttgtgactcagtattaacctgttctaaacagatttggtatcatttgtatccaaatgaacacattgcagctacattttattctttaaattgcaggttctgtcagtgtgtgtggaagaagaaaacataattccttacatcaccaatgttctacaaaatcctgatttggctctgagaatggctgtacgtaataacttagccggtgctgaagaactctttgcccggaaatttaatgctcwttttgcccagggaaattactcggaggcagcaaaggtggctgctaatgcaccaaaggtaaagagttatgaaaatgaagttgtcatgacattaatycattgttaatattctgtttcttatattactagaaaaggaaccagcttcctacagataaactgtttttagattacatttgggttacattttcctttagtagaattccttgtcaatgcctctagatttggttaattttctctggatttgattagttttttaaaacccagattgttagaaggatatgtgggtctagcaagcttttgatttacatagatgtagtaatgtttagtcatttaggtgttatactgtttgacctcataaatgatagttactgattttatttccataacttggacatgaaatacatactgtccaattttatagtgggtagagctgtcaaaattaggctgaatttattcttatcacttttgatgttagtttatggtggactgaattaacaccttacattcctgaccaatattcattatgaaatttgtacwtaatatgaacttgggataatacttakctataactgttttatgattataactattctcttacacactgacattgtaatttaagttgatgtatttttgattctggataatttttttttttttccaaattctggataatcttataacattgaaccaggggtatgaaagacagtgactaaatatttactccagatggtaaagatttgaaacttcytaacttgatgttaatagatggattcattcctttaagattgacctaagagattgatctctacagggtgtttagtgtgatgtttggatcactttcgaagagcgtttaacatttctccttcttacactttcgaagagcgtttaacatttctccttcttaaagggaattcttcgtactccagacactatccgtcggttccagagtgtcccagcccagccaggtcaaacttctcctctacttcagtactttggtatccttttggaccagggacagctcaacaaatacgaatccttagagctttgtaggcctgtacttcagcaagggcgaaaacagcttttggagaaatggttaaaagaagataaggtacgttaaattatgttgacataatcttgctttggttgcattaaatatgatattggcaagttaaaatcatttaggctgcaccacaatgtctccattactgctggtagaaacagaacaaaaacacacattgcataagatggattcacttatttccttttgaaaaaatatatattttttcgccgggcatggtggctcaggcctgtaatcccagcactttgggaggccatggtgggtggatcacctgaggtcaggagtttgagacyagcctgaccaacatggagaaaccccgtctctactaaaaatacaaaaatcagctgggcgtggtggcaggtgcctgtaatcccagctacttgggaggctgaggcaggagaatcacttgaacccgggaggtagaggttgcagtgagttgagattgcatcactgcactccagcctgggtgatagaacgagactcggtcttaaaaaaaaaaaaaaagttggatcttagtaagacaggatggctatctaattagcaatgagatactgtttcccagagatttcacagaatgttagttggtgttacatggaaaaatatttaacttggtttcttgaaatttatttaaatatgaaccttttctaaatgttaactagctttctttactgtaggtcttctccatgccttttatattcactcartacttatttctctttacagagagcatataatggtagtatgttttcctgagcacattattccttatgtggaatagtgactgagaaacagccaaaggatgttgtttgtttctaggataacaaacaagttttagctgtccattagtgttaattcctttcacaccaccacataaaaaagcctttctcctcaaagttgtagtatggaattgccattgtcaagaactgaagtagtattgtttaaagcactctgaatagtgaataacatttaatgttattattctttcagcgttagtatatgttaggactgtttttatattattaattctaagtccttgtttcttgacccagtttctggcaatcttgtaagataccagagaatactacatcagatttgggatayttggacaggagtctctgatgaagaatagccacactagcgagtatttgaggtccatcctaattgattaagataaggcagggctgagtttggtggcttacgcctgtaatcccactactttgggaggctgaggcaaaaggatcacttgatgcaaagagtttgagaccagcctaggcaacacagcgagaccytattaaataaatacacaatattttttaaaaagataagggagggtgagaacagccaaggtaactgagttgacctacgtaacagggtgaaagctttttaggtatcattatccttttctgtgaacagtcatatgggaccatttgtggtattaataaaagagacattaatcaactattcattagcatgttcagttaagattatcgactctgatacaactttttatttttggcactaaatatcatttataagagctagtccccaaagtagaaaatctactatagtatgtaaaccagaactcttaggaaatgaatttccagattgggcagctgaatgagtaaggcagactgaataacacagaagacagtatctgcctgtatactacctaaaaattcttaagagtgtccttcctgccctataagcttaaatccaagtcaagaagatagtggtgcttagatccctcagacatatataggttacactgtgagtttaataactgtccttatggtaaacctcatctggctccttcattatcaaattttcagttgataacattacattaaaagttgctttttgtttttgaaaaattggggccatgtgatgtgagtctgatatctgaatattcttagtagctagaagtacaagaggtacaagattgtactttgaagtacttaaatccttaacaaggtagttgatagtatctataagattgcagtcttggtgagctttttatcgttaaacaggatttgtggagaattctactgagacattgctgtgaacacaagattaagagtctaccaaccacaacccctgcatatttataatatattctgtgaaactaagtacctttcatactagttattacttatagtggacatagtgtcaactgctcatttctaaaacagttcatggatcactaaacaatctctttttcctttggacagctggaatgttctgaagaactgggtgatcttgtgaaatctgtggaccctacattggcacttagtgtgtacctaagggctaacgtcccaaataaagtcattcagtgctttgcagaaacaggtcaagtccaaaagattgttttatatgctaaaaaagtgagttcaatgaaacacattctcagcatgaattcattgaagcattgacagagaaattagcctgtattaactcttgattactttaatagtgaatttcctttcattttgatttactttgaaatgtataaaaattctcttacccctcatatcaaattcatacttgttaaattgagaaaattacttttgcatggcttatcagaatttcagatagcaggcacgtttaacatgttagaacaaacttttgaaatattcatttattgaaaatggataagccaggccaggtgtggtggcttgcgcctgtaatcccagcactttgggaggccaaggcaggcagatcacttgaactcaggaatttgagaccagcctgggtaacatggtgaaaccttgtctttactaaaaatacaaaaaagtagccaggcgtggtggtgtgtctgtggtcttagctactcaggaggtcaaggtaggaggatcacttgagcccagggggcagaggtttcagtgaatcgagattgcacctctgcactccagcttggatgacaaagcaagaccctgtctcaaaaaaaaaaaaaaaagaaaagaaaagaaaagaaaatggataagccagttataaaaattgacagatgtttgttcaaatatgtcatcaccaaggtctaactgggcaccttaaattgaaaatgaatttgtgctttcaccagtagttctatattagtgagattttatagtagaaaaagtctttaaatgctataaaattgaaacttaggagcagcgtttaagtctttgtttgtttataggttggatacactccagattggatatttctgctgagaaatgtaatgcgaatcagtccagatcagggacagcagtttgcccaaatgttagttcaagatgaagagcctcttgctgacatcacacaggtaatgtgattaaaatatattttgtagaagctgattgaaatggagagtgggggccagccatggtggttgacttgggagtccaaggtgggagtattgcttgaggccaagaattcaagaccagtctgggcaacattgtgagaccctgtaactacaaaaaatttaaaaatcagctgcatgtggtggcacatgcctgtcgccccagctactcgggtggctgaagtggagggatagcttgagcctgggaggtcgaggctgcagtgagctatgatcgtgccattggactccaacctgggcaacagagtgagactctcaaaaagaaaaaaaaaaaaggaaaacttacagtttgtagaaattaaagctttgtcactctatatggataaacctcaaatgccttgcaaaaaaagcaagttgcaaaagaatggacagtatgaaaccatctgcatgtagttttaatacatgcaaaacaaacatcttatttagagatgtatgtgtattaaaaatatgaaaaatacatggggatgataaaacaggatagtggttgccactgggtgtggggagagggaagagatgcatttgtaagtgtgagtcagagtccttcatatttatgctattggttttctaaagttcataaaaataaaggtctgtcaggctgggtgcggtggctcaggcctgtaatcccagcactttgggaggctgaggtgggcagatcacctgaggtcaggagtttgagaccagcctagccaatatagcgaaaccctgtctctactaaaaataacaaaaaattagctaggtgtggtggcagacgcctgtaatcccagctactcaggagctgaggcaggagaatcgcttgaacccgggaggtggaggttgcagtgagctgagatcgtgccattgcactccagcctgggcaataagagcgaaactctgcctcaaaaaaataaaataaataaataaaataaaataaaggtctgtcggttcagttgtattctgctgttatgtaatatcttgaaatattttgtagttgtttttatcagaactcaaaataactatgatccctagaggacaaaaatttgttcttaagtgtttatattgtccaaataaaattctcaggtaaagaaagagttcatgcataattttgtctacatactctccatagtatcttaaaacaatttcttttaaatctttttttgtagattgtagatgtctttatggaatacaatctaattcagcagtgtactgcattcttgcttgatgctctgaagaataatcgcccatctgaaggtcctttacagacgcggttacttgagatgaaccttatgcatgcgcctcaagtatgtgttttaatgctttttaggcatgtttccaacattgttttagtaaytgtgcagcgcctctcagattgttatgcaaagctactgagrggcctactccttattaaagaaaatgtagctattataatattcttttgtactttaacagttcactattaaaccttaatctgtaatacggatattgaattactcatgtaagtggagtggacaataaacttgccttgtttgtggttttacaggttgcagatgctattctaggcaatcagatgttcacacattatgaccgggctcatattgctcaactgtgtgaaaaggctggcctactgcagcgtgcattagaacatttcactgatttatatgatataaaacgtgcagtggttcacacccatcttcttaaccctgaggtatttcagtttcttacctaatagatggtgttagttgtgattaataggtacactgaaaatgtgtttgtggtactaaatattaataatttcataccaccatgaggttcaacattatttcatttattcattcattcatttattttgtcttgtagtggttagtcaactactttggttccttatcagtagaagactccctagaatgtctcagagccatgctgtctgccaacatccgtcagaatctgcagatttgtgttcaggtggcttctaaatatcatgaacaactgtcaactcagtctctgattgaactttttgaatctttcaagagttttgaaggtaattaggagtttttgagtttttaaaaaaagtacttaaggtagccaagaagaggtatgcttatgatcaggctrttggaaattttgtttttctaaaaatttggttctatgggacattttaattttttaagttttattcaatatatgtcaaggcccttttatgttggattctaaggatatgcagtgaaccagaccatctgtttggatattttatagatgaattaaaggtagaattttaagagaaaaatatgtagtggtgttgaaattgtataaaatgaaaatacaggttgagtgtccctaatctgaaaatccaaaatgcaccaaagtccaaaacttyttgagcaccaacataacgctcaaaggaaatgcttgttggagcatttcagaaatcggattttcagattagggatgctgatcaggtaattataatgcgaatattccaaagttcaaaatctgaaacacgtctggtctcaagtattttggataagggatactcagtctgtactaatgatcaggtataataaaattttatgcttatatgtctgactcttataatagcaggtgattctcactaagggcattttgtgatttgttgctatttagcaggatttcttaaccttagtactatagacatttagggctggataatcattgtagaggggtgttcctgtacatgtagaatatttagtagaatattcagcagcattcctggtttctacccactagattccagtagcgtcagctccaccagttgtgacaaccaaaaatgtcttcagacattgccagtgtcacctgtgaggaaaatcacctcagttgagaaccactgctatacagggtactaacgtaatcactgttgggtgtctaacttctggtccccaactgcctttctctcctctctgtactagtagtactctattgagaaggggtaagagagtctagtagttttcttaattttttcttaattttcccagtttcaaaatgttaactgtgcactaaatttacactgtttagtacagtcactagccacatatagtagctatttacattgaaagttattaaagtgaaataaaatttaatatttagttattcagtcactctagccacatttcaagtgcttaatagccacatgtgtttagtggctattatattggaaggcaaagataagattttcatcattgcagaaagttcttctggacaatactgcactaaattcttcccaaattattttgtatgtttcctataaattgcatattgaaaaacaccaggtattggggtcttcatttaaaatttcccatataggggcacaatggtgtatgcctttaataatcccagtgctttgggaggccaagtgcttggggccacaaattcaagaccagcctggctagcatagcaagacaccatctctacaaaaattttcttaaaaattagcctggcatggtggcatgcatctgtagttctagctacttaggaggttgaggtgggaggattgcttgagcccaggagtttgaggctgcagtgagctatgatcgtgccactgcactccagcctgggtgacagagacctgcctcaataaaaaagaaaaaaaggaaacattgggttgaattgtctattcttcaggattaaagtgcaatccattttactgatctgattaatggaatagttagtatttttatcgcgctttttaagcaaccaacttatatttgggagtattcaatataacagttttttaattacataaatgtttttcagtcattctcaaaagtgtgcctrtgcttaattgtaattacttgtttctttaaggtctcttttattttctgggatccattgttaactttagccaggacccagatgtgcactttaaatatattcaggcagcttgcaagactgggcaaatcaaagaagtagaaagaatctgtagagaaagcaactgctacgatcctgagcgagtcaagaattttcttaaggtaagtggttttgagtaatgtgttttctggttggattccaggttagcagttctacaagggtttggtcatagttcaaaaatattttttccctaaatgtgaagttgttagcattcttaagttgtgtgctggattatttcttccaaacataatattctgtggtttcctttgaaatacggaaggaaattggtgagtaagaatgaccatctgtttaaaagaagaaaaaaaaaatagcactatttcaaaggaatttcctttattttaattttggatggaaaaatttagaaaagtggttgtatactttcaatgtcattttagaatcatttaggcttttgaatattaacatcagcttgctcttcataccattttgaggagcctctattgtaggcaaagggatctgttgtctaaggaatgtataggtttacctctttcatcaagtttgctcaactctagaaactaaaatattgttattcatatataattcataaaggtaagatcaaacaaaacgctcagctttgtgacacattaaatcagttagagaggagtaaggaccacctgtgttgcagggaggagtaatggttgagagattctgaactctagaacatccctaagggcagttaattttgtttaatgtttaacttagctttagctttattcttgtaactgccagttactttgtgatggaaataaagctttaaaattgatagctatctataaaaggctaggaaaactacagaacacttagattactgctctctcactgcctattatgtgtgtgtgtgtacacwatatatatatataatgattcctgagactttatagaaagttctgaagtattttttgtcttggaagaattttacattacaagtaaaaccaaaatgtttttgtagaacacagtatagaaagtaggcttttcctactcccagattatcatcatttgtgtgtgtggttgcattggcagattgttcttttgaagaatttactacctgggctctagattaaatagcaaaacccttaggggttttagtgtaatgaagtagtcaaaatgttgaaactgctctacattttagattaaaagatacacttttcaaaaaagtatagctttaaaatgtcttggccatcatgaatattctgggtaacctagctgtgctatgtttggaccaaaactttctggtgtcaaaaaacccctccaaatgagaaagatttgatactctgtgcttgactagtgtacccatactactgattcacttccttctttgagtatcattactatttcctttaaaaaaaacaacaacaaaaaaaactactactagattcttttgggggcagggggtgttgggtttttttttttgtttttctttttaagcttttaagttcaggggtgcgtgggcaggtttgttatataggtaaactgtgtcatgggggtttgttgtacagattgtttcgtcatccaggtattaagcctacaacccattagttattttttctgatcctctccctcctcccatcctccacccttcagtaggccccagtgtctgttgttcctctctgtgtccatgtgttctcatcatttatctcccacttgctagtgagaacatgcagtatttggttttctgttcctgtgttaatactaccagattcttaaatgatttctttttgtttttattgagccctcagcttctatgcttaaattgtaacttctttagctttggattttaatatttgagttatatatatatggaaagcaaaatgaaattagctattatttaattatcacatttttgagctttaaaaaaaatcctctagtaaagaaatgaaaaacaatcctctgggtactaggatggtactgccttaggtttgcatagcccatgggatctaatcagatgaagatttcccctccacacttgtgaactgggtacaagcctgatatagtaggggtgtggatgtggattatgagcttttgagtcagtcagacctgtttcaaattctacttagccattgtttgttcattcagtatatgtctagctgttacctcaggcaagttaatgaatatgcctcagcctcagtttcttcaaccataagctatgtttatttatcaagtaccttgtatactatagatgtttaggcagtaactattactgataagtgataagccttggaaaaaggtggagtcagcctaaatgggatttctgtcaggcaagtatttatttctctttgatatcaatttgtacttgactctttgaaggaatttacttccagccaggattagaggtgaatttagggtcttaygtctacataatttgacatgggagctcaatactaagatgcaactatcacattcatcctctgatgccagtgttgagagtgaacttattagattccttgttaacctccagtacagggttatgatgcctcttatcactgttattaaacttaattttagaggtactagctacatgataatttactggtgttgtaagtaaaccctgtgtcataagaaaaataccctgactctgatcttgaatattcaagtgccaattgtgtgttagccaccaggaataaagagattggtagaacataacttctcctttaaggtaccctgtgagcaggataaaattgtgtcattagcatcatttgactcatgccctaagtttgtagaactgtaagctctctgtagaaagcatataactgttcatcagacccatgatctgctccttgctacctttgatcttattttctacctttctttttttctttctttcctggtttagcttcaaccacactggcctgctagctattcctggaactcccctaaccttgtcctgccgaagggcctttgcttgtgccctgtactactattctctcatgaccttctttctcctttaccttctttgggtttctgattgaatgtcagaagagaggatgtctcaggttgccttgtgtaaaatagaacccattcctaccccattttgcttgtttttctttataacaccactatgaaacgtctcctcccactagaatgtaagttccttgagagaatggactctgcttcctttgttccctgctgtatctccagtacctaagaacagagtctgatacttgggtactcataaatatttgttaaatgaacaaatttatgttgaagaaaacctctgactatgctaatataatttcaagtttgatcttaaaatctttaaccattataactggaggttaattaaacatttagtaagtaatttaatattattaaaatgttaacatttctaccatgtataaaatcatgtgcaaattttagcaatcaagaaaataacctagattttgtctactttttaaatctgaaattttcttttggaatacagttagtattccacaaaagtggaattatttgccacagaaattttaacacctatgcatgaaaacagaataagtaatcctagattatctgtaagtgataaagataacaaaaatattttatatgtgtataggtaagatgactagtgtgttgatccatacttttttgatgttcatttagtaggaaaaacatgacatactaaaatttttacatagatagatgcagacagattctagaaatgatcgtaacagctattagtgcagagtttccatggtgttaaacaatacttattttagaaaaccttccttaatgtggaaaatctgcagctttacagacatttttattttttaatttaggatggctatattaaaattaagatttaccttggtgttcttgggacacttcatagactagtcttcgtattatttataatcgagtaactaatatcccctagtctcaggagccatttaattctaaccttgaaaataatgttcttagtggccatcactggggaaagttctaccctacttagttctgcttccctagtagactgtgttagaggaatcatttattgaggaatgtttcactgtgtataaatgaattcctgatggaaactgttgttttttgtgctctaccttatgtctgtggaatgtaacaggacatgtatcaggtaaatgcccagtacaggttttacttacctgtctataacatcttctatgtcagtctataagtaggattgtagtttggtatctgtaatggaatgataaaagcagttggcaatttaaagatatcttttctttaaatgctgggtttttttttttgtagggggtgggttttcttatggccacatgtggtcaccatcatgctgctccttgtaggctttgttataatagagtattagaggctggttgtatagattggatgtggggagggatagaaaatcattagtttgaaacaaatgtaagccatttatgccatatgtttgacaatgtgactatagttattaagttgattttaaatacggtagaagtgttattaccagtgaaagtcccagtatggtgaatttatcatctgagagccactggctcaggtatcttaatttgttactcttgttttttggtaaagggtgtgtatgggaaagacttggtatcttgctgtgtgaatctaagtattgcttagtaaaaatttactgaaactgggatgtacacactcaactattgggacattctttctttaacagaagagctatgtttgtgtgagcctctcttgttagcgtagaacaaattctcatatgttacacagatttgatacctcatagaagaaatttaaagyttccttttgtttgtctttttttcaggaagcaaaactaacagatcagctaccacttatcattgtgtgtgatcgatttgactttgtccatgatttggtgctctatttatatagaaataatcttcaaaagtatatagagatatatgtacagaaggtaagtaatatgtaggtaatgtaaaggtataatcttactatagattttatttctcatattctggaaatccttttgaaactctgtgctcaataagagtggtctgcagcttttaacgtgggattttttgtttttgtttttgttttggagacagggtcttgctctgtcacccatgctggaatacagtggcacaatcacagctcactctaaccttaaactcctgggctcaagcagtcctcctgccttagcctccaagtatctgggactgcaggtgcatactaccatgcccagcctgcttttaatactttttccccagcagaatcctttcttggaataaaattctacgtgcttccctagcaagccgactcagggaagggggaaaaaaaaaacatgcatgccaagtgtgtaaaatataagaatagaactgctattattgaaaaagttgggtggcctagggccttactaacttgatagaccctgaggtatccatgtagactccaaagcagagttttcaaaccatcttaaatacagatattagataattcaccttctaactgtagaaacaggcagtattgctataatgggagcctttttattagacagtcttgcatagtcatctttgactgtatcttctttggacttatttatcatatggaacaatgtttcggtaactaaccaaaccggtagagacagaatatagtatatgtgctttcaatacttattaaaccatgaagtcttgtttttagctggacttcctgctaaattcctctatctagttgcaaatttagaccctcagtttattactgaatttaaaaactgaacttaaagaaaaaaaaactgagcttaaaagcgatagagataaatgcttttttaaaattcctctttgcttttaataacataataacattcttctacttctttttaaccacaggtgaatccaagtcgacttcctgtagttattggaggattacttgatgttgactgttctgaagatgtcataaaaaacttgattcttgttgtaagaggtcaattctctactgatgagcttgttgctgaggttgaaaaaagaaacaggtgtagtaccattttaacagggataagttactctttcttaacatggcaatagataaaaatataggtagtcatttgttccaaagctactaaataacacatggagaataatttcctgaagacacctaacatagaggtgataagctagctaatagcactgggaaaaaatctgttttctgaaacattatagctgtcataggagatctgttaacttggttgatcatttttttggcatgtttataattacagctatgtggtttgactttatatgtttttatataaactatgtactaagtctcctgtttaggtgtgatacctgtgtatttaacaactaattctgtactgatcaatcatgtggtgtttccaacctgagaaagctgattaaaaaaaacagtgtggtgtttaagtgtgaggcaaaagagttccctgtgcaactcttgagttcaattgatatttaatttacagtaccttaacatgataatatggatttccaatagaatatagtataagtgcttctaaaacttacagactgtgaagtctttttttagctggaacgttctgaggaactagtgtttaggaagtactgatgtaaatgagtttggtgaggtggtatgctagtgggaagttctgctgtttatgagaagaaattaagaaagtctgtgggtttcattttaacctgagttgatataggtgatctactaattatattcttagaatttatattagaatgtttcaaacatggaaaaattttgcatttaagggtaatagagatatgcagttaatactgacctaaaggtttgagcctagtttcaagtgattttatgtcataacaatttaacatttaataagaggttcagttgagtctgaacctattgaatctattacctgaaaataatcttactgcatattccaagcaaatggcagttacagttagataatttagtctttaagtgacaaattatattgtgaaaagctagattcacatctaagtcactagtctagacatgcctcagctaatttttattccttaagttgacatggcgtatcttggattgcacatgtttataggagctggatttttgcctctatttattaaaattgtcttctccctaatgggagggttcataataaccatgtgaatttgatatagccaaaataacgaataatgctttttctctggctgcttttaatgtttaaatcattggtaaaagaggcttgggccaggcgtagtggcttgtgcctgtagtcccagcttctggggaagctaaggtgagaggattgcttgagcccaggaggtcagggccgcagtgagccctccactgcactccagcttgggcaacagaagaccctggctttaaaataaaaataaaaggaggcatggtcatcaggactatcgaaacaagctatagtatagcaaaactgtgctccttgatggagtgtttatatgacagctgcaactattaaacccagagcttctaaagctatcagattttattcccaatatgtatttagggtttggctgtaggtaatgctgtatgttaattgtgttaaagctgaaagaactctcagataatctggcctatgtaatatcacatccccatcctatccacaaacaaaattttctgaagtctagatattttgtgtgttataaagaaaggacactgtatgaatctctaatcttttattcagatataaggaggtaagtatatcatatagcagataaacctgggagagtgaaaaatagccttatataccttctttttattcttggacaactcaatcatattttgagtcttaatttcccaatttataataggatcactgataattaaaattaatgtaaagccaggtacagtggcttgcacctatagtaccagctactcgggaggctgaggtactaggatcacttgagcccaaggctgtagtgcacaatgattgtggctgtgaatagccactgcacttcagcctggacaatgtagcaatactcggggggcggggaaaaagtatgtgaaagcacattatagaccataaggtatttacatagttagcatgtcaagagtgtgttatttataatacagtatgtgtgtgtgaggtttttttccttttttcctagattgaaactgcttctgccttggctagaggccagaattcatgagggctgtgaggagcctgctactcacaatgccttagccaaaatctacatagacagtaataacaacccggagagatttcttcgtgaaaatccctactatgacagtcgcgttgttggaaagtattgtgagaagagagatccacatctggcctgtgttgcttatgaacgtggccaatgtgatctggaacttattaatgtgagtactgctagctgaatatgtagagaagctgcatttttaaaaacctgttacatgagagtttcagggtaattttaggtaatatgggacatttggggacggtgggtgcttttttaaaactttatttggaaataattgtgaatctgaaagtggccaaatagtggataaagtctatataccctttattctgattgacttgctaatgttttaaccccactagccttaccatttgtgttctcacactcttacactcaggcacaccattcatacatatgtgtatacacacacatactattttttaaccacgtgggaataacttgaatgcatcatggccttataccccttccgagtgtatggcctaagaataaggatgttctctttcattaaccacatgaaagataccagcttcagtcagtttgacattgataggatacctttaaaaatctgttctattctagttttgtcagttacccaatgatgtcctttgtagcagttttttcccctctagtctaaggtcatatatggcatgtagttttcatgtctttagtctcctgtactttggaatggttcttcagtcttttgttttctatgacgctgatatctttgtaaacaatagttgctttttctatttgtaactattttatataggtgaaatttcaagcaacatcaaattaaccattttaaagtgaacaattcagtggcattcagtatattcacaatgttatataatcacctttatctagttacaagttttcatcacttcaaaaggaaaccctgtattaattaaacagttcctccacataccccctcctcccagcccctgacaaccaccagactgtactgtctctatggatttgcctattctctatatttcatctaaatgtaaagtctctttttaaaaaacagaatgtgtctcactttgagttcctctgatggttcccgatgattagatttagattatacatttccacccagagtactgcttcagtggtggtttgtttttctcttggtattatatccggaagcacgcrgtgttcatttgtcccctttgtcagtttttatcaagttgtaacatgtctttattacataattattaccctcttggagatattaaacagtctataagtagtctgtagtagactatgcaaatatcctcttaccctctcccttaatttagcatctgttgattcttgcttaaaccattcttaatgtgttggttgcaaaatgaaaatttttcaaactccagcagtttctccacatttgtcagttagcactcatgcattcatgaactcttggattttattcgatgggctacaattcactactatttattttgatgctcaaattgtcccagttttgactggtgagaacctcttcagtctgtgtctttgtgtcatgggctcatttttctttgagcactaacttattttctggcacacaatacaccaagctcattttgtaccttcagcagccctgaagtcagtcatttccctagggaaccttttactggggcattagaaaccaagatctgggccaggtgagtggctcactcctagaatcccagcactttgggaggccgaggcaggaggatcacttgagcccaggagtttgaaaccagcctgggcaacatagcgagccccccgtctctacaaaaaattacatgattagctgggggaggtgccatgcacttggtttcaagctacccagaaagctgaggcaggaggatcacttgagcccaggaggtcaatgttgcagtgagctatgatcrcaacactgcactctccaaccttgacaacagagcaagactcctactttctgaaaatattagaagtcaagatctgagctttagtgtatttgcttctaagatctttcagtggtcagggcttagttacatttatgtacatacatatgctcatttatgtacatacatgtgcatatacgcatggaaaaataaacacacaagaacagctagtaaaacactgaaaactgtaaaagtggactagtcctaccagatgttgaactgtgtattacaaagtctatataattaaaacagtatattactggtacatgaatcaaagtccaaaactagatccaatatcagtaagattatcaataaacatagtttaaaagataggaaataccctctaaaatgctataaaaagtcctttactttttaccttgaaattaatctatcatatcttctttaggtttgcaatgagaattccctcttcaaaagtctttctcgctacctggtacgtcgaaaggatccagaattgtggggcagcgtgctgctggaaagcaatccttacaggagacccctaattgaccaggtaacattggcaaatgtgtttatggctgtcagtaaaaattatacatttttaactatgaatacaatcctttccctcatcatgtactcaaatggatcatatataactatgagagaaagcaatacaaagtagaagaaaattaaaatttatatatattcaatttacattcatttgtatataatgaatgtaaattgattatatacattatatacaaatgaatgtacatttatataagtataaatatgtatataacatacattaagaaaaataagccatgtgcggtggctcacgcctgtaattccagcactttgggaggccgaggtgggtggatcacctgaagtcaggagttcgagaccagcctggccaacgtagtaaaaccccatctctactaaaaatacaaaaattagccaggtgcatgtaatcccagctactcggcaggaaaatcgcttgaacccgggaggtggaggttgcagtaagccgagatcacgccattgcactccagcctgggtgataagagcaagactgtctcaaaaaaacaaaaagaaaaaagaaaaagaaaatacatcccaaaagacctgacttaattatataaaactctcttggttcatcatagtttaaaaggaaaataacaaactaaacattaaagattgctattattaacacttaagtggctaaattgattggaaacttcaagataataagtcagaaaaatataaggataagagaaaatacaaaagaccaagtgcatcagtgttatatcttactaataagaagtatagaactgcaaatgagatggggttttatacctaaawaaaatagacaacatattttaaaagttctaaaaatagaagagttgttataatgagtcttaaattctcctgagataagtataaataaaatattttggaaacgaataggttgaaggctattaatatttcattcctttcctaggaagcacttctaagcaacattcccaagtagttacaaagcttcctaggggaaggttgtgggggtgggggcgatggttggaaatcattgcagcatctagaaaaccaagcaaatagccaaaaccagacgaattaccgatattttaattccacatctgtgtagctgaattttgaattatgtgtagccattaaagtgataatgatgattgctagcctggataatgttttaatcagggaaaagatagaaattatatamttagagtaatttttcaacacaattatacatattgtatagatttgtgtagaaagacctctctatgtaaatttaaaggtctttttcctacttcattcttttctgcctatttcaagttttctaatgagaggccaacttacgcttttttaaaaccaacttgattctcagtacttatgtcccatatatcctctgtaggttgtacaaacagctttgtctgagactcaggaccctgaagaagtgtcagtaactgtaaaggctttcatgactgcagaccttcctaatgaactcattgaactgctggagaaaattgtccttgataactctgtattcagtgaacacaggtatgctttcagagggatccattggctatttatagtcagtctttaataaattatggcccatcagttttgggaaggaacaaaaagatcagagaaagttgcctgaattctcactcttctaatatcctcccccctaccctacctcttgagacaaaaacctctccgttagtcacagtggttattttttatgtcggataaacttaaaatattgcatttaaaatattcttttttttcttaaaggaatctgcaaaacctccttatcctcactgcaattaaggctgaccgtacacgtgttatggagtatattaaccgcctggataattatgatgccccagatattgccaatatcgccatcagcaatgagctgtttgaagaagcatttgccattttccggaaatttgatgtcaatacttcagcagttcaggtaaatcttcagattacctaagttgaattactaaacactgtgctatgagggtgggcctaattggttgctacggcaatagagcagcaataaaatactaacagcttaaatgtaattgctttgggtaggattgattttactctaaccctaatttcaaacttggatacttaggtcttaattgagcatattggaaacttggatcgggcatatgagtttgctgaacgttgcaatgaacctgcggtctggagtcaacttgcaaaagcccagttgcagaaaggaatggtgaaagaagccattgattcttatatcaaagcagatgatccttcctcctacatggaagttgttcaggctgccaatactagtggtatgacttcttaccttatgtattgaaacctcataaaatgattaagctaagcattaagatatctgtctattctgaattttagaagagttggatactgcatggtttcttttagtgctccatcttagtccagataaaaagaggctgtattttgtgaatttgtaagttcacaaaacttacaagtggggaagatgaatcttctgtttttgaagtctcataaaatcctgatagtgctctaatcttaaaactttaaggaaaaagaattcatctattcatttggtccgtgataatacagaagtgaaatattgcacggtttacatttgtcattatccatgtttccttgaaaaggaaatgaatgcaattttcatttacttgggtgaaagataaactaggatgttagtgtttggatatattttttctttttctatacttaggaaactgggaagaactggtgaagtacttgcagatggcccgtaagaaggctcgagagtcctatgtggagacagaactgatattcgcactggctaaaacaaaccgccttgcagagttagaagaatttatcaatggaccaaataatgctcatatccaacaagtgggtttccttttcagatttaagaaaaactagttgggctacttgattagcttggtaggatcaaaacatcataactgaagaattccaaggaaaaatctataggaaaacaaattctttctcattgtgaagatatcaatttgaaaagaggattaagctcacactmatatcttgctgaatgtgggttacctttttttttccaggttggtgaccgttgttatgatgaaaaaatgtatgatgctgctaagttgttgtacaataatgtttccaattttggacgtttggcatctaccctggttcacctgggtgaatatcaggcagctgttgatggggctaggaaagctaacagtactcgaacatggaaagaggtaatctaaacccaagtttgagtgaagaattaaagaaacgctatttaaacattagtttaaataactagccatgttttacatttgagttcacagaaaggaaatgtttattctaggtctgcttcgcctgtgtagatgggaaagaattccgtcttgctcagatgtgtggacttcatattgttgtacatgcagatgaattagaagaacttatcaactactatcaggtaytaacgagacttttatatgacctgagatcttttaccatagatattcttatctttaactgcacatttctcttgttcaggatcgtggctattttgaagagctgatcaccatgttggaagcagcactgggacttgagcgagctcacatgggaatgtttactgaattagctattctatactctaaatttaagcctcagaaaatgagggagcacctggagctgttctggtctagagtgaatattcccaaggtaaccagtcattgtaacacagtgaagcaactgtgtagttaaaactaatgcttcaaaatatcttattctttttaaggctgttagctagactcatatctaaagcaattaagtctttcttatgcaggtgctaagagctgcagaacaagctcatctttgggcagaactggtgtttttgtatgacaagtatgaagaatatgataatgccataattaccatgatgaatcatccaactgatgcctggaaagaagggcaattcaaagatatcattaccaaggtgtgtactttcttcagaagataaaggattcagaaggagaaagctcattaggaagtaactgacttatgtatggattttcccattrtaggttgccaatgtggaactatactacagagcaatacagttctacttagaattcaagcctctgttgttaaatgatttgctgatggtgctgtctccacggttggatcacactcgtgcagtcaattatttcagcaaggtaaagtaataattttaaaccaaagcttcatagcaaggaattaggacatacttcgataacttttgtccctgggacttcaataatgtgctatatttgtaacaaactctttattttaaaggttaaacagctaycactggtgaaaccgtatttgcgttcagttcagaaccataacaacaaatctgtgaatgaatcattgaacaatctttttattacagaagaagattatcaggtaaaaccttttgattcttgcacataatctcaagactcataaagttatgttttcccattttttaaaaaagccattatcctttaggattgtaaacagtaggtgcttgcatacctaggatctaaatttagtaagatttcaggattgataaatcttctaattaagtgccaagttttcagaattttgctcagatcttgtataagatactgcttttgaaaaaaatgatatgattactttatctctaacatctagattgtaggtagagtcaaaaatgtctttgaccacttaactaattcataaaatttatttggtattaactatatttattcaccatttttcttgcctactgttttattagtgtttgtataaactttctcttatgaaggatttcacaagcaaaagtgaagtagagttaagcttaagctacttgcctttttttctctctcttcattttctttgaggctcagcgcatgcagatctgtactgctgccatgctgagttttatcagaagtttctctagagcacagaatcttgccctccatgccaggcgtggtgactcacgcctgtaatcccagcactttgggaggccaaggcaggcggatcacgaggtcaggagatcgagaccatcctggctaacacaatgaaaccccgtctctactaaaataccaaaaaaattagccggttgtggtggcacgtgcctgtagtagcagctactcgggaggctgaggccggagaatcgcttgaaccctagaggcaggttgcagtgagcccagattgcatcaccactgcactccagcctgggcaacagagggagactcyatctcaaaaaaaaaraaaaaaatcttgccctccaaattagaaatattgtccatttcatagccatatgttagtccttgatagtgaaaatcttggagaaaatggtatctttaggtaaaatgaaaaatcataccttttgatgcttgaatctaggtgtcatattacatgttaccatctaaggggctcattgattgagaacggaatataatgttaaacaaaatactgatctggcatttggatggctttttttttttaaggctctgcgaacatcaatagatgcttatgacaactttgacaatatctcgcttgctcagcgtttggaaaaacatgaactcattgagttcaggagaattgctgcttatctcttcaaaggcaacaatcgctggaaacagagtgtagagctgtgcaagaaagacagcctttacaaggttgataaagttgcggggcaggggctgttttaaaccaggcctaaaatggtgttacaagtgattataatctataaataaaagtattggttttgtgaatatgagagctgactttaaggcaatttaagttaatggatttcttgattctaggggctctcttatgttaaggtcaaacttgtctggggaaaaaaaagcttttagcttatctcttctttgaaaattttaatttaaatgatacaactaggaggcttttttccccttgcaaaaccagatttatattggaaagyttccattgtttttcttggtttactagttcagtatgtggggtctaatgtttttgactttcactatttctttgaataggatgcaatgcagtatgcttctgaatctaaagatactgaattggctgaagaactcctgcagtggtttttgcaggaagaaaaaagagagtgctttggagcttgtctgtttacctgttacgatcttttaaggccagatgtcgtcctagaaactgcatggaggcacaatatcatggattttgccatgccctatttcatccaggtcatgaaggagtacttgacaaaggtaatgactcttctaagtgtattcagaactagtttccttgcatgtaaaattctacatgcacattaatttttttaaatgcttttttctttagtagaagtaagtcatttagtcgatcataaaatattcctgttcttttgaaawttttttttaatagctgacaaatgacactgattggaaggggaactcaaatgtagctgtttaccctcagtgtatttatgagggtgaaaataatctatgtatttttttatttaaaaaactttgataaattttatttcaaaatagtatttttctcaaaatcagttcttgtractcaaatattcatgactagtattgtagattcccttttatttggttggttcctgactttaatgatgtctatgcctgtttcccctggggaagctgcatgtatattcttaacatccttttaatcttcacaatttttttgatagtttaacccctgatttaaaaataccataggaggtgaacatgggaaaaaaaaaacaagctgggggtctaattgccttataacattcactattcgtcttagtgtccttttttgatgtatgaatttactcacyctatcttcagcagttactagctgtctctctgtagaacatttttaaatggttttagwggatccttttcgtcaaagcaaaaaacatgattaaaatcagagtctcacatctgattccttcagcctgcctgagttggggggatgggagggtgaagaagcgctaccaacaacccctcccatactgaatttttcctcaggataccatttaattagataccattgtgtctgtttaaagtttttaaagaattaacattttctgtattcaatgtaagagaaaaaacatgttgccttatcttagccatagatgagaatagcttcttaaacataatgccaacttgtgagacctgtctttaagctgctgttaacctaagtgctgtaaatttttctagtgattaagctgctttctttcatactgtagcataaattcttctgcaktaagctttgaagttacacaaaattctaaattttgcttccagtatgccctttattttcacttctctcatacctttttagtggttagatgtttcttccctaaacctttgttgctgattctacctttttatgctcaatatggaattgattttttttctaagctgcaccttctgaattcctttgcaggttgatgcaataaaggaaaaggtgaaagttgattctttaacatctttaagtctggaggactaagtctaaggaatttgcatgatgtttttccttcctcttctacactgctgctgctgctttttccccccaataaattttcactaaagcctctgcaagtcccttgaaacataactttaatagagctgtaggacattagtagacgtttgctactaatcggctaataggctttaggaagggcaggaggctaatcagtagttggttcacagtctctcttaaatatattatgaaaaactgagtatggtgagtttccatattaatttcaaagtaacaggaaatttctcttccctgtcagggtatctggaccataataggactgtcataatccttgaagtaaattaaaacagcctctggttttactttgtgagcttgcctgacagttgtcgaatttatatatgtatatatacatgccctaaaaggctttttggggtttttttttttttgtattgaaggactgtgatccagtttctgatctcttgattcttactaattttttgctgaaagtagatacgagagatactagctgcttccgaagagactttcctcatgtttctccaggtgtccagttcttatggtgctagtccatttttaagaggaatcaaaacctttttaatcatgagagccaagcttgctataattgttgctaagcaacatgaattatttttaacaaagtattaacttctactttctgtaataaggcatacctctgaagctacctaaaatttgctctcctatttatcagttggcttgtccaaggatgtcaaattcaggcaccttttggttgctgcttccttcattggcttgtctccatcccaatataaatgaaacaaacttacgtctgttatcaaattgtggttagaaaagggtgggaaggtaaaggagagttgaaacaaatttaaaagaatttgggtgggggacaatgccttgggattatgttgaaccaaactggaatcaccactggaacttagggcaaacctgagtaaaatgcattgtgtgtgagacccttcagcagctagtaagcaaggcagttagaaagcgtgtgtgtgaaaaacaggtaattgaactgcagtgttatgcattgttttaaatgaagcatgtacaacagtcattgcaattacatcatactatttttgaaactcttatagcattgctgtgggctgtgtgtgtttcttgagagcctgtatagcaagtcatcttcagacctcacttcttgcttcagtacttttgcctttttttcatgcacacatacaccaaaataactgactgcatgttacttttcctctgcagcayattgcagtctttgtggaaaagccttttacattttagtgaattttcagtagtacagatggaactgaattcattgacatgcttacctgtaatttttctttttaaatccaaggatcagaaactttagttacagctcttaacaaaagcttgtgttcttaaaagacttctctgctttttttttgagcaatctaaattggatcagtggaaacaaaaattgaaagtccctgtgccagaggctgtcccattatatagaagaatcaaactttttgcttagcttgatgctattccttcagaattcttccccctacgcccaaacttcctatgtgtatgccagggcattgtgatattgccagctcttctaagtcttccatgtgtttctctaataggacttctgtgttcaacatctgattcagaccttaacttttaaacacatgttcacttcagattcttttccctggaagtccggaaatgtattatgcagtggtggctttttggttgtttcatttttcttcttttttcttagaagttactaatatacaggcatccatgtatttttctttataacttctgtagctctttcttgaatactggttagttagcaaaaccccatctgatccttgatggcacagagctgtgctttaagttctataactaataatttttgttctaagtgtggatgccaaaaaatggacatttcatatggtacttatactacataatagtctttaatttgatattagggtaatttgtaacacatcatttagactataaagtaggataatagtgtataaaagtaaactaatccatcttcctaggctagaaattaaaccacatttcatctgaaggagcctacttaggcttacttttctcaaactttcagttccctaacaaattaagatggattagactcatatttatggtatttaatatgaaacaattaaatataaaacagtgccctaaccttaatggcctatgtgaagactgaaagatacttttttaatagtttcaaacagaaatgaggtgctgccttaatctttttaggacctggtttttagaaacttttccactgaagtctacaatttttttttttgagtgatttttcataatttgcctttttgaagaacatgcagtgagcattcataaagtgtttccccctgcaccttggccccccgtctcatgcagcacatttatgacattgaaaaccaccagtaatagataacattgagatttgaaatttagttttacttaggtataatgacagaccaagtayaaggctttggttgagagaccagcttttaaatattgaaagacaaatatagtgtaaaaggcgcaatggaatttgtatagtgaaggagattctctagtcccagggttgtaatgtcacttctgtctaattcattacagaattacagaatcaaatcatgttagccctagaagaaactgcagatcattttgttcaatcttctcattatataggaaaggaaatttgagggccagtgcaatggtttgccaaggtcacacaactagttagtggaaggatccaggcattctaattcctttctttcactaatacatttggmctgctctacagaattacttctgtctgatactatccactttgaagagtagctagcatatagtagccatttacttttggctcaattaaaagcaaacatttttgggacaaaatcaggctttcctgattacttcttagataacagagcccacacagtattaaaacatgcagcctttctttatgcaaaaagattgaatatggagccacttgaatcttaaacttcagtctgcagctataaccaatatcatcagaagttatacacaattggcaaaagaatagcttattctgcccaaatacttgtccagtcactaggatcatttcacttttttgaataccatttgctttggggagggaagtattgccagaccrtgaattcattattacctctgatcagttttaaacttcatttgaaaagtggttccttctcgttttctccctccctcaggctgcatcctagcatgcccagttttagtctggcatgagcttttatggcattttgaatccctccttcctgagggtttataatgacagtgctgaaaaccacctggactgaagtatgaacattgccattgaatttgagggggactgagaatgttctttctagtctgttttattttgacagaatttaacatactaaggcttttccactttctgccataaacctaggtttataatacttttggggtgctaattaacatgatgtgtttttctccaggtggataaattagatgcttcagaatcactgagaaaagaagaagaacaagctacagagacacaacccattgtttatggtaatctctctctgtaacctcaaaaaattcattagacaaatatttaattacttagagactgtgcctcaaaatagaatacaacaagcttctaaagtgcaaaaggctttctaagaaatactgctctctactgtctgattttttttctgagaagtcataaagcaggtgttgatattattcactaaaataatcttaaatacaagaaaactcaaaaatagtcatttaaaatcataacatgaatctttcctatcatctggtccctcacgcattacctgctcataaattactgaaaaagaaatattgatgaattccattttcaaaagagcaaaaggtgagagaacatgccaaggctgtctttagtatgctttacataaagaatacatcctcattttaaattctaactggggcagagaactgggtagagtttccatttgagaactttccagagagataggatcttcaaactctcaagtgaatatttaagacaatttcatgtcttcttaaacctacatgtctgaattactgctcctttccatttcatagttggtgaacagattcatttgaacaatcactttgaagagtataggtagaagcacaataaccaggtgagggaacataaaaatatgaccattatggctgggtgcggtggctcatgcctgtaatcccagcactttggaaggctgaggcgggcggatcacaaggtcaggagcttgagaccatcctggctaacacagtgaatcgccgtgtctactaaaaatgcaaaagattagccgggcgtggtggcacatgcctgtagtcccagctacttgggaggctgaggcaggagaatcgcttgaacccgggaggcagaggttgcagtgagccgaggtcgtgccactgcagtccagcctgggtgacagagcaagactccgccttaaaaaaaawatatatatatatatatacatatatatatatataaccattatatatcaggctactgacacaaataataatatatacacttattatggttttgtctcctttttactgtagataaaaagtactttaggaatttagaggacaggatagttttgataaagtgggttcttagagatgggagcaagatgtttgacatgtttgagataggaaacacatcaagtccttaaaggtgaaaaagacataggaaacacagtaggaacaaaaaaaagatgggtgtaatactttggggttacctactgaatttggcttgccttcagggtgttttcatgggtagttgaaaattgggttggaatttcaagtagatgtcattatcaagattagggatgactttttaaaaactggtttctgttggctgggtgcagtggctcacgcctgtaatcccagcactttgggaggccaaggtgggcggatcatgaggtcaggagatcaagaccatcctggccaacatggtgaaaccccatctctactaaaagtacaaaaattggctgggcatggtggcatgcaactgtagtcccagctacttgggaggctgaggcaggagaattgcttgaacctgggaggcaaaggctgcagtgagccaaaattgcaccactgcattccctgggcgacagagcgagactccgtctcaaaaaataataataaactggtttccaataataatttgtttgctgaagacagctttggttgttaaccacaaaaagcaaagacatgaagtcctttgtgtaggagaaatcttgatctaggtttacactgtagtgggatgttaaaaatacttttgtaggggtagagagaggtgttacttgttttcgctctctaagccaagttctctacaggtcatgttttctgtatatggccaacaactatttaaactttataagaaagagtgtcaacatagtatttgatagagggtgtatgttctaatgtatttcatacctaaagaatgtctgaatrtgtctttttttttcccccaagatggggtctcgtctgtcacccaggctggagtgcagtggcgtgatctcggctcactgcaacctttgcctcctgggttcaagtgattctcctgcctcaacctgctgagtagctgggattataagcatgcaccaccacgcccggctaattttttttgtatttttagtagagacggggtttcaccatatcggccacgctggtgtccaactcctgacctaatgatccaccctcctcggcctcccacggtgctgggattacaggcgtgagccaccgcgcccggcccaaatgtgtcttatttttaatttaactgctgtctctaaattagtactggatcttctataaatgaatttggtttcattgccatttagacatgtttaaatcagaaatttaaatgtaactctaaaagttatgttaaaaacatgtcatttagaccaagcatggtggctcacacctataatcccagcactttgggagggcaagatgggctgatcacttgtggccaggagttcaataccagcctggccaacgtggcaaaaccctgtctctactaaaaatacaaaaattagctggacatggtggcgcacacccataatcccagctactcgggaggctgaggcacgagaatcacttgaacccaggaggcagaggtttcagtgagccgagattacacaactgcactccagcctaggcaacagagccagattcttttttttttttttttttttaaaaagtcttttaaaaaattcttttattgtgctgattttattgtgtcatgaagtgtaatatgcatgtaggtatgtgtcaagtatacagagtgtcaggcatacggtgttcagtcataagcagttctggcctttggccctgcactgtttgttggctttttaggtaggaaccttcttagagtaagactgtcatgctaaaattgtagcaatcaaatgtgccccccatacaactcatttgaggttgagattatgttgctagagtggaggagattggagtgttctaaatgctaacagtttgtcctgcctccttgcccctgccccctgctcctttttgttttcttctactgtaggtcagccccagttgatgctgacagcaggacccagtgttgccgtccctccccaggcaccttttggttatggttataccgcaccaccgtatggacagccacagcctggctttgggtacagcatgtgagatgaagcgctgatcctgtagtcacctattttcgtactgaaacatcgtctttacccacttctcagtttataatgggggaaaacaggcaacgtgttcttgtaacctttatttcatgaaggacttctttttgtttctaactataaacttggatcacctatgttaaaaccttatttcacattccacatcattttagaatttattttcgaaggggaatagtttcaatgttttattcacttgggctttttttcttccccctctttctttaaagaactgctcaatattcaatctgttgtgaagaacctgatttgcactctgtagtgtttaaagaaacaaagaaactctaatattgaatctcttaaatttagtgtatgtaaacagcttacaaatacgtattgtctaaatgcatttaaatctgttttattcaaagaaaagctaaagcaaaaacactgkcatatgaccatgcaagactgtcagtgccaacaaagacaacactaatcagcacatcgtacactggattgcagtgcttcccagattattgaaaaatgttacagacaacttgcctgatttttaaatgagcgtaaaaggccctctaacctatgcaggtttccccattatgcatatagaaaatgctagtatgttttgctcacttcatatgtaacaggtgcccttatgttgtgctgtatcctgtgctttttctgtgggaccattccattcaggagcaaagagcmccatgattccaatcttgtgtgtgtttactaacccttccctgaggtttgtgtatgttggatattgtggtgttttagatcmctgagtgtacagaagagagaaattcaaacaaaatattgctgttcttcagttttgtttgtggaatttgaaattactcaaatttaaaataaattactggactgtggaaataacatagaattgaagttttaattaaataccactcaaacgaaaagaacagtagtttttgtagttttatattggatactgaggcattagggaggcatgaaaggaagaggaatgaggattgagacatgtgaagacattgtgcattatatcaatgtgcattcctgtagttcattaacaaggtacatgcaatagtctaaaraaccagagtcactactatagtggcttaacatttaatctgtctccaatattttaaccaagtgacaccgaggtttttatcgaagcatttcacttaaatgaacaaatcatggctgttatattaacttgaaataaaatatatttaaacatgtagttaacatgctctttctcatcatgaattataaaggtgcccaaattatgggtatcttgatttttttcaaaaattggttgtgtgaatccagctcttgcttatggctgagaatgttcctaaagttcatttcactatcccttaatcctcaatagctacacatacccccttgcctagttagtcttgcactgctttacaactctcttaggcaaattacctaacataagctccacagaagagttttttaaaacttaaaatccctgtcccaccaggtgtggtggctcatgcctgtaatcccagcactttgggaggctgaggcaggcggattgcttgaggccaggagttygagacaagcctgaccaacatggtgactccatctctactaaaaataaaaaatcagccaggtgtgatggtggatgcctataagatcctagctgctactcaggaggcaggaggctgaggcatgagaatcacttgaacctgtgaggcaaaggttgtagtgagccaagatcacgtcactgcactccatcctgggtgacagaatgagactcttgtctcaaaaaacaaaaaaacctatttagtttcatccaggacattaagtgaaagtgtttaatgtgagtgcaggtcagtgaagaatacaatggtgcccctgctttgatttgtgggaggtgccatcagttttccccaccactgcttttgcaccctcagtgcaaatatcaacacagagaaaaaaaaaawtaatagtattatgaaaacattgactctgtggagaccctgtgggttctgcagagtatactttgaaaactataagattatgagttctataaaataccaagtacagatgaactagaaaacaagcatatatccacaattaccagaattttcatagtattccttttagtagatatgccatgacagttacttagccaccccatgccatcctgttgggaatgccactacctttgaatttggagccatcagtctatctgaggcaaacctcagaaattacctgagccagaatcatgcacttagcactgagttcaactcagtcttaacgttgcattttgttgcatcacttttgcagccagtaaacattctgtttagaaatagttgctattgtggcatcattcacagttgcaatttttctcctgtgctgtcatatgcctgtgcgaagtgtattaaatgaatcaaatattagaaatttcaaggctgtctttagtgttctgcccacaatactccaccaatgaccttagaccttgagatggtgctataacgctgcttatattgcagttaaccatagagaggtggagccacttaaaatgggcctattaccaaaattctccctggcatcattacagttcttggggatacactgattttagaaattactgtcagtatcctcctaaaagaaggcttaaatagtttctaacaagatgactatcaggaagctatgtggcttggggagttgggaccctctgcctcatattctgggtaactggtataacatagtaattattaggattgtatcaagtgtatctaaagatcaaaagggaaaaaaggcacccttaattgtcaaagttagttctaggaaaaaatactagcagggatgacaaactacgttcactttacagttaccataaattcttacttgggcccacccatttccatctgttaaggtccataaggttactcaagtttcagtggcttcattgttacaagaaaggggggaagtgagaaactttaataggctgtgatttagaaccactgctgattaacctttggccagtatgggtcagggaaggtgaacatgaaacactgcacagtaggttgtatcaatgctataaaactcaacctggagacaaaatttaaacaggttataaaccatgggactccattgagggtggctgtatcagtcacccaaaaagtgacagcaggggaacaaactgcagcttgcctctagtgggaatacccttgaacctcgacctccagggggacagcagcatagtcttggggaagggctaccaacacaaagggacctaaccatgtatagggaaatgctgtttcctccattttaatccaattgtatcatgacctgtttctctcatcttaaatatctgtttcagcctctcacttgaaccaccaagaccatttaaccaacagtactgtttttaagcccaagatgacaactgccaaccatagaacatgggaataggttttattttcatctcaagaacatttaagttgggtgaagaaattcagcttttgttgttagaatctgacaggcttcaaacacttgtgatggaggggttgttgtcatatcaaagtccacctagtaaagttttaggtgaccagtgactttgtcaattaggtctgctggtcctggcccaatccctaggacagtttgagagcctggtgcaatctgagtacgtccagcatcttgaattaaacttacagtcagtcccagcatttttgcatgggccaataatgcaatcagggtttcttcatcaggagctttgaccaccaccttgggctggccacagtattcccattgtttgagcatttcaggatttcttctttgaatctgcttgtaggctgaaacagcagcatgagagcactgggcagccactttcccttttcccatctttaagtcatttcgaaccacaagaatcatcttgtactccccgctgtctcccaagatgcttgcttcactttcagtatctgtgtgtgtcttgctcgtcttgcttttggggagcatcccaaagcatactcgaaggctccagcccaggcacatgccacaagcaactccaacagccaagccgagtgtactgggatgagccaaatattccataaccaaggatttggagggcatcttaaaggaaaggaaaacagttatcactatccggcagtaacaacttacagaggtataggcttatcagagaaacattttgactatacacttaatggtcatccagaaaaaaggcaaaacacacctttgatcttatgcctgcaccctgtttccaacaccctcttgcccaccaccagtgtactagaaaagattcaagcatccacatgaaacagtttaggtcattttgaatcttgatgtaaacgaagttgcataaagttcaaaaactctattcctcagtcttcccttagtcttgtggagatgttccgttttaccaagatgcctaagatttaaagaaaccaaaaataaccctttcctggaatacagtgctaatcggtgttttcacaatgcagtggttctcagtggagatggtatcaaatcagttaccctcagaagaacctcactgtcacattaatgggcctggagtgaggtgcactactgaaatttactaagcctgagcaaggatgctaaaaaccttacaaaatgaagagttgtcccattggacgtgagtgcagctgaaaaacttaataactgagatgagaactcaacatcattttacttaagaacacaaaatattttttgcatagttttactatgtacaggtgctcctcaattttccatggggttatatcccaattaacccaattaattgaaaatactgtaagccaaaaatgcatttaatacacctacagaatatcatgacttagcctagcctaccttaaatgtgctcagaacacttacattagcctacagttggacaaaaatcatctaacacgaggctcttttataatagtgttgaatatctcctgtaatttattgaatactgtaagtggaaaacaatggttgtatgggtactcaccattaatttacacagctgaaagcacagtggtcctgaaaaatgtttgaagcactgaaatagaattaattgctggatgatggggatgcaacagggtcctcaatttctctctcttctgatgaacatcgagaataggtggtagaaggcattgggacatcaacactagttgatggtttagcaagcatagtgttgttcttcaggaagataccaagttttgaccgtacagcttgtttcttcttttcactatatatttctctgtagcaagcaagagcatcctgtatctgcgcctgtcaactgtggcgaatctctcgtaattgacgtccatttcttctaacgtgtaggccactgctgatagcagcaaatgcctctgccagtttctttgctgtgaactttctaggtgccgtgggtgtaacttcttccactgcctcaacgcctttacctctttcttcctccagtgcaatcagctccttattgcaaagatctttagccataattatcctatgcagctgttccttaaaagctatggcaccttcattaccagcacgtgctgcctcaccagtgatctttacattgtgaaaattatgacgccttttgaagcgctggaaccatccatgacttgctttaaacatttgtgtatatgtaggatcactggcacggtcttttagcatattaaaaagacttcttgccttagcctggatcatcagtaggctaagtggtatacgcttctgtatctggtcttccatccacataacaagtaatttttccatatcatcaattggtccagcccttttctttgtgatgacagtggatttaactgatgctgacgatttcgctgcatcactgatttgcttcttatcccttaagatggttgaaatcgtggattgccaaagtcctaactcacgtgcaatggccattactggcttgccaccttcatgctgggcaattatcttgagtttcatttcaagagtaattgccttcctcttcttcatctcaccagaaacaggagacactgatggacattttgtagacatgatggaatgtgaaaacacaaaacacaatatccaaaaaagctgacaacacagtacacggtagaggatgggttgttgattcccgtgatcacatgggtgactgggagctgtggctcgctgccgctgcccagcatcacaagagtgtactgtaccacattatcactaggccaggaaaagatcaaaatgcaaaactcgaagtacagtttctactgaatgggtgtctctttcacaccatcctaaagttgaaaaatcctaagtcggagactgtccatactgaattttccagaagtgtagctatcataaaacaaaggaatgtcatcctttattattttagaaaatcttgctacttcggcaaagctgttcataatatttgagtcaccaataagacacttatatcagtctacaaatgaggctgctggattcacagtgcttctatgtggcaagcaactatcagtttctttttctagtggagtattatctaagcatttataaacatggggccactatatttgtaatgcactgtatttgtaatgtaaagtggtgcccttggaattgtgcactgcatgattggcacggcatagatgacagccctggaagtacttataaatttcctttatgttcttctttaaagttagggcattatattaacattctttccactaattttaacataaaaggggttactgtctttggtggggcagaaattcgtttgaggtggggtcaagagatagagcaaaaagaaaaagcaatggatataaggcgacacagaggaaagcaattttttttttctcctaagaagaaaggataagcatatttaaatgttaataggatgaagccagaagaaaggcaggtaaatgctcaagatagagaaagactttataaagggatgtggttttggaaaggaaaagggacacctttcccaatttcagttttaaatcaagtaggtccacggatttgaaggcaggaaagtattccccctgagggaaggagctcagacagaagttaaaatggagtagagaagagaaaggcggaaataaaaggtgtggcaaaatatggcaggattgcagaggaatattgaaagcatggttaagattaatgatgactttttaatggcaacatactatttgtgattttctccagtagtacttagaagccaaaagactaaaactactaatcacttcctccagacatacaaactaacctccatccacactcatcctttgctctcccctcctactgaaatggtagttggatgtatccaagtttaaattatgccaggagcacgccccaagacacagtggtacaagggaatttaggataagggtaagaatgtttgacatgatagaccatgcaacctgtgttattacatttttctcttttggcctacctgataaaaagcaacctgtattatcaaagactgatttatggacaataaagtgatgcatgctatttatctagacatgctgttgaagaacaggtgtaatgaaagtaaactggaaagacttagagcgatgcatagggttttgattttggagacgaacaattacaaagaacatagctataggaatgggtatctgaaatagaagtgtgactactttctactttttcaattcttttagttttatgatatactgcttcccttccacaaatactgattgaccctgttctagaatctaagggatacaggagtgcacaaagcagaaaaagtcctttctctaatgaagcttacattttagcaatggttttgaaatggtccaatcctaattttgaatttctttcatgctgttttaaaactttggggtttttttgtttgtttgtttgtctatttgagatggagtctcgctctgtcgcccaggctagcatgcagtggcgcgatctcagctcactgccagctccgcctcccgggttcatgccattctcctgcctcagcctccctacaggcacccaccatcacacccggctaattttttttttttttttttgtatttttagtagagacagggtttcaccgtgttagccaggatggtctcaatctcctgacctcgtgatccgcccacctcggcctcccaaagtgctgggattacaggtgtgagccactgtgctcggccaaaactttgtctttatagctcaaaatttccacaatactttgacatgtattgttatttgatccactgagaagtgaggattactgccatatcaaaaatgaagaaattcagaccaagagaagttaagttcaataaaacaaatgtttactggctatctatgtgccagccatacaccctgttaagctgaggatatagtgatgaatatgggccactgtcagctgttcatagataagtagtgaagacaaataattgcaagactggtaaatgttataaaaaggtgtttgacagtcccatcgggggtgagatgggaggcagtaacagatcatcagacattagattctcataagaagtacacaacacagatccctcgcatg

SEQ ID NO: 96798 - DNA, 114956 bp, Homo sapiens
  misc_feature (1)...(114956): n = A,T,C or G
ccaagaagaaaaaggggtgtgtgtcgcacatgtccataatactgttgagtttttttttttttttttaatagagatgaggtctcactatgttgcccaggctggtctcaaacttctgggctcaagggatcctgccaccttggcctcccaaagtgctgggattacaggtgtgagccaccatgcctggcccatactcagtttaagaaggcaagaaatagccaggtgcagtgggttatgcctgtaagcccagcactttgggaggctgaggagggctgactgcctaaggtcaggagttcgagaccagcctggccaacatggtgaaaccctgtctctactaaaaatacaaaaattagccgggtgtggtggcgggcacctgtaatcccagtcacgcgggaggctgaggcaggagaattgcttgaacctgggaggcagaggttgtagtgagccaagatggtgccactgcactctagcctgggtgacagggcgagactctgtctcagaaaaaaaaaaaaaaagggcaagaaatgtgtacattcagagagactatcattaatgatgacaaaaatttaaaagtttggcatttacaggcataatctgtcaacagttagaaaaatctgttgttgtccaatgatccagatagagaggtaacatgcattttaaaatcatctgcccttattaaatagacattcatatgattcgttattaatatcttccattggccagcttgttcttttgtatcacacttcaccaaataaaccaaaaatttatcccgaattgctttctacctatagccatcaactgattgcctttttttttttttttttttgagatgggagtcttgctctgtcacccaggctggagtgcagtggtgcaatctcagctcactgcaacctccgcctcctaggttcaagcaattctcctgcctcagcctcccaagtagctgtgattacaggcatgccaccatgcctggctaatttttgtattttttcagttgagacagggtttcaccacattggtcaggctggtctccaactcctgaccttgagatccacccacctcagcctcccaaagtgctgggattacaggcgtgagccaccatgcctggccaactgattacttttaaaggcagctgtctttactggcaaaagcgttgcccactgtgggccacacagggcctcactactgacccccatcaggagagcagggatattcagtggcagctttggtggctgtgatgagtttgtcaaaagacaccagcctctcccttcacgcaggtgctggatcccactgcggagggtggtgtgtcctgctgcatctgcaggaacaggcccaaggaccccaccccattttgccctctaaccagagtccctttgccctgacttaccaatggctttcttcagtgtctcataggtgatctcctcggcaggcactcgctgaaggagaagggacagagatgctcagaaaggcagggggcagagaaaggaggcagccctggcacccccagctctctggcagccccttgcttgttggaagaaagtcccagtgggcaggaagtccctcaggacacccccacccccctcagggtctcagaagctccctgagcaggcacagaggacagcgagatgcagcggggaagctcattcctcatcagattcagacttagacagagtcctgaatctcacataaaagaacacactgtcccctgctccctccccaagcctgtccatcaagcaccatgggaggaaaacactgcaattttatttcatgttattttattttgagacagagtcttactctgtcgcccaggctggagtgtagtggcatgatcttggctcactgcaacctctgcctcctgggttcaagtgattcttctgcctcagcctcccaagtagctgggattataggcgtgcaccaccatgcctggctaatttttatatttttagtagagacgggtttcaccatgttggtcaggctggtcccgaactcctgaactcatgatctgcccgcctcggcctcccaaagtgctgggattataggtgtgagccactgtgcccagccaatactgcaattttaaaacatcttcagagaacacaacagaaaacattggaagcaagggaagagaggtggtgaatagaatctcagatgtaaatttcaggaactgaatatcagttctgaagtctttgttttttttttttttttttttttgagacggagtnnnnnnnnnnnnnnnnnnnnnnnnnnnnnnnnnnnnnnnnnnnnnnnnnnnnnnnnnnnnnnnnnnnnnnnnnnnnnnnnnnnnnnnnnnnnnnnnnnnnnnnnnnnnnnnnnnnnnnnnnnnnnnnnnnnnnnnnnnnnnnnnnnnnnnnnnnnnnnnnnnnnnnnnnnnnnnnnnnnnnnnnnnnnnnnnnnnnnnnnnnnnnnnnnnnnnnnnnnnnnnnnnnnnnnnnnnnnnnnnnnnnnnnnnnnnnnnnnnnncgtcgtacccccaccaatgcgacttgagcatttaataaagataagaaatggaaggttataagtgacagcccggatgcggtggctcatgcttggaatcccagcactttgggaggctgaggcgggcggatcacttgaggtcaggagttcgagaccggcctggtcaacgtggtgaaaccccatctctactaaaaatgcaaaaactagccaggcatggtggcgcgtgccggtaatcccagctacttggggagtctgaggcaagagaattgcttgaaaccgggaggtggagattgcagtgagccaagatcacaccactgcactccagcctgggcgacagagggagactctgttttttttttttttaaaaaaagaagtgaccggccctccccggctgctgaggttccaaggagttaccccactcagtcctctgcagagcctataaaaggaagtagaaaataataaaactcaaagaagggagatccatagatgctgaaaataatgaaggaatttggactaaattccagaacttactcactagacaaagagctattagacctacgatttactcatgctcttctttttttttttttttttttttgagatggagtttcgctctcatcacccaggctagagtactatggtatgatctcagctcactacaacctccacctcctggttggtttccagtgattctcctgcctcagcctccccagtagctgagttacaggtggccgccaccatgcccggctaattttttgtagttttagtaaagacggggtttcaccatgttgatcaggctggtcttgaactcctaacctcaggtgatccacctgccttggcctcccaaagtgctgagattacaggcatgagccaccacgcccagcctcatgctctatcatttaaacataatcttaagcaaaagcagcagacacagaacagaatgatttcattgatataaagttccagaagtaacgcaactcaggctgggagctcccttaggggagggggcacagaggcagggcccctggatgatgacagtgttccactctctcatccaggcgtggttgcgtgggcatacacactttatgaaaattcactgagtcgtgcattttttgatttgtttggcatttttgtttgagtaggagaggacagaagtatatgtatgagataaagtcatttaacaaacattaagtgagcaccaactacatgcaggactgtaggtgagtctatagaaactgcacaatttgctagcataggaattacatgcaagagagagctatgctcggctttaactcgctctgaggacttatcctctgtacgtccatccattcatccactgtcagcaccgagcaacattggatattcacctgcagggtgctagggaactgtgtggtggcaacagtcaaagaaaatgccgctctctgggcaagagagaagggatgctccctgggcaagagcagggagagagaagtttatgaggaaactgaacaggggccgggcgctggagaacagacagttcacaggcgctcagctgcaccagtgtggagggaagggtggttcagatgtggcattctgcactagcaaaggcctggagatggcggagcgcagcgtgggagagatcgagagcagccccaccagagtgggacagtggatacgggccagagcaggtggggaaaaatgaaatggcagagcccagactatgcatggctgggaatgccaggcaccaggattcagatttgaccaaacaagcatttattcacccctgcggcaaggctgggcagtacggccctaggaaccaccgtgggactctggactggcactgatggctgagagtggagagagttgtggcatggcagaagggcacaggatgaaggcccctgcacccctgctttgccaccaagctacctctgggctaagctgactcttgaagggaggaaggaactgatactggtggcccaggaggccactagtgaggaggtggctctgtagctgtgtaagcatttcgccttgcgcttctgagtcacttcactcctcaattcccgagggtctcttacctcttgggaagggagaatcgccactatggggagagagcagccaactcaccccgatgcctaacgcattggcggttcccagtccttggagctggaagggccatggaggatgcctcgttcaacctcattttacttgtccaattagcccaagtcagagcttccttccgtgggaaggttctggataagctttgagggccctggggtagagatctgccccaataaatgaagtggtcgagggcacagttagggggaggcttgatcctgacccctagagacttctcctacctctgattgcatctggggaaaggcttgatgtcaaagctgtcctccatgtctatatcagccctaatgggcagagaggctggggaatgccagcctgtccatgcctgaggaccatgtaagtctttctgtcccggtcccacccagatgtgtgtcctccgtacttcttgtgaactgtaacagtcagcattaaaaaaaaaaaaaaaaaaaacatcttggctgtcagtggttaggggagagatgaagaggtggagcacagggggttttagggcaggaaatgactctgtatggtactctggtgggggatgcatgtcattacgcatttgtccaaacccacagaatgtacaacgctgagggcgaaccccagtgtaaacgacagacttcagatgatactgttgtgttaaggcaggttgaactgtaagaaatgcaccactctgctgggggatatggataggaggggaggctgtgcatgtgtcaggggaggggagggggcaaagggcgatctctgtaccttcctctcaattttgctgtaactaaaattgctttaaaaatagtgtaaatttaaaaaaagattctttattgatacatacggaagcaacactatgaaagctgttctcacccttatctctccagttaagtcttctagtttccaacccagagcatatcggtccccctgtgagtggggaatgatgaccagcatgcctttctttttaattttttgagacgaggtctcactctgtcacctaggctgaagtgccgtgctgccatcatggcttacagcagccttgacctcccaggctcaggtgattctcccacctcagcatcctgagtacctgggaccacaggtgcacgtcaccatgcctggctgatttttcaattattttttgtagagatggggtctccttatattgccccagatcatctcaaactcctgggctcaagcagtcctcctgcctcagcctccaaaatgttgggatcacaggtgtgagccaccatccccagccaggcctttcaagagtgagttttatgatatcctcatgggagcagggaggaccctaacaatttttccgaagggaagtatctatgacgcatacgtggggagagtcagtacaagtgtggaattactcgagaaacttgctttccatgcagccttaagcccactatgcaggcaggggagcctggagtccagcgtccaatctacaggaggtggggctgccccaggacggtggcacggacactcacctcctccttctccggactgttcctcgattctacctccacctgcagggagatggtctctccaatgctcctcctcttggataaacgatcctcatctggggaagaagcagcccagaggctttagttcccagccctcagagatccaggactgagctgctagtcccacctccctacccctctgcctttgcttggtccacagtcctctaaggctcagtgcacactcaggctacacttggagtttatagaagcttccgattgctgtgggccttctctgtccatcttagggtggtcagttttgttctttggggctaaaattttgaaatcgtcaacragaacacaaagaaggtgcttatgaccagaatacatatctcaccttatgtgtaagcatgatctgctaagagcaccagtagctcttcatgaagcatttactaagtgcatttgcattaatacaggtaccttatcatgccagccctctaaggcagctattgtttttgtttttttgttttttttttagacggagtcttgctctgtcgcccaggctggagtgcaatggcgcgatcttggctcactgcaatctttgcctcccgggttcaagcaattctcctgtttcagcctccagagtagctggactacaggcacccaccaccacatgcagctaatcttttgtatttttagtagagayggggtttcaccgtgttgcctaggctggtcttgaacccttgagcttaggcaatccatccgcctcagcctcccaaagtgctgggattacaggtgtgaacctctgcacccagcaggcagctattgttaaattcctgttttacagtcaaggaaactgaaattcagggatgcaaaggacttgtctaagatctttcaggcagtaagttgcacaggggtctcaaactgggtctctggttccatagccatatatgctctttccagcacaatggaacctctcccatcctcaggccaggccatctcatgggccaggtacttccaaggaccctgtcctgaggaggagaggtggggcaatcaagaggacctcaccataaatttccactgtgtctttcagctctcacgacatccaaggtgcctcacaggcaatcaaagggctataagtcccttatgctcaggcccttacctggccaagtaaagacagaggcaggcccgggcatccctgcacagaactcatacctgtcagctgaggaatgtagggcaggcagagccggtccgagttgtagccactgcctcccaggacttcactgatcttgctctggcrgaagaggagctcaatgaccaccccatcaagattctgagacagcctggaagatgaaggagggagaaagttcgttagaaccgcggtatctagaatgacttctgaacaatttttttttttaagacagggttttgctcttgtcgcccaggctggagtgtggtggtgcgatctcggctcattgcaacctccgccttccaggttcaagcgattctcctgcctcagcctcccgagtagctgggattaaaggcacctgccaccacgccaggctaattttttgtatttttagtagagacggagtttcatcatgttggccaggctggtcttgaactcctgacctcgggtgatccacccgcctcagcctcccaaaatgctgggattacaggcgtgagccaccatgcccggccaacttttcttattaaaaaagtaacatcttcactatgcaagatgacagagaagcaaaaggaacagtcacccccagtcccatttccagagataaccactattcattttataatatattcttatgtacaacaatcacatccttcagtcacttttttttttctttgagatggagtctcgctctgtcacccagaccggagtgcagtggcaccatctctgctcaccgcaagctccacctcccaggttcacaccattctcctacctcagcctccaagcctggctaattttttgtatttttagtagagacggggtttcaccatgttagccaggatggtctcgatcttctgacctcgtgacccgcccgcctcggcctcccaaagtgctgggattacaggcatgagccgccatgcccagcctttttttttttttttttttttaaagacagggtcctcactgtgtttcccaggctggagtgcagtggctattcacaggcaccatcatagcacactacagccttgacctgccaggctaaagtgatcttcctgctctgcctcccaacaggtacgctccaccatacctggctaattttwtttatttatttattattattattatttcttagaccaagtctctccctgttgcccaggctggagtgcagtgacatgatctcagctcactgcaacctctgcctcccaggttcaagggattctcctgcctcagcctcccaagtagctgggattacaggcgcacgccaccacacctggctaatttttgtatttttagtagagacagggttttactgtgttggccaggctagtctccaactcctgatctcaagtgatctgcccgcctcaaccacccaaagtgctagtgctgggattacataggcataagccactgtgaccggcctaattttttttttttttttttagacagagtcttgctctgttgcccaggctggagtgcagtggcatgatctcggctcactgcaacctttgcctcctggattcaagcagattctcctgcctcagcctcccgagtagagtagctgggactacaggtgtgcgccaccatacctggctaatttttgtatttttagtagagatggggtttcaccatgttggccaggatggtctcgaacttctgacctcaagtgatccgcccaccttagcctcccaaagtgctgggattacaggcgtgagtcactgtgcccagcccgggcaaaatttttaaacattttttgtagagatgggttcttgctttgcggcccatggttgtctcgaactcatgggctcaagagatcctcctgctcagtcttctgagtcgctgggcctgcaggcgtgagccaccgcacccagcttagtyccgtatttttaaatatacacagatatccccttccccacccgctgttctgtgatctattttattgacctatttatgtaatgggtattttacattaaatattcttctaaaacattgtcatgattgtctactgtatggatgggccataatttataaagccatcccctactgttagacattttggttttgcaaaacatctttcccttgagttcctctgatgttgaaatgacactggcccacagcacccactatgatccgaaaacattacttggatttacagtaatgtcttgtcaggaatgactcctccaggatgcatttagcatgggcttggccaaagcccccggaggctgtgtctcatctgcaaacatggctcagcattgcatgctcgaggcatggactgcagtaatgtgatggggttgaactttacccaggactcctggaccacaggcagagcccaccttctgcccttgagtccacagaagtctgagcctcctggcattgacccctcctgacctcagaccacccacctgcttactcagctgccctggggatccctgaccacgtcccccgtcctctcctcacctgggcctctccacaaacacatcctcggggagcatgtatggagcctctttcttcctggtctctatcacctggcggttgggaggaatcagataagagctggttcagcagggagagggagctcacaggcaacgaaagagctcccatgcccggctcggtgcttcctccctcccacagcctcctcagcacagtgtcctcagctgagcttttcagtggaaactcgcatcaacagggaccctcagggcagcctgagaagctcaagctgcctgctcaggccatggccatcaatgacacatgtgcactaagtgtcctccaatgcagggaacttaactcttaagagactgcagctgctggctccaatgcctcattcctatgcttttttttttttttttttttgagacggagtctcgctgtcttgtccaggctagagtgcaatggcacaatcttggctcacagcagcctccacctcccagtttcaagcaattctcctgcctcagcctcccgagtaactgagactgcaggtgcatgccaccacgcctggcaaatttttatatttttagtagagatgaggtttcaccatgttggccaggctgatctcaaactcctgaccccaagtgatccacctgccttggcctcccaaagtgctgggattaaggctgagccgctgcacctggcctcattcctgtgttttttatttaaacaggtacaaaggaatgtagttcacaccttgtcccaaacctgggtactgcagtacccaagtgcattgcaaaacaccctgatggacagtgacatcttgagctttactcagtactctttgcaaatttttgacaagaaaagtgaaagttactaaggtggtaagaagtggagggatggtcaacatacaggtgtgtgtcgagggtgaggaggtaaaggtcccacaattgtcaggcagaggatgtctgggcattgcctttcttatactcccttatcagcccagaagctggaagactcctgcttccctttgagtggtctctgtcacagtcacggcaccctcccctgtgactcccagccaacccaggctagttaagacctaaattttcttgttttgttttattttgttttgctaatgtatttcattttattttatttttgagacagagtcttgctctgtcacccaggctggggtgcagtggtgcaatcttggctcaactccatctcccaggttcaagcgattctcctgcctcagcttcctgagtagctgggactacaggtgtgcgccaccatgcccagctaatttttgtatttttagtagagacgggggttcaccatgttgcccaggctggtctcgaactcctgatctcaagtgatccaccagcctcggcctcccaaagtgctgggattacaggcttgagccactgcgcctggcttgctaatgtattttaaagttaatcctacatgttggtatcattcaacctctaagcacttccatgtgttttaaaagatctttatgcaacaactgagaacacatttgactatagaatgggtgtcagataacaccaaggaattactgatcacttaatgagctgtgttaagagcatggcagtcatgtagggaggtgttcatgctgtttcaggcatgcagacggatatacatagagtgaaaggacaggatagctgggatttgttttaaaatatttgtttaaagtatttaaaatttgttcagcaaaggaaaagaaaaggagacagatgaagcaaatggggagaaattttcataactgttcatttcatatgagtgggcgtgaacagatgttcrttcaccattctactcgggccacctttgcggtatttgatagctttagtctgcatgatctgaggtcacttttgcggtatttcatagctgtagtctgcatgatctgaggtcacttttgcggtatttcatagctgtagtctgcatgatctgaggcatgtgtgcgggtgtgctcccgtgagtaggggaaagacagaggggcaggaagtggagggggcagacagtattagaaacaggtatagaagaccccccccaacccctgtgcctaaccccaccctgctttgtcaagtcatacaggagggaaagatgccacgagtaacttctcaycattagtggttcttacttcaaccctgtcttcactgcctaagtgtaggtacaggactaatgcaattaaggaaaagctgttcccaggaaaccccaagttgagggccccctgagctcttggtcgtgagaacaccaacctcatggatgtgctggcagaaggcaggcactgttgtgagctgactgatgaggttcaggtaggctgcgcccagagcatagagggcacagcggttgtagacaggcaagttctcctcattgacttgggccacgtcctgcggcaacatagacaaggcctccggagtttttcactgacagactacactgggtgccaacgctccacccgacctcttcccaatcttctttagaaatgcttgctttcctagactaagtctttctcagcatttgacccaaaccttcctgggggaaaaaagtcaccttcattaaagctgaagggaggggtccctagaacagtccgtgaactgggaggctcttgagtactcacagactacagaggcaatgacctcaactccccactctgcagttccagctgtggcgaccttcactgcccaaaccctggtcgttaatcccactgccagggtgctgtctccttcactatagcggattcttagaggactggattggcttgctaaactgggctcatatgttaagctaaattagctgtgggagttaccaggggattgggatataaaggaaccccaagttctagttcttgagggtaaacagaatttaaaaattatagcatctaggctggccctgcaggatttagcaccaacagacaggtggtctgagactgtcactgaattcccaggcttgccccgattcaggaatatgatgccctcctggcttcaggaccctggagacccagcctttgaggtccaaaggacccaccctgactcccagtagccttgggtgtacacacgcacccaggaagaccatgaaagcctcaagccctgtccggtgccacactggctgcctgcgcatcgcaaaggaggcttggtagacaggtccccaggcttccagactctgacttaccttcccaggaaatagacactttaaacaagtgctcaaagcaattctgaagcacagctccatttgggaactagagaatctttttttaatttttaattttttaaatttttagatggagtcttgctctgttgcccaggctggcatgcagtggtgaaatctctgctcactgcaacctccacctccctggttcaagtgattctcctgcctcagtctcccaagtagctgggactacacgcatgcaccaccacgtccggctaatttttgtatttttagtggagacggggtttcaccatgttggccaggctggtcttgaactcctgacctcaagtggtccacccacctcggcctcccaaagtgctgggattacaggcatgagccaccacgcccggccaagggaaccagagaatctttagacaaatgagtttgtctgggatcactcagggcttatgagcatccttttaagaatccctggagtctcactcagactctgcgagagacttgacatgtagtagctaagggatgtttctgaacgacccggttccctgggtcttctttagcttaaggacgggccaagaccatgaatgaagcattctttggggttccccaaacaggaccatggtttggggtcttcagggaggcgtggccaaccacgagtacaatattcctgggctccaaaacagtgttaagcagttgctagtcaatactcttatcrgggcttgcccaaaacaagtccctcccctgatcccaagccccatgccctgcgcacaccaggccccacctgaacagccagcaccagacggatgaggtccaccaccacctcctcgttagccagctcratgctgatgagggccagcaagccatagagcgcctcgtagtgtttctgcacgtttgtttcctccttgcagctcaggtagatgtgtctgtagagctgctgggagtgctggggacaggagygggcagaagrccagggtcggagggatggggacaggaggggcaaggagaacacggaggaagaccaatctgaaggggggcaggatggctgtgtgccccctcctcccttggggaggggatgcctttaaagcgggctctggcagaagcagacacacacaggaaggctcacgtagggaaggatgggctccagtgaaaccagcaccagaagctgctgcccaaatccaggtgtaggagcagaacacagtcactggccctggactggctcatcactctgggcttgactcctcagagaggtcagcttaacacatagccacagagggaggagacgtagctacagagagaggagacagagctacagagggaggagacatagctacagagggaggaggcaggctccaagggcagtcagtggtcagcagtgacttttgctctgtcacccaggctgaagtacattggcacaatctcggttcactgcaacctccaccttctgggttcaagcgattctcctgcctcagcctcccgagtagctgggattgcaggtgcccaccaccatgcccggttaatttttgtagmtttagtaaagatgggattttaccatgttggtctggctggtctcgagctccccrcctcaagtgatctatccgcccgcctcascctcccaaagtgctgggattgcaggcgtgagccaccgtgcccgcccttcactgtgcctggaggtcatgcttgtttaccttcttcatgaagacggtgtcctgtcgagagcacttgtccactttyagcttcaggacagagatgtcactgagggtactgggaagggatgcaaagggcctccttagcccttgcatgaggccagcctgagctcacacggggtcactgagctttatccccaacattgttagttggtacaaagcctccagtgctcccctggccctggttctcagcccgattaccttttcctcccaagttctcaagaatttgtccctttatctctctctcttttttcctttttgagacagggtcttattctgtcacctaggctggagtgtagttgttccataatcacagctctctgcagccttaacctccagggctcaagcaatcctcccaactcagcctcccaaagagctgggaccacaggtgtgagccaccacactcggctaatttttaaattttcttgtagagatgggggtctcactatgttgccctggctggtcttgaactcttgggcttaagtgatcatcccaccttggcctctcaaagtgtgagattacaggcacgagccaccgccctgaccccctttctcttaaatcttcatcctgattattttcttcctcctcttattccccccaaatcccttcagtctctactgataacctgcatccccttccttctcacacttgcaactccctttaatgcctactctctatcttccaaatcttcagttcaccctcctgctctcccagacacaagtgccctttagtctctccttctcttgcaggaccccagggtcaacgttggtgatcaactcctggtgagtctcactgagtatctgaattgtgggatactcagatcccacaatactcagatactgaggtgggaacctgggtgtgaggacaggaccaaaggataggacctaatggagagtcctctccccatcttgcattgcctggaggagacaccccaagttcacctgatggtagagaacttgtggcggttgccatgacgatcaatgaaactgatgagaatctctagaacaaagagtcgaatttctgcatcctccatgagggcggtggagagaaggcggtccaggaagttgctaggcagggctgacatcatgttgttgcactggaaacctgtggatacctgcaagggaggtatggacagctatgcctaggaatgctgtccctctcaggtgcaggaggagatggaggagcagccagaggaagtcaggtctgatgtacacatcckctctagacatcgcccaatccagcctcccctaccctacagcccaggcaactctttgaacactccaacatccacctagatgacaccgagctcagtagacatgtgaatggatggggacagcgtgcagggacattcgggtgttaaaaagcaagcaagggatgagccctggagggaagcgggagccaggcagtctctgaacctaacattccagccagttagggcacaactgatgaacagccaccaggaacacaatgcctcattaagagtatgaccatcacaaagaacgagacagtggaagaactcacagctgggctgaaggatcagaactcacacacacggcaaccaccaaatagtgcacataggtagtattttgtaacatgtctgttagcctggcaataatggcgctttgtgactaaagccagtttggcataaatagatatgccatacatgctgttgtcaaagcattcaaatgcagcaaagcacctttactgttaaatccatattgtaaaacaatgcttttgatgattcagaaggtccctaaggatgtaccccaaactgttatcttaagaaaatgctgggtacaaattaatgaggataaactcagcaaagaaatggcaggaatatggagaccaaggtgataactaaatgagggcagtgttggagcacaaagggtttataaaaatctagtgccatgaagagtgtggactggaggggagggaagggaaggtgtgaggtggcggcggggtsgggggagttctgtttagattggcatggccagaactgagacagagattgagagatgagacaggaggtctagggagggagaggggactggggacctcccaacttcagtctgagaagtttgaaatctggttgtacatgaattataaactgaggccgggcacagtggctcatgcctgtaatcccaacactttgggaggccgaggcaggtggatcacttgaggtcaggagttcaagaccagcctggccaacatggtgaaacaccgtctctactaaaaatacaaaaaaattagctaggcgtggtggtggcatgcgcctgtaatcccagctactcaagaatcacttgaacctgggaggcgaaggttgcagtgagccaagatcgcaccactgcactccagcctaagcaacaagagcgaaactccgtctcaaaaaaaaaaaaaaaaaatataaactgagacctactgtgaaataagaggcatctggtagagaacagcatttctagacaattactgttgtagctgagtttctgacaggtggggagaggtggttgtgagatgtcaggtttaggccaggggttgtgcttcagaatacctggggaacttgttacaaatacagattccaggacctcactcaggctaacagcttaaaacctctgaggaatcatatatttatcacaagactgtcatcggaatggtgtttgagagcaatggatctagactccagtgatggctgcaaagatgtaaagaagagttaaataaaacacagcatgggaaggatgggggctgggagactgaggtgggcacatgtgccaagaacacgtgctggcaaaacaggggacacagaggggaaaagggaaagagggggtaccaggagggaaccagggcgggaaccaacagattccgtctcaagacagatcacgtctgagtgacaacgctatcagtagccaataaggaacctttgtgaaaattagaaacaggttccccatttgctgtggctgacccagctctgtgggtgcccagcctggctagtgagtggaacgtaggctagatttcagccccgactcaaccgactgggtgtatttgtgcagtatgccacatgcacgactgtatgtggaggccttcacttggtcccttggaaggagctgtctcctgcagaggaagagcaggaatggggatagatggggctcacctgcaggagggattttagcagcataatctgggtcagacggttcctattctccctgtagaccagagacacaaacactcaccaggatggtaatagggcagaggtcacacacttgccagcttagttctaccccaattcgtttctccatgaggcttatcgtgttgggttacccaggacagtgacttccggacccaggaagccgaccaagagatgactggctccccccacgttgggaggtggttattggtggggcagcctgagaaactgtgggatccaagagccccattaaaggctgctgagggatttgggagtaaaaagagagcagagggcagagccaagaaaattaagagggataaaggagggggtcagaaaatgcagctgggggagaggaggactccmsgctgggggagattggtggctcacccsgtcctgcctgtgtccaccgcctggtgcagggatggccgcgggaccttgctcatgatgaagaggatcacctcggagcgctggtaggtgggcagcgtgctggcaaaggagcctgcaggaggtggcggagagggtgcccagtgaggcacaggctccagggcccctcctggttcagcctttcagctgcagagagcgagggctgcctctctccggagtcaatccaggaccagagaaagggattcaggatagcccgggtgtgattcggcctctccaggaaagggaggcatcaggtggttttggaggtctcttccaggctccgttttttcacttgttcctgaggctgtggttaaggtcttgactccttggctagggggtggggatggtgaatgctgggccctgggaccagggcggagcggggggtcggggggagcccgagttctcgttgggtgcttctttcactggctgccctagggtaaatcctcctcccacgaactaagagagaagaatggttctgcattcctaacctgcctactccaggctgaagggaagctcacatggctagggcaggcaggctgtgaaagaggctttatctaatctccgctcccaggagcacacacattttctccgcggctggcccccttcctcattcttttctcttagtccccatctctccctcctggaagccctaacctggaagcatcaggcaggtctgatggtgactgggactaaagaaggttcgcctgagacttcagatctgagacactcatctgactgcttgcgctgtcgctcaggccctgcccagccagtcctttcatttcccgacttcattctctccgaggtccgtgaatagcatgtgggtgctggacaatcctacaggggcccggttggatgcccttcgccccagtgcggtccctccctctccaacccccatccccgggccgcccccggtgccccgcccctttccagggtccctctttcctccccttggccccaccccgccctgcgcctcagtcttgagcccctgggccccgtcccgtccctcccctcccctccccactccgcgcctcggccccgccccgccccggcccggccccgcgccgcacccacggtcttgatgacggcctcctggaacatgcgctcctcgtgctccttgatgatcttggtgccgaggctgaccgccccgtcgtagctcccggtcagcgcgtagtcgatgctgagccgcagctgcctcagcagcgtgttgaacatctccagtactgtgggccctgagagcggtggggcgggacacccgagatccaaggctggcaccctcctcctctgtgcaccgcgcgcaggcagggcagggtcacgcccccttccagcctgggcttcctctgcgctcccaacttcctggcggacttctcccgaggaaaacggactccgacccctccctgttgtcccttgcctctctctgtaagaggcggcagcctccgcggggtccccggccctcaggccctagccatgccccttacccacagagccggtggcagcgatgaccgcggcttccgacaagacttccacgatgcccgcgcgcaccgtcgcagcgctgcggctgttggcgtccaggtggcccaggagctgctggatgaccaggtgtgagtgctgcggctgcgggaggaagatgagctgggcctggacagcaaccccacggggtccctgggctgcgcagccctctcctggcacccaaaggcgggggtaaactaaagggacgttccaaggccccgggcactgcagttggcactgacacctcgtgccctttactggatccttcccttctccctccaacaaagagccaaatcccagtggaggcctcagctgacagttttccagggcccttttacttcaaaattggtcaaaagaccattttaaaatagggtcttcctttcatttcttcaggtctttccggcaagagccacgggaggccacatggcttagtccagtgctgcctaaagtggggcccctgggctggtgcccattcaagataggtctgatattggtttacactgagataaggatgggatggaaagtcagtgtttagtaaacaatttgtcaatgctgtagcagccaagggtgtgatctgtaggcttgcattttgcatgagttttttatttaatttttctagaaattatttgttttaattgtattttataaaagtattggtctgtgatgtactggaaataaaatcagccggcccttctccacagctagcttaagcagcactggtttcggcaactgggggcttcggaggagtcacaggggacttctggctttctattttagcacccgtctagcttctagagaggcctttgtcctgggatccggctggcccaggggagccaccatacctgaattgagtacatgatgattttaaagcaacggatggcaaacaccttgggttcccaaagagaatggttatccagatggctgtgagggagaaaacgtgggggaacaactatgaaactcccggcagtgttagggagaagagattagcttggaggcagagggacaccttctcagagcccctcgcacagttcccgggtgaggaagtgaagcctgaagggccttrgggtagtcccagtccagtgctggagagaggccaaggacagcgctctgcagttgtggatgtgtgtggtgaagctgggcacctttgcttagcgttgggtgccttcctactggcagcagttggccaccctgtggcagcttttgctgtcacagtgcagggaacacaggcacagggaagggatcgactcggctgcggcaccacaactgtaatatccccttccccccagccagccaggagatgccagggacctgaaacacatccaggctgaaggctgrggccaaggcagtgggtgggggcactcacatgagaacaggcttgatggcgtttttgatgttgccaaaggcagcccggcccagcagctcccgaagacacctctcagccagctccgcggggctctctttctccttctcaggtgcttggaggggtgagggagaccggctggggagacagaggcacatgggtagagggtggcaygcaggctggggtcaggctctgtacaatcccggctttccgtgtttcatccacacaagacaagcaggaatttgacatgggttgcactaggcaataggggaggcgtcacagctgtcagaaattaaatgggggtaaagaagcccccactgggggaagtgggggaagaccggagaagaaaagataaagttctttttctggaaatccttaaagatttccagatgtaccactgtgggaaggatgctctgagccccatgggccaggtgaggtgtagaacatgtgtgtcttgatgcacctaagacttcagaaggaaaaggagatgggagatgaagataggaaagggaggcaaaaaacaaaacagaagtggaagaaaggagaggaaagagagggagggaaaaggaaaggcacagtggttggctcaggcaagagtcaatgatactcaagtcacagggagtgggcccacatctggacagaacaggagccggaggactcccagcccagagaccacagcagcttgtcagtgagatgctattccagaaacagccaccagatggcatacgaaccccaccccaccccacgccccaccccacgccccgcccccgcccccgcccccgcccccgcccccgtcgacccgagtctagctctagtagcctgggatcaaccgacctaactagcctagtgcacagatagcccaggtgggacagcaacgtgggcctttctccccattccatttcaccgaggggaaaaatgagggtgcagggacaggaatgaatcccatgcttaggggatccaggattaaaacccagtatctgcaagctcttactgagtggctgcgggctggtcaagcatgcacgttttcagggcctgaaatagcatcaggaagcaacagaggaaggaaggtccagatggaaagtccgcagtgatcggagccatgaaaggcatctttttttttttttttttttttttttttttttttttttttttgagacggagtctcgctccgtcgcccaggctgtaagtgcagcggcgcgatctcggctcactgcaagttctgcctcccgggctcccgttctcctgcctcagcctcccgagtagctgggactacaggcgcccgccaccacgctcagctaatttttttgcatttttttttagtagaracgcggtttcatcgtgttagccaggatggtctcgatctcctgacctcgtgatctgcccgcctcagcctcccaaagtgctgggattacaggcgtgagccaccgcgcccggcccacaaaaggcatyttaaagcctccttggccctgcttccagggagacaaaggtaaccagactcttggttctgtgtgttattaccaacagatttacccaccagggagcccagcaccaacactgtcctccttcggtaacgcacatgttaagggacactgtgggctggcacaaagtcagacccatggcttctagggagccagctttggactcactgcagaacaagccacaaagccatgtccctggccttgtagctgagttttactgaccaacccaaaccatgtggttcccaagcagcccttggagggttgattatatctactgtcctgccccatcccggcctgcttacctctctgcctcctctacatgctgtagattgaaaagcagtgatggaacgatcttatccatgtgctgtgggtcccagatattggcctgcagttcatcattcaccgtcttcctcaccaccccttgcaggcctttgatgcctgacattcgaattctgtaaggaaaagggtgaagtgggactcggaagtcctctagccctgagaagtccagcttcggtggctaagagaagagcacagcttaggagtcagggatacatttgtccatcagaaggcagaatggagaccagctgctactctcatgagacctcctggtgctggcagacatgagcccaggaagccatgtctttttaatcatcttggagactcccaggctgcccttgccctggtaccatctgggctccagccctagggtgctggatgctccagctccccatctttagtacttagctggggttgttccagcttgggcccaagatgtaagagctcaaaacgctgccaagaactgatgaagcagaatccgaggctgtgagcaacttgcgggggcagggggaggcggatccagagggagaggcacagagctgcaggctctctgggcacaaaggggtgtcggcttggagctagggttaaccagaggggaaactgagtaacagcacagcaggagccccttttgtacacccccagtccctgctatgtgaacccagggtcagcacagctctgtgggagggagccctctttactagccatttatttcagactgaagtttctttctttcttttttataaaaccttttttctggttataaaataatacatactaatcatagaaaagtatagagaagagaagatttaccactaccaccaccactaccactgttatctttgttatcaaacataactgttattggcattttgatgtaattcctttcttctgtgcataatatataacagaattaagaacctattgcatattttatttgtattggcttttttcacatacattctatgcattttcctatgtcattaactcttcataaacatgttgaatggttgcctgatagactatcataagacctttctaaactagtgactattagtcatttaagttgtttccaaatgttttgctttttttttttttttttttttttttgaggtggagtctggctctgtcgcccaggctggagtgcaatggtgcgatcttggcttactgcaacctctgcctcccgggttcaagcaattcttctgcctcggcctcctgagtagctgggattacaggcatgtgccactatgcccggctaatttttgtatttttagtagagacagggtttcaccgtgttggtcaggctggtcttgaactcctgacctcatgatctacccgcctcagcctcccaaaatgctgggattacaggtgtgagccaccgtgcctggccaaacgtttcacttttataataatgctatgatgggcatcattgtatgaaatattttactatgtttcaagtcattgccatgagtggaatcaatgagtcaaaaggtaagaaataaaaggcagccagacacagtggctcacacctgtaaccccagcactttgggaggcaaggccagtatatagcttgagctcaggagttcgagaccagcctgggcaacatggcaaaatctcatctctacaaaaaattaaaacattaggccgggcgcggtgactcacgcctgtaatcccagcactttgggaggccgaggtgggtggatcacctgaggtcaggagtttgagaacagcctggtcaacatggtgaaaccccgtctctactaacaatacaaaaattagccaggcatggtagcaggcacctgtaatcccagctactcgggaggttgaggtgaaagaattgcttgaacccaggaggtggaggttacagtaagcggagatcatgccactgcactcctgcctaggcgaaagagtaagaccctgtctcaaaaaaaaaaaaaagaaagaaattagccaggtatggtggtgcgcacctgtagtcacagatactcaggaggctggggtggaagtactgattgagcctgggaggcaaaggttgcagtgagctgagatcatgtgagatcatggcactgcactccagcccggatgaaagagtgaaactctgtctcaaaaaaggaaatgaaaggctcccaatttgccaaaataactgcccccaccccctgcccatgcgcaagccgcaggagaatgccactctcacagtgcctgtggcagtattgaggatctcattttaaacatctgttctaattttatgactccaaaaaatcctcacattttgtagctatttcaattcaaatccttttgtgattattggagatgagcagtttttctcaaggttgagttgccagttgcatttttaacttcgtttttttttgagacggagtctcgctctgtcacccaggcacgatctcggctcacagcaacctccgcctcccgggttcacgccattctcctgcctcagcctccccagtagctgggactacaggcgcccgccaccacgcctggctatttttttgtatttttagtagagacagggtttcaccgtgttagccaggatgrtctcgatctsctgacctygtgatcckcccgccttggcctcccaaagtgctgggattacaggcgtgagccacygtgcctggccttaactttggttttaactggggttgccagggtgctaccctgggtcttaccgaggaactgtggctggaggtggcagcagcctaggagaaacaggataccctggcccagaaacttttagggccactggcgatgggcaaggattccctggaagcacctggccacgctgtcctgaccctgaccacattcaagaccctgagctggcagctgtccggacttgggaatgaacgatcaggaatactgtcctgctgactcttcttagttccagtttaaaaaggcactccctaaccaagggacaagtgacacacatccccagcatgctggactcgtttgtcccgtccaagtgggcctggctggcaggaaacaacgcctggttggcagaaaaacttctacccagggctcccttatgtgtacatgtgaattaatctttcttcttttcctaactaccttgcactccttcaccttcagtctccccagaatcccttccacaaatgcacgattcattctgtgacacccagagctgaccgtgcctttcaaaagaagttcagaaagatcaggcctggagggggaggaagcttcttactcttcctattcatttatttatttatttttcgacacggagtctcactccrttgcccaggctggagtgcagtggcacaatcttagctcactgcaacttccacctcccaggttcaagtgattcttgtacctcagccacctgagtagctgggactacagttgtgcgctaccatgcctggctaattttttgtgttttcaatagagacggggtttcaccatgttgaccaggctggtcttgaactcctgaccttaagtaatctgcctgcctcagcctcccaaagtgctggccatataggctttagccaccacacctggcccttactgctccttttttttttttttttttttttttgagacagagtctcgctgtgttgcccaggctggagtgcagtggcactatctcggctcactgcaagctctgcctccgggtttacacaattctcctgcctcagcctcccgagtagctgggattacaggtgcccgccaccacgcctggctaattttttttgtatttttagtagagactaaataggggtttcaccgtgttagccaggatggtctccatctcaatctcctgaccttgtgatccgccccgctcggcctcccaaagtgctgggattacaggcgtgagccactgcgcccggccctactgctcctcttaatgggcacagtggagatctacccatgaccaagggccccatgaagtctctgaatccaaggaaagatcagataatactgatccactgaccctgaggaatcacacacacacacacacacacacacacacacacacacacacacacacacacacacttgcatgcacaggcccactgctggacccaagggtgttactggaaagggcagtcaatggcattcagaggcagcctctgggttcctagaccaaaatgatgctrtgtgtgtggacagcccagcacagctgccaccgggtcagctgagtctaaaaaggctgagaatgaacaacaggagagatctcagggaaaaaggggtgcagggaggggacggaagagaaaggcaagaagaggaggaaggaagaaaattgacaccagaagatccctcctccaccctctctcacccacaggccttcctgtcatgggtgaccagcgccagcctgtgggtgtaatggcactgctggtggctgggagccaacctcagcagccttcctcctgatgttcaggaaactcctgatcctgctggaacacagtgctgaccacatcacacactacagatcatgtgtatgtgcacatgtgtctgtgtgcatgtgtgcgtgtgtgcacgtgtgtgcagtggcatgagtggcccatccactcccccaccaccctgggacagcttggcagggcctgtgtgggcagcatgtgttacagacatatgtggccatggtcctatacctcccctaacacctgcttctggacatgcccccacagctccagcccctctggctcttcatagccattttgcaatggtggtgactcaggaagctaattctgggagaggatgaggggctccttcctcccataccccactctggcctcaccagaggcactcaggcagggcagctgcagagtccacacctggcttatgagagtctcggggactgggggaacccagacaatgccacacagttgcaccgggccctgcccaggagtcggtctactgccttggaagcatatattcattttaatttctttgtgattaattgttttttttttttttgagacagggtctcactccgtcacccaggctggagtgcaggggtgcgatcatggctcactgcagcctcgacctcccaggctcaagagatcctcccacctctgcctcctaagtagctgagaatacaggcacgtgcagtcatgcccagctaattttattttttgtggaggtggggtctcattatgttgcccaggctggcctcaaactcctgggttcaagtgatcctcctgcctcagcctcccaaagtactgagattacagacatgagccactgcacctggtcaatttctctgtgattttatttgagagattttgcttctatgtccaagtatgcttctgtgagctaagtgtttttataaattggagtatgtgtatgtaaaagcgtatcccgtaaggcaagatgcttgtctgagggtgttcattcattctgttattcactcaacaagaatttgtcaagtgccactgctctccaggcagtgttagtgcttgggatgcatccgtgagtaaaacgacggaccctgccctcacagagcttacatcccagtggkaagagacaggtggtgaacaagaaacacagagagtaatgtatgaaacatgttaaaaggggaaagaaaccccggcagagtgagggaggagtgggcatgtgggggtgtgcagggcagcttcactgacaaggggacatttgagcaaaggtttgacagaggcgatgcagtgagccatgcagatccctggaggaagcattcccagcacaagcwcagactgtgcaaaggccctgaggcagtgtctgtggtgtgctggaggggaacgagcaagcaggagggccaaggagatggagtggagaatgcagctgggatcagccaaagtgtgaactttggctctttattggtaggtgtagattttgatggttaatggtgagtgggtgtgtttctggagtataaatgcatataattctgaacaaaagagtgtatggagggctgtgtgtgtgtacacatgtgtgttctgtcactggctctcaaattgggctcaaaggactgttatcttacattgagcccctttgtctggcccaagcagtttttcctttagaaaccacatgtgggggccgggtgtagtggctcccgcctgtaatcctagcactctgggaggccgatgtgggtggatcacctgaggtcaggagtttgagatgagcctggccaacatggtaaaaccccatctctactaaaaatacaaatattagccgggcgtggtggtgcacatctgtaatcccagctacttgggagcctgaggcatgagaatcacttgaacctgggaggcggaggttgcagttagccaagatcgcgccactgcactctagcctgggcaacagagtgaaactcggtctcaaaaagaaaaaaaaaaaaaacagaaaccacatgtagggagctgggtgctggcccacctgcccggcaacatcagagcagacacagatactaacaaaagcagacacgcaatggcaggttggaagttatctacaggacccaccgttgcttctgctgtaagctgaaccaactacccttgccttcccctactcacttggtcttgatttctaagtcatcatggctcgagtggcacatttcactgaatcgggacacaaagaagtcatagctccggtgataggacggggtgtcctcctcgatgttggcaaacttcacaaactatcagggaggaaggagagaaacacacgagagaggtgacccaccatgcttctcactgctgggcatccccagaccccytgccatggtcaagccatgggaaccacgcatcctggagccagcttggccggccttgcagagcacactggggagatgagttcccaatccygctcgcctctcctgttgcacaataagattggaaaccatggcccttctcaggcctcccctgctgcgggagcagaggacagaagagaagggaacatgaaagggctcacagaagcacctgccctcatcgctccatccagagctgcacaaacacacgggggcggggaggctgttaggaataatacggaacctgagtgaaagccagcgacgaagcaggagcaccaccctcaatgaattcgaggacacaagaacaaatctgaaatttgactttaaaatgtaattacactttattgttagaaactggagtttggccaggtacagtggctcatgcctgtaatcccagcactttgggaggccgaggcaggtggatcatttgaggtcaggagttcgagaccagcctggccaacatggtgaaaccctgtctctactagaaatgcaaaattagccaggcttggtggcaggcacctgtaattccagctactttgggaggctgaggcaagagaattgcttgaacccgggaggtggaggttgtagtgagccgagatcacaccactgcgctccagcctgggcgatagagcgagactccatctcaaacaaaaacaaaaacaaacaaaaacaatgataacaacaaaaattggagtccatttttaaagtttgccatttcagttcagtaggtcttgatcggcatcctgggcagctagattcctcctgcaccagggtgctgcacatttgcaattctaaatagagacttaatttcaactgagtcctgcagagaagcaacagtcatgaactaaatgaagttaaattactaaatatttaatatgattcttacagggcttttgttgctgttgttgttgttgttgtttttgagacggagtcttgctctgtcgccaggctggagtgcagtggcgcgatctcagctcactacaacctccacctcccgggttcaagtgattctcttgcctcagcctcctgggtagctgggactacagatgcgtgccaccatgcccagctaatttttgtatttttagtagagacggggtttcaccatgttggccaggatggtctcgatctcttgaccttgtgatccgcccgcctcagcctcccaaagtgctgggattacaggcatgagccactgcgcccggccagggtttttttttgagatgaagtctcactctgttgcccaggctggcatgcaatgacatgatctcggctcactgcaacttcctcctctcgggttcaagcgattctcccgactcagcctcctgactagctaggattacaggcacctgccatcatgcccagctaattttttttttgtagagacagcgtttcaccatgttgatcaggctggtcttgaactcctgacctcaggtgatccacccacctcggcctcccaaagtgctgggattataggcatcagcccccgtgcccagcctttatagcttatttggtttactgttattaatctagtacccccaaacaactaaaaaggttagattcacaataaaatatattctccattattcagccctctattattatttaatttttataaacatgtgttgggtcaaaaaggatatagtattcttcccaaaagtatctagttagtggactctcataatatttagtattgtcaatttgtgtctgtatttaacaacttaaaagttgttaataactttttctggatgaaaattagcagcttccacaaacatcattaattattgtagtgttttattcttacaataataaatacaacagctattttctgttgactgagagaatcccaacatacaagcaaataaggagatctttccttccaagctacatctaaaatggattcatatatttgggagtgaatattccgatgttagcaataaatccaagtggcattgctggcatgactgatgtggtgacgcagaagaggcacagtggtaatccacgtgatcacaagatcatcgattacgtacaagttcaggagagttccagaaagaaggctgaagtcggccttcggctgcctggccttcataagcccccaaggctggaacagacttgaggtgctgaagccacgtttggctgaagttaagtttgggtgcatcactgcccttagccaccggcagcatgttccccggctgcactcctcacagccaaaggctggtccggtcagggtgtctgtccactcaaaggagacacacagctctagcaggttctaaatgcagatctagctctgcattaggaggtgtggactttgaatgagacatttaacttctttttatgttttggttttcccatgtgcaaaacaagcagcccggttgtcactgaggttcttttaaagtttcaaaaatatatactatgtctacttcgaatattatgaggcagattaagactccctgtgtgtgtaagactgcatgaattttaataaaagaaatgatgaaaaaaagaggccaataataaagagaaagaaacaaacacagactttgtccccagcatgtagtgactgtgtagactcaaatgtacattaggagaatgaatggccaaaatcaatgttcactggtttgggagtctgattctcccacctcagcctccctagtagctgggactacagccacgatgcctggctggttttgtatttttagttgagacggggtttcaccatgttagccaggatggtctccatctcctgatgtcrtgatccgcccgccttggcctcccaaattgctgggattacaggtgtgaaccaccacgccctgccttttttttttttttttttttgtagagacagggtctcattgtgttgtccaggctggtctcaaactcctgggatcaagcaatccycccacctkggccyccaacttgctgtttttgacatacgctgtgaaatagtcaccacggttaagccagttaacgtaacacctcacatagttgccactttctttcctcttccctccttcctttctgtggtaattacatttaagatagctaagatgtggaaataacctaaatgtctgacaaataaatggatctagaaaatgtggcatatctgtgtatacacacacacacagtggaatattattcagccttaaagaagaagggaatcctgacagctgcaacaacatggatgaacctggaagacattatgctcagtaaaacaaatcagacgcagaaagacaaacactgcctgatctcactcatatgtgcaatctaaaatagttaagctcagccaggcgcagtgactcacgcctgtaatcctagcacttttggaggcggaggcaggcagatcacttgaggtcaggagttcgagaccagcccggacaacagggtgaaaccccgtctctactaaaaatacaaaaaatttgccaggcatggyggtacgcgcctgtaatcccagctactcgggaggctgaggcaggagaattgcttgaactcaggaggcagaggttgtagtaagccaagatcacaccactgcactccagcctgggcgacagaacgagactcagtctcaaaataaaattaagttaaaattaaatataaaataaaataaaatgtcaagcttgcagaagcagagtagaagggtgattgccaggggctgcggggagtggaaatagggagacgttggtcaaagggtacaaactttctccagtttttattcctgccttctgcttcctctagcctcaggctagatgacccaggagcattgctgctggggagcaggggatgatattgttagagaacaagaggtggatgagaaagtgggcaacaggcaccttagtattattttattaagaggagccgggcacggtggctcatgcctgtaatcccagcactttgggaggccaaggtgggcagatcacctgaggtcaggagttcgagaccagcctgcccacacggagaaaccccatctccactaaaaatacaaaattagccgggcttggtggcgcatgcctataatcccagctacttgggaaggctgaggcaagagaatcgcttgaacctgggaagtggaggttgcagtgagccgagattgcaccattgcactccagcctgggtaataagagcaaaaaactctgtttcaaaaaaaaaaaaaaagagggtgggggacaggtagggtggggctggaggtgggaggacttggcttttcaaacacttccagacagcagagtcacagggcrctgctgaccacactggtttctgtcccccacccctcccagacatgctgagtctgtcctggaagaggctggggaatctcagtgggccagtctgaggcccacacctgggaagccacgcctgggagccgcaggcaggggctgacgggcagtcccgcctactctcttcctctcgcctccctacacccatgccccttggaacccattcctgatcctggtggaacggggacaccaagacccctccacgttcaactttgactttcctcttcctcagcgagccgtggcgccataggactgaggccagtcaagtcacacagccagtgcagctgctcacggccagcgtctgtcctcattatccctgctgtctatgctgttaaatatttcaatcattatccctggctgtaaggtcagaattgacattaaaatcaaatttttaaaaatgagagttctgcagctacccctgaggtggtgcgaggtagaaaacataagtggtaatccctttcctaaaaccacagaaggcctcattccagaccaggtcagcagtttytcctgaatctgtcccaagcgggtcagccacagctgctaacctcactggaaaactcccttgctctctccttctgcggctccatgagtccctggatgtgtgttcttctgtactcctcttccctgacatattagtttcgaatcttcaaaaaaaaaaaaaattttttttttgagacagtctcgccctgctgcccaagctggagtgcagtggcgccatcttggtttgctgcaacctctgcctcctgggttcaagcaattctcatgcctcagcctcccaaaaagctaggattacaggtgcccgccaccacacctggataatttttgtatttttagtagagacggggttttgccatgttgaccaggctggtctcaaactcctggtctcaagcaatctgcctgccttggcctcccaaagtgctgggattacaggcatgagccaccgcacctggcctgtttccttttctttaaaatgtatctatcacctcctaggaacatgaataaagtagagaagattcagaaaagctccctgagctcctggagtaacaggaactgtgtgaactcaaggcatattattagtaaggttcttattctaagaggcttagactttttatgaccctacaggattcagcaccacacaatcattgaacagcagtatttgctggggcaatgtacaaatacattccactcaccacttaaaaaacagcacgccattcttaacatgcctgggactccactcactgttctttcccatcccacttgatcaggaaaacacatttcagatatggttgtagtaaagcttatttgctttcgtttaatgcatgccttgttctgttggaagccttcaaaatatccgaaagacatcacaaagcccgagttctagaagaggctattcatagacataggagttttcatcaggawtggcgaggccaggcccagttaacacctacagtctaagtaataacagcagtaaatatttctgtggcactcactgcttaacacgtcagtgttagctgtctctgtgttgtctctgcctcagtcttgacatcatcttctcctctgtgtgtcaaatctccctctgcttatctctaataaaatgcttgtgattgcatttagacccacctggaaaatccaagataatctcccaatctcaaattaagttagtccttaatttaatcacagccgccaagaccctgtttccatataaggtaacgtgcagaggttccagggattaagatggagacacctattgacgcatcattttccagctgatcacaacatccattatctgatacgattttcagcaaactagtgagtttagcagaacatgtgttgctcccattagagagatgaaaaaactgaggcttaaagggagcaagtgaattatttcagctcaacccgcttgcgacaggtggagctgagcctcaggcttgggaattctcacactgggtcgcatgatcttagctctttacattttaatgtgtatcagaactacctagggagcttgtttaaaatacagatttctgagccactccagcctactgccatcctactgaacaaactctctaggggttgggcttaggtatctgcattttcttttcttttctttttyttgagacagtatctcactcctgtcgcccaggctggagtgcagaggcgtgatcacggctcactgcagccttgacttcctggactcagccgattctcccacctctgcctcccgagtagctggaaccacaggtatgtgccacaatgtccggctaattttttattttgtacagatggggtttcagtgttgtccaggctggtcttgaattcctgggctcaagtgatccacccagcttggcttcccaaagtgctgggattacaggcgtcagccactgcgcccggccaggtacctgcatccttaagtgcccgctccccctactctggggcaggggatctacaggtcgcatgtacttggcccagggtaaactggtcccacagctatagaaatgttctgaggcagggtcaggggaagaaagctctcgcagaaccttgggaaaaagctagggaagcatgttcttggtcagggaggtccgtcaaggctggatggatggacagccacttcctctgaaggggagaactggggtggtttgggcttgaaccaagggtagcatggctccatctctggagcatgctgtttgccctctggggcccaggactgcctaggaggttgcagacttgaggctcgggctgttgaccattccattccctcgggctgccaggactcttgctctgttagatattctagtaagactgcacttaatgccagtccccgatctcccgtggagaagtggtgtgtgcaacagggctatctaataaaataagcacctttttggtaccaggatctcgagcctccttaggatcccttggtttgacagcttgtggggagatgcttcccttccctgaggctggaagtatgaaagcgcagtcgcagcagcccagctaggtcacctggtcagggagcgctgtccgtgggtccctgttggggcagctcctagagagcccaccctatgtggttcctgaatcttccaggggttgacatgagggggccaagctggaaattttggtgacagtgattcagagggtctgatggggtttttcccgggggccctggtcaaaggaccacacctattgcggaagtccaccttgaaatgtgccaatgtctggctgagatgaggttgggactctccggttttagagcgagtaagcccttttccctcttaaagaggcagtgtagtgctatgattacaagaaggggtttggagccagaccacatatttgaatcctaattattagtagggtgatctgggacaagcttacttgtcccagcttacttaaagctccttgtgcctcagtttccctgtctttcaaataggggtaacccaagcacctgccttgtaggcttggtatgaccaaagctctacctgcctcacctgtcacagttaggcactgcctcctcattttctcccccagggcatttttggcctgtcatccatactccatgaatttccactgggcccatttacctgtgtgactggtcactatttctttttttttcttttcttttctttttttttttttttgagacagagtctcactctgttgtccaggctggagtgcagtggcacgatctcggctcgctgcaagctccacctcccaggttcatgccattctcctgactcagcctcccgagtagctggcactacaggcgcccgccaccacgcccagctaattttttgtatttttagtagagatggggtttcaccgtgttagccaggatggtctcgatctgctgaccacaaggtcaggagtgctgggattacaggcgtgagcccccgcgcccggcctggtcactatttctttaaatccataatacaacaggaactcctatctgtttcacccctacaactgagaactcagactttacagatgacttttattaaaatgcgagttctaatgcatgagatcatgaaagatcatggttttttgtttgtttgtttggttatttggttttgtttttttgtttttaagatatagcaatgatgaggaaagtcgccatagcaaaaaactgaagatttcgaacatgtgacatttcaaaggccgggggcactgctagggccaccctttcaagatcaaagtttcagctttttatatacaacaaagggcaccaagcttgctggagtgatcacccaccctgtagtataggcagctaggaggcaaaatggtgtgaaaactgagggttactaagggtcaatagagagtaaaactccaaagattggccttgcaggaacagctctctcccggtcttatcacaggccaagtctctccaaacagaagatagccattccctcttctataggtgtgccttctgaaccaaccaacttcctgctgtcagtgacagaactatagttaaaaatactgggcatacataaaacccaactttctcgcagttcaaggactgaaggcctttttgctgcatttacctacaaagagaaaggagaactgcttctttgcttcactagacttaatctgggtagaaaaatcagcaccaaagaacattgcccaaatttaagacaagtcctagctggaaagcagatcttgccaaccatatggttttgagtttaccattgcctgtccctttctccccactgtccttgtttatagcaattccctagagcagttttcactgtagccagaggcacagtccatcccatcttaacttgatcatgtcctgccaacctcctgactaccagccaaggcatagtaattccccagatctatgacatactctcctgtccacccacattacacagtccccccttcaagactctttgcaaaactggctgtggttttaaggactcctgggaaagtctagtccttgctggccccaggacaccatccctgctggccctgggcagccccatctgctggactccaaggactgcactcaggaagcacagacctcggggaacaccagctggctgcctctgctctcagagcctgtccctacctggggctgagccccatgcyttgggccgttccactggccttggtctctagcagtgctgatttttgaaccaaagtgctgaaaattggggcatatctagtcgacaggtgacagttaaaaccacaagagttgatgaaattgtccaggggcagcatatccagtgagaagagggtagagcacagagcctaggagaccacagacactcagggggatgaggaaaaagagaattatttgaaggacactgtcttggcttcctgtggctgctgtaacaagttaccacaatttagtggcttaaaacagcacacgcttattatctgagttctggagctcagaagtctgcaatagttctgcatggctgcattccttctgggggttctggggagcattcatttcctcaggctttccagcttccagaagccacctccatcctttggcttgtgcccccttctctatcttcaaagccagcagcagggcatcttcagatctctttgtctctgtccctctgcttccatcatcacgtccccttctgtccgactctgatcctcctgcgtccctcttataatgacccttgagattatatcaggcccacctggattatccaggataatctcccccagctcgagattcttaacttgatcacatctgcaaagtcccttttgtcatataaggtggcattcacaggttccagggattaggacataggcaaccgtgggatgggggcatcattcagcctaccacagaaactaagcagggcacatccggtgggaagagrtggagtgacaggcctgaggaagtgaagggagtgtgaacaagggtgggatcccagggagaaatgggcgtgatcccagggagaaatgggcacgatcccagggagaaatgggcgtgatcccagggagaaatgccaccaaaagataaaaayatgaggggcaaggtgggtggggagtgggttattttcatggtttccacagattctaactgcaaagagaaaaatgtaattttacaatggagaggggtggctggccacaccctaggccgggatcacacttggcatctgtaaaggtgggacacagacatttgtgcctcctgctgtgatacccggtatagcaacccaaaacccccatgaagtattatagccgaaagtagttacctgcatccaatcaaactttcagatctaattccagtttgcaggaaatacaagagacaggagagtcagataagtgacaccgcagcaaagaaccagacaaatccagaatggagggcattctacaaagcaactgacctgccctcttcaaaaagtcaatgtcatgaataaaagaggggcagagagaggttgcgaagctgctaagagagttaagggatgtagaaaacaaataaatrgtctttactaagttctgatttgaaaaaggatagcaatgcagacaacgggggaaaattagggaaatctggatttagacgacatattaaaataagatcagggaatgactgttgattctgtcaggcaagctaatggcatttcgtagttatgcaggagaacgtaatttttttgtttttctcttgtttattaatttaatttatttctacactgcaagagacttgaacttgtgtttagattgagggaaggaatcaaagcaaggcaaagggtggagatggggaaggggcagaaagaatggatgcagggaggctccggaggggctgggaaccctttggagaggaagaagatgggcacaggaagtggaagaagccccctgggacagcccccatttcctgagtgggagaagaaggcaaaggcatcttgagactgaagaagctgatttgggaggggagtttaggggaaaatggaaggtttgtaaggatcacttggaggacgtgagaggaggctgcctgaaagcccaggtaaactcctaacgcacatatgtgtagaggccccaacccacaggctgtgtggttttctgaggtgggggcattagggtagagaaggccgggtggctgtgcaggccctgggagggtaaggcaggtggacagagggtgtcccgagggccccggagggtggcagaggaagggagtctcagcaagagctggagcttggaacgaaacgaggagacccagggaggtgagatctcgtgaggggcaggggagcaaggaagcaagatgggggggaacagggtgctgcacagcctgagtcacaaggagggacgtctccaggatccccatgaccctggcctgccacaggggagccgccctccccccaacctgctgggtgactcgctttgcaccagcctccgagtgggcttggtttgaggttgtggcacagtaaaagcaaaaatgcctgtgtgccattgactctgggttactcagagtacaactttttaaaaaattgaagtaaaattcacataacataaaattagccattttaaartgcccaattcagcggcatttaatccattcacaatgttttgcaaccaaaacattttcctcaccccaaaaggaaaccctatacccactcagcagtccctccccattcctctctcccccttcacctggcaaacacaaatctacttcctgtctctacagatttacctaactgaatatctcatatacatgggacgataaataggtgacctttttggttgtttctacctttcagctcttgtgaatagtgttgctatgaacaattgtgtacaactatttgtttgagaacctgttgttaattattttgggtatatacccggcagaattgctgggccatataattccatatgttgaactttttgaggaagcaccaaactattttccaaaggcgctgcaccattttacatttccaccagcaagtatgatggttccggtttccacacatccttgcaaacatttgccatcttttgtgtgtgggactgtgtttttaattgccatcttagggggtgtgaagtggtgtcttgttgtggttttgatttgtatttccttaatgattagcgatgttaaggatcttttcatgtgcttcttgccatttgtatatcttttttgtgaaaatatctatgagagttctttgcccgtttttaattaggtttttttttttgttgttaagtcttaagaattatttgtatattctggttattgaacccttattagatatatgattggtaaatattttctccctttctgtgggttatctttttactgtctgattgtgtcctttggtgcatacaagttttaattttaatttaattttattttttattttttttgagacagtcttactttgtcatccaggctggagtgcagtggagcgatctcggctcactgcaaccttcgcctcctgggttcaagcaattctcccacctcagcctcccaagtagctgggattacagctcccaagtagcaccaccacaccccggctgaattttgtatttttagtagagatggggtttcataatgttggccaggctggtctggaactcctgacctcaagcgatccacccacctcggcctcccaaagtgctgggattataagaataagccactgtgcccagacaaagttttaaattttgacgaagtccaatttatctatgttgtttctataattgcttttgyttttgatatcatatctaagaatccattgccaagtccaagatcataaagacttatccctatagtttcttctaagagtcttatagttttagctcttacatttagggctttgatctattttgagttaatttttgtgtgtggtgtgaaatagaagtgaaagtataaactttcaatctatgaatcttcataatattttaccgtttgtatacactaggctaatatattagattgtttatgtagaggatcttggcatcatcagatttaatatttttagtttatcattagtaagtgcccttaaaaaatcaggacatgtggtgattgacactgtcctcaagacatgcatctggacccaagacaygcatctggacccatcatgcaatgaggcaggtgtgcagaagtgaatccccagtgagtaaggagcttagctggccctgactcccccaccttctcctggtgtttccagtccctcatcatgatccaaagcccaggtattctcattaagggctggaaagcatcacttaaattttcactgggcacggtggctcacacctgtaatcccagcactttgggagggcgaggcaggtggatcacttgaggtcaagagtttgagaagagcctggccaacatggtgaaaccccatccctactaaaaatacaaaaactagccaggcatggtggtgcacgcctgtaatcccagctattcgggaggctgaggccttgaacctgggaggcggaggttgcagcgagccaagatggcaccactgcactccagactgggcaacagagggagaccccatctcaaaaataaaaataaaataaaaaatgaagaacaagaagtaaaaaaaaaaaaaagctcacttaaatttttaaagttgtactttactgcatgtactgtacaggagtggtattagctaatttggattttgtgacaagtctctggacaacttcatccttggggtaatcaagcacaagctgtatgaatatctatatggaatgagggaagcaagggagggatatggagagggagagaagaaagaaagaataaaagaaggaaaggagggaaggaatcctacacaggcttaagactagaacgggtcagtagttcccagacctaaatggcatcacatgggaagcaaaaatatagagactcccaggtctcctctccagagatgcgggcctggttgtctggttgagccctgggaattggtaggtttccaaagctcattggtctgagttggggaccttgaagggggtatggtttctgaagagacgttctgcagaggggagatttgtgctatgccaattcagggagcaaaaccaggtctgagggaaaagctacagggaggcagagtgggctcagggtgaggctttttcttgacttctcacccacaaggccgggggttgccttgtgatagactaagtctggtcwtgggggctatctgcacagaggctgggtgccacactttggaatcaagggcccaatgaggggcttctgaccttgccaccccccagattctagggagaatattaatagatgcacaggggccgaaagaatcactgtctaaagccagcgctctagctgtgtgagcacagacaaatcatctcgcttcttggcgtcccatctctacactgrgaaatccaacaaaatgaggggttacaatgagcttgattcattttgctttctcttcctttttctccttccctttcttttgatttcctggcagcaaaaccttttatccaaataaaatgctgcaaacttccatacaaacaatggaaaggaccgggcgtggtagctcacrcctgtaatctcagcactttgggaggccaaggcaggtggatcacttgaggtcaggagttcgagaccagcctggccaacacagtgaaaccctgtctctaccaaaaatacaaaaaattaacagggccagacactgtagctcatgcctgtaatcccagcactttgggaggccgaggcaggcggatcacttgacatcaggagttcgagaccagcctgaccaacatggtgaaaccctgtctcccttagttgggtgtggtggcaggcgcctataatcccagttactcgggaggctttggcaggagaatcacttgaacctgggaggtggaggttgcagtgagccaagattgtgccactgcattccagcctgggcaacagagtgagactccatctcaaaaaaaaaaaaaaaaaaattagctgggcatggtggcacacacctctaatcctagctactggagaggctgaartagaagaatcacttgaacctcggaggcggaggttgcagtgagccgagatcatgccagtgcactccatccggggtgacacagcgaggctctgcctcaaaaaaaaaaaactccagaggtggctactggatgaagtagcagtaaagggcctagagacttctattcctcctctcctaggccccctttcccctcacaaagccctgaatccctgtgaagacctgtttggaactcccgggctagactctaagataatgtcatrcactagcatgctagcaggtctaaaacgatgaggagcaaaaggacactcttctcaggaaggctcaagaaggtctgggcacagagagctggaaagagcatcagacagggacagcaagagaaaaggctgccttccaagctgcactctggagctactgcaaatatttgacttaactcactgacaatagcttgtccttatatcatcttcattgtctgcagcatagcaatcattagtcagcttgctctctggctgatgcgatgattcactgcgatggggaatctgcaggacactgaatttttcatgctgtagctgacaraacacctaccctgggctaggatttcctgtgggggaagctagaggtggtggccacctgcttccagtggcccccagggatgcatggtggctggttcattttccattcagatgttctcttctaggctgtagttctcttaaacaggacaactaaaacagtatctgaagctgttgccagagcaacttgacaaaggactttcccctcagttagtatatgtgtaatgtgtcaaaggcagctggctcccagggagaggaaagagaagggaatctgtataggttgctactcttggtccttggaaggaaagttggaagactctcttctggttaaatcaacttatgtagaacaggaaagcagctctgacccatgccataaaaattcagattgagggctgggcgtggtggctcacgcctgtaattccagcactttgggaggctgaggcgggtgaatcacttgagcccaggagtttaagaccagcctggacaacatggtgaaaccctgtctcttctaaaaacaaatattagccaggtgtggtggtgtatgcctataatcccagctacttgggaggctgaagcaagagaattacttgaacccaggaggcggaggttgcagtgagccgagattgtgccactgcactccagcctaggtgacagagcgaggctcagtctaaaaaaaataataaaataaaataataaaaattcaggttggaaggctaaggggcaaaccttaaacttttgtgatacctgcagatagataaaagcttcacttaagatctgtaaaatagttgtatctaagctgcatgaagacctggagcttaaagtatgtccaaaaggggaaggaatgggagagacagcaagatattaaagacaaccagggcgtgggagtatgtttaaatgcacacaagaagcagggagtttctgacatatctgatagctcttctctaacaaaatcatactctcccacgaccgcagccatttgcactgagaccagcattagcttggaggactaacagagaccaagctgaacctgctcatggtactgatgaaaagactgaggcccataaaaggtaacctgctcaacgcttcacagcgagggaagggcagaactgagccagaagccccgtgtcctgcttccccgtggtctttccactgatctggtacctttgtcctggggacatcactttactctatctttgaaaggggcataacctggacagctttcaagatatgcccccatagcgtgctgagtggtgagagccctgggttcttcctgccctcaaaagaaagcctctgtttccatcgatttttatatctattgggggccccacttaaaattatttgaggggaaaaattctattagtaaaaacagtttggagatcatcaatctaacgctaaacacattagatggtgttaatggttgcacaactttgtgaatacactgaaaccacattttttgttgttgtttgtttgttttttgagatggagtctctgtcacccaggttggagtgcagtggcatgatctcgactcaccgcaacctctgcttcctgggttcaagtgattttcctgcctcagcctcccaagtagctgggatcggattacaggtgtgtgccatgacatccggctaatttttgtttttgtttttttttgtatttttagtagagatggggttttgccatgttggccaggctggtctcaaactccttacctcaagtgatccacctgccttggtctcccaaagtgctggtattacaagtgtgagccactgtgcctggccaccacggggtttaaaatgggatgcttgaaagtggtgaattttatttttaaaaattattttattatatatctatataaattatatatttgtttaaattaaaaaatgaaagggccctttgttcacacaaagggagaccctaaaacaagcagtgtgtcacacttagggttgggaaccaagaaggaacagaacatgacagtgccgaccccgaggtctccctctcccctgccaccccccaggatgcggctgggagacctggagccccctgggccgctccttaccgagttggtgccgaggatctgcaggttgggtttctctgactccagcagcttggccaccatcttgaggaagctctccacgaagaggttgatgctctggcagtggcaggccatgagcagctggtccaaagcctccatagcaatgcacacgtacctggggagggcagcacatgccgtcactggccgcgcccctgccaccccatggcccaaccagggcatgcaaggtgtcagtgtggtgacctgggcaatgcagcatccgggtaatgaggctcccccacaggctgccaacgtctggatagcctttccaacaagtgtctgctccagcccagaactgagtcagaatgaattagggctggaaggaagcctagagaccaactcatccagcccctccttttacagattaagaacaggacgacggatgagatagagcatttcatgagtcaacacaaagagcaagattgatgctcacaatagcaaactctaagtctaaactctatgaggtcggggaattatccaatccaagtcaagaagtatttatcgagtgcccactgtggaaaggctctgtcctagacagtgcagggggtgtaaggatgaagaaggcagtcattcaacttaatgagctgagataaatacatagatattcctttaaagagaaaataaatcctacaagaaaatcatgcatgatggcccatgaggtttccaaggatggagagagatggctcgagtggggaggaagtcaagatctttatgaagaatctgagacaggcctgaggaccagctttaaggaatagaaaatttgcaggtattgtgtttgaaagcctcagaagttccatgataaagtactatgcaagcaatatggttggcagcattactatgtttggatgatacttcttacttagggaataagacagacaagatggacacagaataattttttttttcctccttatgaggaatgttccctatgttaactaagtctttaaattacttaaacaattcctctgaagtctaaagcctgagtgaacaacttcggaaactaggaatacacaacatccaatagcaatgagccaagtcctctcactagatgactgacaactagtatggtttgsstccgcgtccccacccgaatctcaccttgaattgtaataatccccacgtgtcaaggggggcaccaggtggagagaattgaatcatgggggcggttttccccatactrttcttgtgatagtgtgttctcatgagatctgatggttttataaggggcttcccccttcgctcagctctcattctctcccctggtgccatgtgaagaggtgactttcgctatgattgtaagtttcctgaggtctccccagccctgcagaactgtgtgagtcaattaaacctcttttctttataaattacccagtcttgggtatttcttcatagcagcatgagaatggactaatataatgaaataaaatgtcaacctgaagcctaataacctctatcctctattcacaattctactctcaggagaagcaaaaaagagggccatgccatctcctacctccagctcctcaacccctgaagataacaatctcatttgttattcttgctgttctctcctctgtgctaaatatacccaagctctcccaaactagcctttacaggacaacccaattatcttagttgtcttcttcaatgcttctcataaatcccaagaaaaatgccaagaatcaaattcctaatgagaaggagaaaggcacctctaagctcaaactccaaatttgttccaagagtatgacataactagtaatgtctacatcataaaacatacatccttcacttacaaagcatttacattctaaagaaagagaggttttgttttttgtttttgttttgttttgttttgaacttctaacaaggaagctgctgcaaacctttcagaaattattctggttaaaatctttacagtttcggagttaagtttcccgggcagaatgctagatgtctcccctaaaatatgtccctttgcctttccctagaaattcagaattttagctgtgcatgtggctgctcatttgggactccatttcccagtctctcttgctgtgaggtgagaccacatgactaaaacattgccattaaaatgaggggaagtggccagggcatggtggctcacacctggaatcccaacagtttgggaagctgaggtgggcagattgcttgagccaggagttcaagacagcctgggcaacatggcgagaccccttctttatgataaatgcaaaaattagccaggcatggtggtgtatgcctgtaatcccagctactcaaaggctgaagtgggaggatcgcttgagcctgagaggtcgaggctgcagtgagccatgattgagccactgtactccagcctgggggacagggtgagatcttgtctcaaaaataaacaaacatataaattaattaattaagagaaagtgatgtgaacaacatcagcatctgttgattataagacatgactgccctctgtgtcctttctctttccctcttcctaccagctgggaagtggaaacaactggagacccagagaggaaagccatgtgctgaagatccctgaatgacctcatggagcagagcccactggcccactccagactgatgtgaaagagaggaaaagcacttccatattgctggagccactgtcttttgagtttctttatactctaaatagcacaagcacctaataatcagatttgggagtgctttagaaacctgatggcacaaataaaggtgaattctgagcaatccaaagcaaaccaagtgactgacctcattggaaagggaagttagagctagaaatgtttcctatcctgctagatgggagaccattgcaaggcttcatggactcagagtttggactcatgtgcccattgcaggatggtgatccttctacttgtaatgtcaaatcatgtggaatagaaaagtacctcctgacacaaagaaaatacaggggaggccgggcgctgtggctcacgcctgtaatcccagcactttgggaggccgaggcgggcagatcacgaggtcaggagattgagaccatcatggctaacacagtgaaacaccgtctctactaaaaataccaaaaattagccaggcgcggtggcaggtgcctgtagttccagctactcaggaggctgaggcaggagaatggtgtgaactcaggaggcagagcttgcagtgagccgagatagcgccactgcactccggcctgggcaaaagagtgagactccgtctcaaaaaaaagaaaatacaggggaggtaaagtaagcagaaaactgtaaagcctaatggggtgcccaggaatcaggtcaatgttccctaagtcaaaataaagtagcaaaaggcctctcttacaagatcgcagcaaagctgccaccacgggattttaaaatgttaaaggtgcctaaaactctaaagtcaggttcacatgccgtaaatgtaataaaggatgaattaaaagattcgttcttctttatgtcttgacctaaatcatatccatcattgaatgttaggcagatatttaaaaaaaaawtttttttttgagacggagttttgctcttgttgcttaggctggagtgcaatggcgcaatctcggctcactacaacctctgcctcccaggttcaagcgattctcctgccttagcctcctaggtagctgggattacaggcgcccaccaccatgcctggctaattttttgtattttttgtagagatggggtttcaccatgttgaccaggttggtcttgaactcctgacctcaggtgacccacccacctcggcctcccaaattgctcgggttacaggtgtgagccactgcacccagcctatttaaaaattctttattagctagtcttcatctttttttttttttttttaaacaaagtttgggtgaacagaaagcacagggaggatgactataggacaatttcaggagctctttcaaggctacaactcaaggctccatgatacctcctgggacagctacccagtttcagatattgcacagtcagactgcctcagacatgagctagctttgcaaatccaaacataaaaaaaattaacagcagtcatgacttctaaattttttttaagacatcagctatttcttacttacctttgagctaacttctataccaagcaaccagaaaattaaacagcctttaaatgctgaaattttcttttccacttttataaaatgtttatttcttttatctagaatagccgcgtcaacttttattaaatgattctttaatgatattaaataaaagtattatcaaatagttgtctctgggcccacccacatatggatcaaggtgtgctctatccacagaatgtctttcaaatacaaaggcagccttggctctttgagctcctctggtgaatgggagccatgcctaccattcctccttgctcccaggacagccattcctggctctgcagcctcgcccttcagagaccatcacaatcaccatccaggaaacctgctgtgccttgcagacccagtcccagcatgtttcaggtccactgtgtagagactgaattctgcagggtttgggaagcagactgggctggagcccttccaaaggggacaggctttggctgcagagagacctggacaccttcaggcagccaagcatggcgggtaggaaatgagggcaggcagcatgggattctcttcccttacgaatcatcccagcgtccttctgtatgaagggatctgcagcatttcaccattattacagtgtttacatgacgtaaaggaaggggtggggttgggcaagaraagaaactcaaggcctcgtgagccccagggcttagattactgcttttcctcttcctgaaaaaatgccagaaattcctgatatggaaaaaccatcctttgyaacagaaaaaaaaaaaaaaaaaaaaaaaaaaattggctacttaccaggagtggaaagtggaaaatttccattttggtagaaggtgaaaattatggtagaagtgaaactgaaaagtaaagaagtataaggcccagttctttgaacacatgatcctttgttcctcatctctgatcccaatagtaaggatggaatgtttataattatgaacttgagcttttcaaagcatcttacataattcgaagtcaatgggaccttggaagccccgagtctaatgctctccatgtttgtgctattttattgtaatcttctcgagtgtgtctaatctgttacacactcaaaaggaatagagcctgggatccccgagttagaagattactaccagcagagatctgatctggggcgggtgtcctggaagaggtacaaagtcataacaggtctgagaatctgaactggcctaagaaaggaggagtggggagtaaagtctgggaaccaggcttagttggagaggaaaggcagatacagggtcagggattagggtcagcaggcaggatgagggaggcagctttagtagggccagtcatttgcacaagaatcgctcaagagcagtggcctggacaaagaacctcttgttccaggcagtttgagtgcatttggtcagcccactcctagacagaatcttctgggttttaggagtccagaagtagggagagagggctgacctcagctcaggaagggagggatgaccctcctcatctagtaggggtctgcggtatccctatctcaaggtcagccatcctccagtcaggttcagggtccttctggtgaatgtgtatctcttaggagggccactgggtcagctccagggccagggtcctcagattagagaagctcaaccctctggcatggccatctccatccgccagggcttggtcctggctgggtgagagctccaggtactggggatcctgacggcgtcttatatggcattctgcacccatcaatgctcaggggtcactgtcgactgagcgagtcttacccagcactgctgttccctcccctgctctcccttcgtttctaggggatttactcgcattggagttgaactggaagggaaatgtaaagagaagggaaaatagaaggactgctcggtttttgctgctctgcacatcactgcccatcatattgcatgcccatgaacgatgccttgaaattcacatctcatcctctctctgcccacattgggctgcccaccgccgtccccatgctaaacacctatgagccagagtccacacacaactgaaatggggtgacaatgtggggaggcagtggggcagatgagggtggttctgcccctgggtccagcatccaaggttcatgtccatatggtcaaaccccaaatacagacacctgcatcacggcagggagacacagcctctcaccctgtctgcatgagaatattttactcttccaaagctgccatcagtgatgaggaagataatgatgatgtatgtggcgttgggtacggaaagacagggagggcaaagagagaataagagatcaaatctaacagatttttcttctccaaatgtttaggaacaaagccctcagtgaggccttcaggttttaaatacttagaggctacaatggctatttttaacagaatggtactaaattttaattgcagttgtaagggcagcagaatgattctaagtggctcttctgactctaggacatttttttactgagagaaccatcactgcagagacagccagtgaaattagtattaaatgtttaatgttggagctagcatattagttttaggttcaacctaggatcaagtcatttttacttgcttgagtataatttacaatatgtcaaggcccttaatataatcagcatgcacagtagatttgctcttattcaggatgtaacctcattttattatataaaatgatcacagaaacatattggtttggatcctgctttttacaccaggggtgggttgatttaagatttgctggtgaggcctgtgctttctagacctctccaccccatcagcaccatgcacatttcactgtagttcaagaccagytccgtcttctcctgccaggaggaaggggccttggacggcagtggggctgatgggcagctgcagggggaggcctatcaaagaggtcaaagtgagagagaacaccagaaagacccacagagccagccaggtggtcagcagttcatgtggagtgggtctacggcaggtgtggygggggtggtgggcttggctgggttacaggcaggttgtggaagaccccagaagtcaagctgaggatgctggattttttctcaaagagctaggaaagcgcagcttgggttctgtgtgttaaagatcatacatagcagtattaacccagaaggaccaaagcaggaaagacagggagcagggagactatgtccaaggctactgccatcatctgaacgaaaagagaagaccctggaccaggagaaaggctagaggagatgaaagtagaggatggctatgaaagattccatggaggccaggcgcggtggctcccgcctgtaatcccagcattttgggaggctgaggcaggtggatcacgaggtcagaagttcgagaccagcctaaccaacatggtgaaacaccgtctctattaaaaacacaaaaattagccaggtgtggtggcacgtgcctgtagtcccagctattcaggaggctgaggcaggagaatcgcttgaacccaggaggcagaggttgcagtgagccaagatcacaccaatgcactccagcctgggcgacagactgagactccatctcaaaaaaaaaagactcagtggggaatggaaccaacaggactgagaacctctgcctgaatccacccaaccctcagctccatgagcaacgccaccaggaatatctgagtgttctcctgacatttggtctctgaattgtagcatgatggttggggagcaaacacaacgtgctctgcagttcatgttttttattgtggaagtaacacatccacataaaaaatatttaggaaaaacgtagaaaaaatagatacgaaacaaaacaaaaccaaaaaaccccagccccactgttcataaaatgaatactcctaacatattggtacattcttttttgttgttgtttttgagacagggtctcgctctgttgcccaggctggagtgcagtggygtgatctcagctcactgcaacctctgcctcctgggttcaagcgattaccccatcttagcctcctgagtagctgggactataggtgcatgcccccacacccagctaatttttgtatttttgatagagatgaggtttcaccatgttgaccaggctggtcttgaattcctgacctcaagtgatccacccgcctcagccttccaaagtgctgggattacaggcatgagccaccgcacctggccagtatgttcgttttactgtattttccagccattgagatttgttgttgttgttgattttttaacttgattgcaaatactgtctacataattatggattctggttttcatttacttaaagcatttttcaaattacatggaaagtatctttataaacacaatttttattgactagataacattttatcaaatgacatacaccataattcactgaaatattctcctcygactggacattttacttctactttttcattattataaataacaagataacgaacatctctgtgtgtgaaggtagactgtatttaagattgattccttggggcctggcgcagtagctcatgcctgtaatcccaacactttggcaggctgaggcgggaggattgcttgagcctgggagttccagaccaggctgggcaacatggtgaaactccatttctacaaaaaatacaaaaaataagccaggcatggtagcacttgcctgtagtcccagttatatgggaggctgaggtgggaggacgtcttgagcccaggaggctgaggctgcagtgagccaagatcatgccactgcactccagtctgggtaacacagcaagaccttgtcttaaaaaaataataataataaataartaaataataaaaaatttgattctttgggatcaacaaatagaaatggaattactgagtgaaagggcataagtgtttttaaagctcttgacacattatttcaaaattactttctagagagtttcaaccaatttgtactctttctagaaaagaatgaaaatgcttcccgttttgccatctattggttaatactggaaattatatttcctttgtgatgaatttaataagttagcatcttagtatttcagtatgcacctttgatcacaagtctgttgagtgtcatcccacgtgtgtggcaagctctctctcctctcctgtaagtcgcttgtttgtggctcttgcctcaaacctcttagtgtctcagtttctccactccacccactatttggtatgagctactaatatataagtttgaatcctttgtcttaattttcgaatatacttttttgttgttcgtctcttaaactttgagtgtttcttttttctttttttttttttttttttgagacagtctcaatctgtctcccaggctagagtgcagtggtgcaaacacagctcactgcagccttgacctcttgggctcaagccatcctcccacctcagctttctgagtagctgggactacaggtgcataccaccacgcccagcttatttttgtttattttttgtagagatgggcagtatgttgtccaggctggttttgaactcctgggctcaagtgatcctcccacctcrgcctcctaaagtgctgggattataggtatgagccaccgtgcctggtctcagtgtttctatattgacatcaaaatatttaaatttttcaacagttaagtctattgatcagtcacttgctttaagatttcttctctctttaaacatagaaagcccttctctttcagaagattgataaatatttcacctaagtgtatttttaatggacaaattgcccttaactctgtcttcttactagaatgtagatgactcctcctttgttttcaagacagtaagtgggataaggcaggacaggttggatgaggatggtggtgcaatcaaaccttaattttttttaagkccccagactgtatgagggcttctgtatggaaacgcaagagagaatggatgctggaagaggtgcttgtaggaagccaacacccttttcttcccaaacctcagcagcagcatcacactagaccctgcctttggaagatcacatgggatatactccttagccccagtccccagttttcttggtctgtttgataatctatttcttttttttttctttttttgagacaaaatcttactctgagagtcacccakgttggaatgcagtggcacaatcatggttccctgcagcctcgaccttctgggctcaagtgatccttctgcttcagcctcccaagtagctggcactacaggtgtgcaccaccacacctggctaatttttaaattttttgtagagatggaatctcactacattgcccaggttagtcttgaacttttggcctcagtgatcctcccaccttgacctcccaaagcgctgggattacaggcgtgagccactctgcctggccatcattttcttaaaaggaccctatgtttagcctaacaatatagttcctgacaatctctctccctctcttccaaactacttacccatatcgatggcgacccacgtcacggatgagcctctcagagaggtaggcgccaatacgatcaagtttttctggagctgagagggcatagaaggtcagcttctccatgttggtcttcaccagaccatcctgtaggagaaaacagcttgtgctcactatggccacactatggctagacgagttcaagtctagagaaaaataataattcgacggaatcaacatttacagagtgtcctttatggatgtgccggagcacatgtgggtttcagagacaggcagatgattaaaacatagttttagttataggctcacgcctataatcccagcactttgggaggctgaggtgggcagatcacgagtttgagaccggcctggccaacatggtgaaacacctgtctttactaaaaatacaaaaattagccaggcatggtggcgagtgcctgtaatcccagctactcaggaggctgaggcaggagaattgcttgaaccyggggagcggaggttgcagtgagccaagattgcaccattgcactctagcctgggcgacagagtgagactccgtctcggggggagaaaaagaattgtaagtgatacaaacgtataaaatgtatatatgtgtgtgcatgtgtatggatatatatacatgaatgtatacatgtatgtgtgtatgggtgtgtatatatataccrtgtgtgtgtgtgtgtgtgtgtaagtgtgtgtgtgtgtgtgtaggaatggatgatacagcatcattaaaagccacccaggcygggtgtggtggctcacgcctgtaatcccagcactttgggagcctgaggtgggcggatcacaaggtcaggatatcgagaccatcctggccaacatggtgaaatcccgtctctgctaaaagtacaaaaaattagctgggcatggtggcacgtgcctgtaatcccagctactcaggaggctgaggcagaagaattgcttaaaccagggagtcagaggttgcagtgagccgagatcgcgccactgcaccccagcctggcaacagagcgaaactccgtctcaaaaaaaaaaagccaccccaaattaaagcatgttggatagccggcaccaagacacacacaggacgaaggcagctctgcagctcttagggaactctacaaaggatgctcccatcaagacaggccattggttcccagagagcaagtcaagtacatcagatcccaatgtttcccagcccacgacccacaaagcagcctgacaggtggagaggcggcttggaggccaggccctgtgtgtgtgcccctagacacctggcagacaccagagagtggcagccagggggaaagacctgggctcctgagcccaacccaagacaggggagtcctcacactgaccggcagggagctacgatcactcaaagagttagcagctccagaggcaatcacacagagagacatgcaggagaaagatgtctcggttggacagtgatggccacaagcatgccaagacgcacttccagctgccttctgcagatccaaatgccctcatccttcatgtccctagcggcctctcaccactgcccatggctgtagcccaggttccagtttctctgggaaggctcagtgcccagggaccctgagaggccctgccttccccacccggcaggaggcctggcttccaagctgcccccgtcagaggccctgcctggaccatgagagccacgatgcctgccagagacatgacccacctcgggatcctcagggaagatgttgtcaaccagccttttgtacctggggcgtagggcaccacagcagccacacacacctggaatragaatgggaaaaactgtgagcaaagcctcctggtcgggcccaggaaaggttggagccagggccagggcagcctgtgagtggcaggaaacagacaggctggaatcagacagacccctcccttggagggctcggggccttgtcctcccagagctggcatctctcattgtcccctacccccacactctaagacatctgccatgtgccattctggcaccttcatgtcttttgcttgggggttgggcacagtgccatatgcaaggccaggccacagggagcattttgaggggtgaggcttcgtgggtgggagcttacataaaggtcaggtgctgcgcccgcctactgtgctattacacacactcacacacagacacacactcacgtttccgggacaggaatatgaaactgcctcctgcagcccaagaatctaaccaagcatcctgggaagatggatacaggtttcgggggcaggtgttattccctatctgccacctcgtttgcccctaactttctttattccctgctcttcagtctccctctatcgtcctatctcctggagccatttccattatagaaagttatgtgcaactatgataaaattaacatcatcatcaacgattcacatttgacgatgcatctttaacgcagtgtgacagtggaatttgaaaactgcggccttttagagttgggcagggccttgaggggcatccggtttgtggttctcaaatgctggcccccagtgaggtttgcaccaatctgtagcaaaatgaaaaatctaacaaccctgtggtatgtttgtgtaaagctaaatttactccattgagaagactgaagtgacctcctccttcatgttttggttctgtgaagtgatggtgttaggaaaccactgataaaacaaactggcaaaattagaagttggcaactctaggtctcaccataaaaagttttaattagtaaaggaataatagccattgcacttcttcagtcaacttccaaatccacccagcttcacccctcactgagggggcgggcgggcatggaggaggagagaggaggacttcagggaggggcccggggggcctgggaaagtccacctcctccctcccgcccagtaagcaccccttcattctgccaattaaagatgaattctatctgtacaagcacaccacttgaaatgcaaatgtgccstgggaagattaagcctacaggtcattcagaaaagaatgagttccttcattgggaattactttaatcacaaaagaggtttacatagggcggagaaaagagttctttgggagttttgattgggagggggatggggtgggtgccactggaggaggaaagagcagtagttttggctctggggtgatttgggtttggggatgggcatgtccttggagtagccatggggcaccaagaggatggcgggcacccaggggcagataacttatttgtgatcccctccaccaccctcagcttccacccgccccagcacagaagggaccaggcagaccagtgggcgggctgcatgcccaggctctccaggttcagcctccttgctcgacctcgttcctggcatctcctcaccctctccctgcccctgcctgagaaaaggtgttggggttctggttggcatccagggttatttcttgtgatgggacagctcccaggggcccagtcccccttcttgggcctggaagcccagggtttaaacctgcagctgcccagtcttctgcctggcgcagctgccaggatgtgtctttccaaggtgcccaggtagcacacgctccacgctctcccagcagcctccctagtcatagtccctaaaccaggaacattggcccttttgcattttaagggagtgaggaaatagaaacatggggaagttaggactaaaaaaattgtagtgtcagttcctgccttgaaactttctgaagggcctgtgagctgaggcctgcgctggacaaaggccaagctcacagctgctagaacccaggcttgtcaaggagagagctcaataccatcctgggtactcacggtagaaacttccacacagtgccccaagggggctgtggggttgtcagtgcagctactctggctggagagggytccctgagacatcaggccgggacagtcctggtctggggacaccaactcagttcttctcaaatgaaaaccagayaggctgctgcctcctgctctcttgtattccagaaggggagctcctcaggccaccccttgctatatccttccctctctggtccacaggccctccagggaaggcaccttccccagcacagaggcctccaggagccgccaccacacagggcccatgstgggcgggaaccagtcccaggcagggccccagggcctttctgcaccagtagaaaggaggtaagaaggcctaaagaataacaggggaaggtgagggcttcccgacttactccccaacacttctttcttgtctttcctttcttcctaacctcttcagccctctgagggcaggggctagggaggcagcgtggccaacagcatgggctctcaggtcaaatcctggcactgccacttcctaaactgtgacttggaacaagtaacaacattctctatgcatgggtgtcctatctctataacagggctagggctatcccacakggctggtagaagaccagagccagtccagggctataaagcacttatagcagggccaggactgtcaggccccaggaaggttctggaagctgcccgcccctttctgctttcccccaggcccagtgccattgagcccttccatccatgccagctggtcaatgctggcttggtacatcttagcagggctatcccactgaccacttgcttggccacagcgaccaaggcccttagacatccaaaggcctaagagttgagaatcacagaacacagactccatccgatttcccacgtgggtctgaaacacgtgccacttccccaaggcagctctgtacacttgcaagtaacaataccttgacctcaacctgcattcctgtctggccaccttcccaaagccagaacctcagcaccaactctacaaaccccagtgcaaaggtgacacaacatgagctcacacaacagaatggagctacaaacaagaggcacgctggagagaatccatgggacttgccattggaaggccactagtggagtggctgccatgcggtaggggaagaggaggtgaagcttaagggactgacgagtgcacgaggaagcttcagcaatcaaggcagtgcacttctagtgaaagaactgacaggtggatcagctggacatccacatgcaaaaaaaaatgaacatawacacagcccttacaccctggacagaagcttactcaaaataaatcattcacctgaatgtcaaactcaaagctataaaacttcttgaagataacataggaaaaagcctagatgaccttcgcttttggcgatgacttcttagataaaaaaccaagggcacaatccacgacagaaagaactgataaaatggaattcatgaagattaaaaattcctgctctttggctgggcacggtggctcaagcctgtaatcctggcactttgggaggctgatgtaggtggatcactcgaggtcaggagttcgagaccagcctggccaacatggtgaaaccccatctctactaaaaatacaaaaactagctgggcatggtggcgggtgcctgtagtcccagctacttgggaggctgaggcaggagaatcacttgaacccggaggctgcagtgagctgagattgtgccattgcactacagcctcagcaacagagcgagactccagctcaaaaaaaaaaaaaaatcctgctcttcaaaaggcgccgtcaaaagaatgaaaagtcatagactaggagaaagtatttgtagaagacatagctaataaagaatatatgtgtgtgtgtgtgwatrtatatatatatatacatatatgaagattttatatatatacataatcttcaaaatataaggaacactgacatggtttggctgtgtccctamccaaatctcatcttgaatcgtagttctcataatccccacgtgtcatgggagggacctagggggaggtaatttaatcatggggacagttaccctcatgctgttcttgtgacagtgggtgagttctcacgagatctgacagttttatgaggggcttttccctgcttcactctgcacttctcctcgccgccgccatatgaaggacgtgtttgcttccccttctgccgtaattgtaagtttcctgaggcctccccagccatgctgaactgtgagtcaattaaagctctttcctttataaattacrcagtctcaggtatgtcttcgttcacagcatgagaatggactaatacaaacacttaaaactaaacaataagaaaataacccaattaaaaatggggccasacggggtggttcatgcctgtaatctcagcactttgggaggctgaggcgggcagatcacttgaggtcaggagttcaagaccagcctggccaacatggcaaaatcctgcctctactaaagatacaaaaattagccaggtgtggtggcgtatgcttgtaatcccagctacttgggaggctgaggtaacagaatcacttgaacccaggaggcagaggttgcagtgagccaagatcatgtcactgcactccagcctgggagacagagcaagactctgtctcaataaataaataaataaagggcctgaaaccttaatagacatcgcagcaaaggagatatgcaggtggcaaataagcctatgaaaagatgctccacatcatatgtcatccaggaaatgtaaattaaaacaacaatgagataccactccacacctattagaatggcccagatccagaacactaacagtgcatgctggcagggatgtggagcagcaagaaccctcattcattgctggtgggaatgcaaactggtacagccactttggaagacagtttggcagcttcttaaaaaattaaataaactcttaccatacaatccagcaatcacaccccttggtatttacccaaaggaaatgaaaactatgtctacacaaaaacctgcacgtggatgtttaccgcagctttatgtagaattgccaaaacttggaagcaaccaagatgtcctgcagtgggtgaataaactgtggtacatccagacaacggaatattatccagcactaaaaagaaatgagtgatcaagccatgaaaagacatggaggaaacttaaatgtatattactaagggaaagaagccaatctgaaaaagctacatactgtatgctctaaaaaatagagtcttaaaaagaaaaagtacatggggtaggagagcagatgctctggcgagcagagccacagtccccaaactgtgttccatgaaacactagctgtgtgatgctaacaagcatttcccagaaaaaggctccaaggacaaataaatatatgaagccaggcatactaaatcccccatcccagattcatagcacaaattaacatattctgaaaagtcaacagccactagcaccctcattttggtcaggcgcggtggctcacacctgtaatcccagcactttgggaggctgaggcaggcraatcacttgaggtcatgagttcgagaccagcctggccaacatggtgaaatctcgtttctactaaaaatacaaaaattagtcaggtgtggtggtgcaggcctgtagtcccagctacttgggagactgaggcaggagaatcacttgagccggggacgtggaggatgcagtgagctgagattgtgccaccacactccagcctgggcaacagaaagagatttcgtctcaataaataaataaataaaatcattgtgatgaatatttttattatgcttttttcaagacatttattacctactttaaaaataggtgggaaataggaaggaatataatactacaaatgtagcacattggaaacagccctaattttagagtttaaagagtactggtgtttaagtcctgcttctgtcatttgacctttgagttccaggaccaattctgtcatctgacctttgagacttaagtttccttatcaatacaataacagattttccctaagttacagtttgacgatggaaatcccagatcatttgccaaagaatcgaaaaagagagaaattatcttgagctccgatagttggggaaggcttcccagaagagaggtacaagaagacacggggtagggttcatagcagtgaaaaagacagtaggtgccttattccttgtgagccaggcacagctctaaaatacttcacaagcaccaacttttgtaatccttacaacaacctgtgaaaggaaaataaatcttggggcccccaaatcactaagctaaagggaaaagtcaagctgggaactgcttagggccaacctgcctcccattctattcgaagtcccctctctgctcactgagataaatgtataactgactgcctcatttgaagaggctaatcagaaactctaaaaaatgcaaccctttctcttttatctacctatggcctggaagccccctctccactttgagtcgttccgccttcgcctcaagttgtcccacctttctggactgaaccagtgtatatcttacatatattgattgatgtctcatgtctccctaaaatgtataaaaccaaaccatgcctcaaccaccttgggcacatgtcgtcaggacctcctgaggctgtgtcacgggcacgtcctcagcctggcaaaataaactttctaaattaactgagactggccggtcacggtggctcacacctgtaatcccaacactttgggaggtcaagacaggtggatcacgtgagatcaggagttcgagaccagcctggccaacatggtgaaaccccttctctactaaaaatacaaaaaaattagcagggcgtggcagcgcgcacctgtaatcccagctattcgggaggcggaggcacaagaatcgyttgaatctgggaggcagaggttgcagtgagccgagatcgcaccactgcactccagcctgggtgacagagtgagactcattctcaaaaaaataaataaataaaaattaaaaaaaaaataattaattaactgagacctgtctcagattttcgaggttcacaaacccatggcataggtactatttttatcctcattttatagatragaaaactgaggcattaagtggttaagttacctgcctagagccacacagctagaatctgaaccccaaatggcagactagaatctgaaccccaaaaatctactttcagagtccatgttctgaaatacaaaaccagggcagggataggttacagttgtcacagagctagggaaactgaggcctatgtggaaagagaaccactaggtcagtgcatctcaggctgtagagtgcacgtgtcccttggggatctggttaaaatgcaagctctgattagactctggggatgctgatgcccctggtcccaggaccacactttgagtctgcaaaccaccagagcatggtggttaagaatttgggctcagaggtcagatgggcttaggatgaaattctagctcttcccttttcttactgtctggccctgtgcaatactccacacttcctgggtaggtaatcaaagctgatrgcaggagattcccagctctcctctccgagttgagagctggaggcgctttggtcaggagcgcccagcttctgggtcccaaagcagcttagtgggtgctgggaacccacaagcacccctagaaagcttccagcccaacaatggtgaattctaagtagccacaaaacccagctaggaaagaaacaaataatagacattaaaaagaaactaaaaacagttcattgtaacgagacactaagtaatgtttttatatatttcttccatcttacttctgatggtatttattcttaatgttagtattcatacatacaaattgtggagtttaactcacaactatatgcctataaaagaatcatttaattctgagccattttatttctaaaacagaagcactttccaacgggtcctctttcactctctagggatcgtgtctggcagatccaaccacagtagctgaaggtaaatttatgaaggatcctcttctgtcactaggagctgtcttacctgatattttcatacctattttaaggaagagagggaaacgtgatatggccaattccctagtatgtagctgcactgccactgaaaaggcaaatcagtaggaataaaccaaatgttcaatgacacatgattttggcagcttcctcctttaaaaccatgagaatggtgagacctccctcgatggctcattttgccccaaaccccctgtccagaatgttcttccccatgtcctctgacctcccactctcatgtccctaaggtctctgcccaaatgtcacctagctggaaaragcttccctgaccagcattccactttaattttctgtcctggtttattccttttcatagtgctttttaccaatggacacatttcatctgtgtctacactccatctccccactcraaggtaagctcctcaagagtgagacctttgtccayttgtccccactgtgtcccagggctggaatagggtccaacccatgggtggtggtggcagggggtgctcatacaggtttgtggaataaagggaggacagtgtgatygagcagaaaagcaatcatgaatttcaaggtcagtaatttcaaagtcagtaagtcaaagtctatgaggcacttagcaaaagatctctgggtgtttgcaagacagtactcccaggggaacttcagggaaaagttcctgttatagaacagttggctcctgttcctgaacttggtgcccagcccatcttctagggctgccaacacctgtagctcctgaggtcaggctcactgggaccagtctctctccaggcagacatactgggcatcagggagcctgggtcagagttcctcctgtctgcccaaggcctctagcctgccttgtcctcactcccccaacccccttagctggctcctggcttggcctgtggccrcaatcctggctgctcatcagaatgacccctgtgctgtgaagagggcccagaggtgtttaaaatgctccaccacaattccrgcacacagccagggtgagaagtgccacaaggtccttgcctgtccaacatgtgagagcagatcctgcagctgctggcagccttgcgacagaggacgcaggacccctcacctgggccaccagcagcatctgcgtccctgtgacccctaggcgtcgcagccctgtttctcctttggcctgcttgctggatcctgtttgcctgactgagctgtccccttgatcagagctgccctctactcagggcgattggtggtttgaaacaaacaaagtctcaaacactaactacatcatgcttttcaaaatctaggtcccctcccccaaactccctactagtaacccagcatcacctgccaggcccactgagatacattatttcctttgaattatttcctctccttcattgccactccagtctctctcacactgattttaaaatctaaaaaaattccaggggcctgtgcggctgcaggcggtaccaagggaaygggtctcactcggaaatggcagcctccatgttctacagccagctgttggccgcagctacccttcggggccaccttctctggacagccctgcgsgccactgctcaggctctaggaagttatggattgttgaataaccatggactccaagtacagcagcaatagcacaggaatctctcactacatgaatacatgagtatggaattattgcaagaagctggtgtctccgtttccaaaggatatrtggcaaaatcaccagatgaagcttatgcaattgccaaaaaagtagrtacagaagaaagaaataacatgtgcaggataaactgtaactatgagtactgctggcaagttctctgggactcacaagtagtaagaagcaggttcaaaagaagttgagatgaaggcgcaggtttcagctgatggtcgaggaaaaggaacatttgaaagtggcctcaaaggaggagtgaagatagttttctctccagaagaagcaaaagctgtttcctcagaaatgattgggaaaaagttgtttaccaagcaaatgggagaaaagggtggaatatgcaatcaagcactgaagcgaaaataccctaggggagaagactactttgcaatagggatggagaggtcatttcaaggtcctatattaataggaagttcacatggtggtgtcaacattgcagatgttgctgctgagactcctgatgcaattaaagaacctgttgatattgtagaaggcatcaaaaaggaacaagctctccggcttgaacagaagatgggatttccacctaatattgtggattcygcagcagaaaacatggtcaagctttacagcctttttctgaaatatgatgcaaccatgataagaaataaatccaatggtgaagattcagatggagctgtgctgtgatggatgcaaagatcaattttgactctaattcagcctaacgccaaaagaaaatctttgatctacaggactgaacccaagaagatgaaaatgacaaagacgctgctaaggcagatctcaactacattggcctgaaaggaaatacagactgtctagtaaatggtgctggtttggccatggcctcaatagatataataaaacttcaggggccaggagtggtggctcatgcctgtaatcccaacactttgggaggccgaggcgggcagatacctgaggtcaggaggtcaagaacagtctggccaacacggtgaaaccccgtctctaataaaaatacaaaaattagccaggtgtgatggcggacacctgtaatcccagctactcaggaggctgaggcagcagaatcgctcgaacatgggaggcggaggttgcagtgagccgagatggtgccactgcactccagcctggacgacaagagcaaaactccatctcaaaaaaaaaaaaaaaaaaaaaaaaaaaagctttggggagggactccagccagcttccttgatgttggtggtggtgctacagtccatcaagtaacagaagcatttaagcttatcacttcagataaaaaggtactggctattctgatcaacattttttgaagaatcatgcactgtgatgttattgcacagggtatagtcacggcagtaaaagatgtggaaattgaaatacctgttgtgggggttacaaggtacacgagttgatgatgctaaggcaccgagagcagacagtgggcttaaaattcttgcttgtgacgacttggaggaaactgctagaacgttcagaaggctctctgaaacagcggacttagccaagcaagcacatgtggatgtgaaatttcagttgccaatatgatctgaaaacccagaggatggctgaaggtgttaaatgtgctataatcattaaggatactgtgttctgtgttattgttcttctttttggtgtgtggaggttgtaattgccatgtaggtatacaaacttttaaaaacatttggtttgcatttaattctatttatagaacactgtttgtataaagaacctataatgcaggtaactaatttcttttgttgcaaccagtcttatttgcttctcctacaaaatgtaacttgcaatatgtctgtttattattgttggatacaaagttcttcattgataagagtcctacaaataaaataaattaaaaaaaattccagggtttaccaccagctctgcactaagcactaggacaagcactttacaaatatttcatataagtctcgtaacaaccccataaagtagatactattattctcattttacagataaagaggcaggatcagagaggttaagtgccctgcccaaggtcacatagcatgttcttctctgccatgaaactcccctaattcttccaycactttccaaaaaatatatctctaacaatttcccaagttcatcttgtgctctccttcgccacagccaccttgctggaagcctcctgaacacctgccacccagtcccggggacctggccagtctcttcacttcaattcattctttatgtagctctaaggcaaatatttaatttagtttgcttcatggtcaagcaggtagcatgacctgtgctgcattaaatgtcaaccattcaacttaggatttaacaagggatgccccagtagaggtggggacagttgcttcatcttcaagtccttcctccactgtagggggtcctctcactcatgctctgcctcctggaacactctgtgtctagcagccagagtccacagtgagaagggttgggaggtcggaagcagagcagattaggggagccacgcagtctcgtggcagtgaatgaaaggatgttttggtgacagggaccggccacaagctggagatgwtgaaggggcaggagagtcagcgccacagacctgacacctggcggatcctgacacctgctgagctccctggaagccttccatgaacaacactctccgaccacaggcacagcgtactctctgccagctcgacttctgtgcatccttcacactgtattaccttatataatcttctcccactgcttgttcaggcgaagttatttcagtgactcatcttttcttctcccaagataaactgtaaattcctaggtctcattttcttctgacctcaatacagtatcctgagcccagcagggctggagggaagctggcgtgatgtgtgacttcacctgcctttgaacagcgtgagactcagggaagtcacctcccctcctggcctctcctttccttcttataaacatcaactccctcctccgcattcaccaagaaaaatgcctttttgctcaaaatagtttgtatttattttctcagctttgcaatcttcttgtaaagacaagggctggacttgatcattcctactaaagcaaatggaattctttttaaacaatttacaataaaatctgacccagggctaatggcatggacacccgcttcaaatgaattggaggaaatggaacaaagttcagagagagaggtgcatctgattcaagtgcctcccacgaggcacttgtgttcactgacattaatgaactccagcagttcgcagggcacttgctgggtggcgtggggaagagaaagaagtttaaaatagacaggttctgccatcaaggaacttactctgtagttggggacacaaaacctgcacacatttaaggtcaaggatatgtcacaatgagactaaggagtccataaaactgaagaaatctctgagtttaatgaatctaggaaggcttcctggaagaggtgagatgtgagctgcctcactaggggtggagacagctggtaagtactggtgaatccatgaaacaaaaaatcaacaaccctccaatggggacaattttaagaaaaacaaaaaggttccctcttttcttttccccttttccttgcttctgaatttaaaaggaatagatgctcatgggtataaatttataaaacgggggaaaaaagaaaatgaacatcacttagaatcacgtaattcaaagataactattagaatttcagtgtatttgttctagtttttgtgtccatgtttatgtatattttaaaatatatatgtataaaattgggatcctacaggatagtgttaaaactgaatttcttcttatattgtgagcacttactttcttactgaaggcctttcggccaggcatggtggctcacgcctgtaatcccaacactttgggaggccaaggcaggcggatcaggaggtcaggagttcaagactagcctggccaacatggtgaaaccccatctctactaaaaatacacaaaaaattagccaggtgtggtggcgggtgcctataatcccagctactcaggaggctgaggcaggagaattgcttcaacctaggagacagaggttgcaatgagctgagatcgtgccatcgcactccagcataggcgacaacagcaagactccatctcaaaaaaaaaaagttttaaaacttcattttaatggctacttattatttcatcttttgactggatcctgatttatttaatcattctctgttgtttccagtttttcattattctgagtgacgcagcaatttgcctttggtaattaaagccaggaatcattcaggcagagcctggttttgttttattggtgctaaggaaatcaaacagtaccatgtggctgcaggagaggggtacatctgcaggggccgggacatgtatctcatctgggaaagattcaggattgaagagatcaagaggaaatgctgatgaaaatgaatttggggaaggaggcaggatttgagtttccaaacagatcttaccgggagtagaattaaacagcagctgaattctccctggggagatagtgtgggtgagacttgcctgaagtaacacacaaatcagtagctgtcagtggcctgaccttttggagctctagagcttccgagacactcacccgtttccggccaatcttggttaatctgattgccaccttaattgaggatggggatttaaaaggagagaaacgtgtctgattgatttaatgtcagggcttcaattcttcatgaactacaggcttctttgggctttgatatgctcttcaagcaaagaatagatgaaaatgaacagaatgtttttccattctctgtctctcgggaccactaacagcaggaaaattttatcccaaccattttggggaaatagaaagcctggtttcaaacccagcttcagctttggcaaagctgtacaatcttgtgtgccttggtctacttatccgcaaaatggaaggaagggaatctacttaatagggttgtggtgaagactagataagttaacagagtgaagttcttacaactattcctagcacacagtaagaactcagtaattgttagctttcatcatcatcatcatcagtattactatgataattattattaaaatctttttcccaacttaggagaaaaaaggcagggtagaataaaatggaatgttggagcaacgatagcccttaatgtcctttatctttattttattcttggatgtgaagtaccaatcgctattaagacatctaaatccaaggccaagcatggtggctcacacctgtaatctcaacactttgggaggtcgaggtgggaggatcacttgagcccaggagtttgagaccagccagggcaacaaagtgagacctcatctctaaacataaaaataaaatcagccaggcatggtggcgcatgcctgtagtcccagctacttgggaggctgaggtgggaggatcgcttgagactgggaggtcaaggctacagtgagcagtgatcataccttgcactgcataccaccatactccagcctgagtgacagagtgagaccctacccgaggacaaggctccatgaggaaacacaagtgaaagggcatcatcatgaccgtcaacaacagctaaagtgttttgagcttgtctgttccaggcattatgcattctttcatttaatctttacaaaaaccctatgaggttgatacagttatccttgttttacagatggcactaaacctaggctcttatctaatatgttgacttgtaaaaataaagaactgaggtctctgcctgcaaataccttatattgttggtaggtaaaaaatagaattgaaaatatattcaccaggaacatggaacatataatcaggatcataagaattaactgttaaacacacacagagcaaggttgctgaggaaactagagatgggatgggaaggggtcagaggagactaactttgaacattatttaaatgagaaggattccattgtttagtgagaaagagggttttccatgtcagaaagggtgaaaagaaaatagacatgtcctgagtgcctattattttaactgcctaacttgagcactttgttaaaaaaataaaatcccatgaggttagtattgttaatcttcagaagagaaaaccagggctcacagaggttagttaatttgcctacgatcacacaggaagtgaggaacagagtcaggaacagagccagggaggccctctgacttcagagctgcaggagatttgaactgagaataaatatgccaggtggggatatgaagaaaatgtgctcaagtaggaaaggacaatttccaggatggattattcttgaaaatcaggtgtaactgacgaaatctgaacagactctgtggatggcaccccccaagttcctggtgtggatactgaactatagttacgcaggatgttcacactaggggaggctgggtgaagggtacaaaggacctctctgcgcatttctttgcaactgcccatgaatccatatttcaaaataaaaagttttttaaaaagttggcagataggccaggcatggtggcttatgcctataatcccagcactttaggaggtggagacaggaggatcacttgaggtcaggagttcaagaccagtctggcgaacatggtaaaaccccatctctactaaaaatacaaaaattagcctaatgtggtgcatgcacctgtagtcccagctactcaggaggctgaggcaggagaatcacttgaacctgggagacggaggttgcagtgagccgagatcacgccacggtactccagcctgggtgacacagcaaaactcttgtctcaaaaaaaaaaaaaagttggcagatagtgaaggcaaagatgcttctttcttttctttttttctttttttttgagatggagtctcgctctgtcactcagactggagtgcagtggcgcaaacttggctcactgcaacctctgcctcccgggttcaagcgattctcctgcctcagcctcctgagtagctgggattacaggcacacaccaccacgcctggctaatttttgtattttagtagagacgggattttgccatattggccagggtggtcttgaactcctgacctcaagtgatccatccgcctcggcctcccaaagtgttgagattacaggcgtgagccactgtgctcagccaaagatgcttcctttgagcaacggtggtaactggtggaggattctggttcaggagtctgatgggccatggaggcacaagagcatcccagcatcatgccagagcctctccctccactccttagagcgaccaaccagccccacaccaggttggtcacaaatggagggagaataagatttgctgactcatatattgagtatccattatgagtcccccccactgtgccaagagctacctggctatatgagacattgccaagacacagggctggtttggaggctcttacagtctagttggagagaaaaggcacaatcaataaaatataagcggcttgggtatactgatgtttctcatggaaagttttatgtgttgcaaaagctcaaaggagggtgtgtgctcctcaggctggttggtcaaggagggcttcacaggggaggaagaattgaggcagagcctggaaggaggtgggcctaccaggagaacaggagaaaaagggggtcctggcaagagaaactgttgagcaaaggggcacacatgcatgtggtttcagaacctaagcttgcctgggagctccttgcaggcacctggcacccagatctcagtgtacagcaggcattccggagaatcattacatagtgggctgggcgcagtggctcatgccaacactttgggagaccgaggcaggtggattacttgagctcaggagttcaagaccagcctgggaaacatggcgaaactcctctctacaaaaaatacaaaaattagccaggcatggtggcacacacctgtagtcccagctatttgggaggctgaggtgggaggatcacttgagcctgggaggtggaggttgcagtgagctgagatcgcaccactgtactccagactgggtaatagagcaacactctgtctaaaaaaaaaaaaaaaaagtattaaatagcttaaataatatacacagttttgtattttatagcatagagagagcacgccttggaatacagcaaaactgggaccatgagctatgtgacctcaggcaggtgtgccacgccctctgtgggtttctttgtctrtgggaggtgagcaaaacaccgagtgtgtgctgggacaacactccataactggcagctccctggtcctcttcattctatttcttaagtgtttatctgggtgttgaattgtcatcataactatcgttgtgaatgtatgcttcaaattccagtaagaagatccacaataatgcatcaaatcttttccatattgtttgacatatatcttgtttacactttcatgctatttaaaacaatgctggaaagagtgtgcagacattacagctttttccattttctggattatttcattaggctggatttccagaaatagagtcaaaaggtatgcatatttttaagactcaagaatttcaatggtctcytcaggagcagaaaaggcctgagagtagctggaggggagattccaagcagcagtcctgtgggccccaaggctgcaagaagctctgactgcccagggaggagctccgtggcattctgcagctgtttgagggctttctgaagaggaggtactggaggataagaatggtttattaggaagggtagccatgggtctggctatggttgaatttgagtttagagagctaagaagaagggagaccatctagagargaagcagaagtcaaggcataagaaaataaggatgctgggtgcagtggctcacgcctgtaatcctagcactttgggaggctgaggtgggaggatcgcttgggcccaggagttcaagaccagcgcaggcaacatagtgaaattctgtctctaccaaaaaatgcaaaaattagcccagtgtggtagcatgcacctgtaattccagctattcaggaggctgaggttggaggatcacttgaacctgggaggcagaggttgcagtgagccgagatcacaccactgcactccagcctgggtgacagagcaaaatcttgtctcaaaaagataaagataagaaaagaaaataagggctggagccagggtggtggggaaagagaacagaaaggaagggccagatggcccaagcactgagtaacagccacccacgtccacaactgccaacacgcagagggagaagctgagagcctggaactggtgacgaaagcggggaccccactcccggagcttcatagccacactggcaatgcaaactggattagaaactcattccaccactaaggaaggctggcaccaataaaaccacaccaccagggtgatgtgcgagatttgagaccagccrtaagaaacaagaggaactggggccagagtctgaagactgcccagtaaaacagatacattgaaaagctgatgaaaactcaggggagaaagccacaggcaggagccttccagaaccagcatctatttctctcacacctgctaatcacaggcacaggacacacttcaccaggatgtttgtaaacaaaggaactctgagtggagcttagccagctggctgaaaggtatcgattaagtgcaaacctccatgacacaatttggaagacaacaaaataatttcggcgacaaacaagacataatttagacaaccacatggaaaaattcctaggctagaccatttaatgagaaaggtatatacccaactgcatccaaagtaggaccaaaactatgaaagttacgattacattaggacaggggatgtgcagaaaagaaaagagcttggctggctgggtgsagtggctcacacctgtaatcccagcactttgggaggccgaggcgggtggatcgcgaggtcaggagttcaagacyggcctggccaacatagtgaaacctcatctctactaaaaatacaaaaaatagccaggtgtggtggcgtgaacctgtaatcccagctactcaggaggccgaggcaggagaatcgcttgaacccaggaggcagacattgcagtgagccaagatcgcaccactgcactccagcctgggcaacagagcgagactctgtctcagaaaaaaaaaaaaaaaaaggccgggcacggtggctcatgcctgtaatcccagcactttgggaggccaaggcaggcggatcacgaggtcaggagatcaagaccatcctggctaacacagtgaaaccccgtctctactaaaaatacaaaaaattagctgggcatggtgacgggtgcctgtagtcccagctacttgggaggctgaggcaggagaatggcatgaacccgggaggcggagcttgcagtgagcccagatcgcaccagtgcactccagtctgggcgacagagcgagactccgtctcaaaaaagaaaagaaaagaaaagagcttgagcctgacctgtggtgtattaagcaacaatgaattttctcctttgttttcatttccattaacgtgcggatctctgcattaatccgaatggatatcttcaccctcccaatgttgtgtgccttcacagtttgtcagatgagcagtttagtagagtctgtccctctgagcctctgcgccctccatctcttcccactgccaccccgcctctctcccttcctcagctcttcattgacagtggcccattcctgccaaatatctcccactcctggctgctggagggacgtttcaaatagaaaggatgtcacctgctgttcactgctttcctccttcattttcttatcagccatcactagctcctccagatttgaattttaaaatyatcagaagccagtaggatgcggtggctcacgcctgtaatcctagcactttgggaggctgaggcaggtggatcacttgagaccaggagttcgagaccagcctggccaacatggtgaaacccccatctctactaaaaatgtaaatattagccgggcgtggtggcatgcacctgtaatcccagctactcaggagattgaggtgggagaattgcttgaacccgggaggcggaggttgcagtgagccaagattgcgccactgcagtccagcctgggagaaagagcaagactctgtctcaaagtaaataaataaataaaatcatcagaagcccccggtaatcacagggaaaatattgtgtaatgaggtaggaggtgggactcgactctgggggtggggcttgaacactggaccaaattgaggactagctaaaacaaggcagaagcagcttttcataagccacacccaccagtgtgccatgtcagtttaccattgccatggcaatagccaggagttactgtcctttcgacagcaaggacctgatgaataatcaatgacctgatgaatcaaaagttacaaccctggctgggtgtgggggctcaggcctgtaatcccagcactttgggaggccgaggcaggcagatcacgaggtcaggagattgagaccatcctggctaacacggtgaaaccccgtctctactgaaaatacaaaaaaattagccaggcgtggtggcgcatgcctgtagtcccagctacttgggaggctgaggcaggagaatgtcctgaacccgggaggcagaggttgcagtgagccaagatcgtgccattgcactccagcctgggcaacagagcaagactccgtctcaaaaacaaaaagttactaccccttccctagagatttctgcacatactgccccttaatctgcatataattaaaagtggtataaacacgactgcaaaactgccctgagctgctactctcagacagattgtctacatggtagccctgccctgcaggagcagtcatggagctggaacaccgctggagctgtaatgctgccacttcaataaggctgttttcttctactctatcactagcttgcccttgaattctttcctgggcaaagccaagaaccgtcacagactaagcctcactttgggggtcgcctagcctacattagtatggaatctttaataatctttattttagcatggtttgaaatcaggaagaggggaaaaaagcatcagacaagatacatcgtggccaccagagacaagcgatggcttctcatctcgctttaattgaccctggcttcgctgctgtgcccaaggcctggcctcctttgcttacttagaaagtgactccagtacaggccaggcgcaatggctcatgcctgtaatcccaacactttgggaggccgaggtgggcggatcacctgaggtcaggagttcaagaccagcctggccaacatggtgaaaccccatctctactaaaaatacaaaaattagctgggtgtggtggtgaggctgaggcaggagaatcacttgaatccgggaggcggaggttgcagtgagccaagatcgcgccactgcattccagcctgggtgacagagtgagactctgtctcagaaaaaaaaaaaaaaaaaaagatgccgggcgcggtggctcacgcctgtaatcccagcactttgggaggccaaggtgggcggaccacaaggtcaggagatagagaccatcctggctaacacggtgaaaccccatcgctactaaaaacacaaaaaattagctgggcgtggtgacaggcacctgtagttccagctactctggaggctaaggcagaagaatggcatgaacccgggaggtggagcttgcagtgagccgagatcgcgccactgtactccagcctggrggacagagcgagaatctgtctcaaaaaaaaaaaaaacataaaaaaaacaaaagtgactccagcacagatcatacggtgaatctttgttttattcattgctcaacacctaatattcaaatgctagcaaacacacaggcccttaaacccagttatcttatgcttgtgccccaggatgagcataatgaatgaggcttgagaaatctaacttagaaaatgaggcgtggagccttcccgatcttcctcaagcctgcattgactcagcttgcagatgcctgctgtctatgtctgtcagcttcaaattgttattaatgtctcagtatttttagggctcatcacagtctgtttgataaaatctaagtttcagctcctcagtgtggggagtggaaacagagatcagagtaggacacgactgtcggcttcctcaaaaaaactaaataaataatggctccccagcagcatctcagacttatggctcatacacacatcagccctgaccttacacacccagtccaggagaaccaggggtgagagcaccacaggagaagcatggatgcttttcctccccttggctcagaaagcccatgtctgggtatctgcacctgctcgtatgcacagggaagcaggtaagagatggatctggtgcctttgtttggaaacagcctacaatgctcatccataggggactggaaaggccaggtgcggtggctcacacctgtaatcccagcactttgggggccaaggtgggtggatcacttaagcccaggagtttgagaccagcctgagcaatatggcgagatccccatctctatttttttttccaaaagaaaaaaaagttttaacattaaaaaagaaaatagagggctggctaaataaggcagggaacagccatgcaatgcacactaggcagcagctgaattgaatgaagcagagctctgagcaccgccccagacagctctcaaacatactgttaattcaaaaggaggctgtggccaggcagatcacgaggtcaggagatcgagaccaccctggttaacacggtgaaccccgtctctactaaaaataaaaaaattagccaggcggggtggcaggcgcctgtagtcccagctacttgggaggctcasgcaggagaattgcttgaacccaggaggcggaggttgcagtgagccgagatcatgccactgcactccagcctgggcaacagagtgagactctatctcaaaaacaaaaaacaaamaaamaaaaamaaaaactaaaaaggaggctgtagaacacctatgatatgattccatttgtgtgcaccctcacaggccaaaccaatggggtgtgtatgtaaatatgtgcgtgaaatatgctgtcatgaacaaagaaagatctgtaaagatacacagcacagtgttaacgctggtcaccgagtagagctgggtgggggtgcctagggatggagagggtgaggagcgacttaaactgcactacccaatatggtagccactagtcacttgtggctacttaaattaaataaaatttaaaaattcagttcctccagcaaactagccacattttatgtgttcactagccacatgtggctaatggctaccacactggacagtggagacacagagcactgacatcattgcagaagtattactcatgtaattgaaaataaatgtaatttttattgtttctcccattttctcttcaggataaaactcctcacaaaatctgatgagcaaaagttgtctttaaagatttggaatcttggagttaaagcacacacgcacacacatgtacacacaggaactgttttctaaacttgttcggctctgttcttgctggaattttgaaccaaaggagctgattgaagatctagaagtcatgttgtttattcacacacacacacagcatgcaacacaaaatgcatcaagtgcattagacatagtagaaggtgaaaagaaatagaatgcacaagtccctgtccccttagagtaacagcatgcagccataatgaaaggaagcacaagtgtcactgaggtcagagagccagcgtgctgggacttccttcagagggtgaagacattgttttggtttagatgcctccccatggagatgaagtatcagtaacatgtggacaaagacaagaaaggaaggcattccaggcagggggaatagcatcagcaaaagtgtgggggtgccaagcacaagggaatgttctgagagacatcagctggccagactgtctggagtagcactggtaaagctggaggtgtcagggaggggaccgaaggtgaaaggccctcaaatgctaggccaagaggggaaagctgtcatcatgactaaataacagccactatcaccttctattgtgctcttagaatgcgtaaggaatctacttccagtggataaatggatggagcaagccctgaccctcccaggaggccactaagaatgtccctatcctggaagaagagcaagacaaggccctgaactataagtgtccagctggaagtgtgacaaacttggggatgtcacactgggctagtgtgtgacgtggggaggtggggggatatctggtctccagcccgcagtgaagtgctaaggagttatgaaaggaagtcagaaggaaagcagaggcttctgactagcatccacctgccccatagccaagtggtgacatgtgtgatcagagtagaggaccagagatgaggtgggtggaacacaggctacatctgctgctctccctcccttcatgcgggaggggtttccaaggagacattcagaggcaggagacagcagagggtgtcaggaagagcctcccagcacctgcccattcacactgggtgagtgtgtgacacgggtgggctgggaacagcccagagcagaggccatcatcacaaaaggagacaaggaccccaggggcactgagtcctggcagcttaggggaggtgaatttcgagaagaaaaatggctgagagaggaagaagcagtgagaactgagaagcaggtgaaggcacagggcccagccctcaggcctgcactggtgaccttcccaagaggttgtcagtggggaggtgacactggaatttcaaatagtgtgaagtgaataatgactatgaaagggggaaaggtgcaatctcagcttcaatgactgctggctcaagagcattgtaaaatattatataatcagctgagcatggtgactgacacctgtaatctcagcactttgggaggccaaggtgggaggatcgcttgagcacaggagtttgagatcatcctgggcaacgcagtgagaactcatctgaaccaaaaaaaaaaaaaaaaaaaaaaaatagctgggtgtggtgatgcgcacctgtaktcccagctgctcgggaggctgaagcgggaggatcacttgagccagggagttcgaggctgcagtgagctatgactgtgccactgaattcctactggggtgacagagcgagaccttgtctcaaaataaataaatattataggaatcatttatttaacaacaataacaacagaagctgttgttgctttgtctctgaatagatgggggcagatgtgctgccttggtgtgccccgccccccccgccaggtgggaacaattgagggatgcaggctgcttctaacaccagcagtgcagatccttgggaaccagtgaccctgggctaggggtgaactgccaaggtggtcctgacacctggcttcagttgtgtccttagaatccaaaatgtgtttggtagctttgatgataaaattactgttaatttattgttggtattttataacttgattggtattcactttaaaaatgttatttatcagtgtaagtaatgtattggttacatttttggaaggaagtgctttgtaagccttttaagctccaggaatcccaataaatggaagcaaagggaaaaaagttaatgcttctgtattcagctttctttaatgtgatctgggctcctcgtaggaattcattcatctgaatacctactacttggcacgtcgaggcattcgatttttttaagtacatgtggactctgggggtaagaagcattccaataaataactcatactctcaaagagcttgcatcatagcgagtagaatctatcacatgaaaacaatagtgttagaaatcaggatttgggctttacaacacattcatgctttcccctttcccaaaatatgcccagtttcctattgtggtcagcaggcagcctataaaaagcagggttactcaccttcagctttctaaatgaacacacagtatcaaatatagtaacagaggaagctttatttttatggagccaaactgattgagatcaagagtaagtgctttaaatatacagacgaactcacagatttaagatgcagattctgaaaagctaaagatccaagatcaatcattcgaacgcccaaatatatcatcagagagactgttgcagcatgcacgcagtgccagaacacaagacaggcgccatgcccagagcctccgaaacgtagagccagggccagggtggtcacggtgccaaagagaaatttcagaagcaacacttttgaaatgcaaaacagaatcagaagcaagcaccagaattctgcaaaaatgcaaaacaagtactaggttgagccctactaaaaatgccaagtaagcagcaggccaatcagagccaagacccactcttaatgcagcagctctaccgcgcatgggccttctgggaacacctgcacgaggtaggaagtccctcaagcagattctgcccatctcaagaagccaggagcagatggagtgagaacgcagctggaaagagwcagctcctgaaaagctctaaatgaggagtggagaacccttcctccaatgcagaccctcaggcccctggagagggtgaccctgttactgccacactgtcatcaaaaggatcggttgatggtaaaacatgtattacaagctctgtaattaacatcagcctcagctaacatctatgaagctctcacaatcggttaggaggtttgaatgcatttttacttaatcctcccaacaacactgaggtggggtctatcgtctccattttacagatgaggaaaatgaggcttagggcagttaartaacacttccaaagtcacattaactgctaaatggggtagctggattcaaacccagggctgtccgactacagggtcttcacacttaacccctggcctgcaaagaacacactgagattaatccatttcagtgtgccattagaaaaaatatataccattcctagccagagagtataggtccttatacagagatgtcacaagccagcacattattaaggaacaggtgaataataaggtcattaaagcctctgtgtacttaggagaatgacattactgtgggctgtgaggtcacaaaagccccaaggaggaaatggaaaaatcaatccttcggccaggcacagtggctcacgcctgtaatcccagcacttcgggaggctgaggcaggcagatcacttgaggtcaggagttcaaaaccagcctggccaacatggtgaaaccccgtctctactaaaaatacaaaaaaattagccaggggtggtgggtggggcgggttggggggcacctataatcccaactactcgggaggctgaggcaggagaatcgcttgaacatgggaggcggaggttgcagtgagccgaggtcgcgccactacacgccagcctgggcgacagagcgagacttgtctcaaaaaaaaaaaagaaaaagaaaaatcaatccttcacacccagccctgctcagccatgtctgtgattgtgctgagacagtgccggaggcctaggagagtcaggctttgttttgtcattgaaggtcccctgagagtcagcaacrccaatggcagtgcccaaaaggcaggccttacactcagatggccctgccgtatgggcctccccccactgccctgccggcaccatcagcttcccagctgccaatgggatggacttcccgggtcagcttcctctgcttgctactcggcacgtaagttgtctagtagcctgcggccctgaccagcagttctcaatgagccctttcactggtgctaggctgctggtaagagccctggtgcgggctggcacaggcccttgaccgtccgtctcctagtatacccactgccagcactgcaaaacagccctgggattgtttgcacggatgttttcttctcttccagggtttcctactgttttactgcagtataattaacatgcagtaagatgcacacatttaagcattcagtaccttgagttttgacaactgcttttacacttgtgtaaccatcacccaaacaagaggtaggacattgctaatcccctcacaaagtccccctttccagtcaacccactggcccaactatctgatttctattatcatagatttgtttttgcatgtattcttacataatcatttctgaaacgtaattagaagagtctagacagttatccacaaggcctctggtgatgaagaacacttttaattatatttacattctgccattaaaaatacatgctcacttctgagcattaagttatagggaaaaaaattaaaaattaaaaatacgcactcactacacgaagtgtagaaaatacaaaatgttttaaaagaaaattaaaaccattgcttacactgcctataaggtggccctgctcctcaaagagcactaaaaaaaataaaataaagtaaaaataaattaaaagaaaatttaaatcatccatgatccttccacctagaaataaccactgttagtgttctagtgggtttctttcagggccagtacatccacaatcacaggctggctccctggtgtggcattagttttttgttttttttttttaacaagtaggccaggcagggtggctcacgcctataatcccagcactttgggaggccaaggcgggtggatcacctgaggtcaggagtttgagactagcctggccaacatggtgaaatcccgtctctactaaaaatacaaaagaaatagccgggcgtggtggcgcacgcctgtaatcccagctgctcaggaggctgacacaggagaatcacttgaacctgggaggtggaggttgcagtgagccgagatcacgccacagcactccagcctgggcaacagagggagactccgtctcagaaaaaaaaaaagtaaataaagcttattggtgttcacttctgagtaggccatctacgttgcccgtgtgagaggcagctcgatcaaaaatcaaactccaggttgggcacggtgcatcccgcctgtaatcccagcactttgggaggctaaggcagggggatcacttgagctcaggagttcaagaccagcctggccaacatggtgaaaccccgtctctaccaaaaaacagaaattagctggacgtggtggcacacggagctactccggaggctgagggacgagaatcacttgaacccaggaggcagaggttgcagtgagccaagattgcaccactgcattccagcctgggcgacaaagtgagactgtttcaaaaamaaaaaaaaaatcaacctccaattcaaggtgccaacccctgtggctgagttggagccaacattgaaattcacatttattctcttctgtggaatatgtctggctctgttctctccattggcagtcatatgggcctctcgcagcacctcggttttgtcactcaggacagtggctagttttttggtttttgttgttgttgttgttgtttgtttgtttgttttttgattcggagtctcgtcgtgtcgcccaggctggagtgcagtggggcgatctcggctcactgcaagctctgtctcccgggttcacaccattctcctgcctcagcctcccaagtagctgggactacaggcacccgccaccatgcccggctaatttttttgtatttttagtagagacggggtttcgctgtgttagccatgatggtctcgatctcctgacctcgtgatccacccacctcggcctcccaaagtgctgggattacaggcatgagccaccgcgcccggccgacagtggctagtttttttatatcaccccctctccaaggtgaaaagcccatttgccattaactcagaccacccctaacaggtactccaattttgataatcatccctccagccactttcacaaaacacagtagcagacattctcttaattttatccaaactttctttcctgaaaaaaaaatggcactttaatgatattcttaatttgagttggaagagttttccagagatccaaagaatatgaagatgccagtttctaagtctccttttacagacacccctgatcaataaggtgactaacacaaagccatcgaygtggtctgattcatgctattggcagagggtatgatcaactctgataacatgtgtatgaaaacttttttaaaaaattatggtaaaatatatataatattcaatttgccattttagccttttctttttttttgagacggagtctcgctctgtcacccaggctggagtgcaatggcgtgatctcagctcactgcaacctccgcctcccaggttcaagtgattctcctgcctcagcctcccaagtagctgggactacaggccgcgccaccacacctggctaatttttgtatttttagtagagatggggtttcaccatgttggccgggctggtctcgaattcctgacctcgtgatatgcccatctcagcctcccaaagtgctgggattagattacaggcctaagccactgcacctggcccattttagtcttttttttttttttttttttttttttgagacagagttttgctcttgttgcccaggttggagtgcaatggcgcgatcttggctcaccacaacctctgcctcctgggttcaagcgattctcctgcctcggcctcccgagtagctgggattacagcaatgtgccaccacgcccggcattttagccatttttaaatgcagttcagcggcatgaagtccattcacactgttgtgcaaccatcaccatcatctatctccaaaattcttttcaccttgcaaaactgaaactctacccagtaacaacaattccccaatctccaccccccccccccccgcagtccctggtaacctctattctactttctgtctctacgaatttgactactgtagcttcctcatactactggaatcatatactacttgtccttgtgtgactggcttatttccattaccataatatcctcaaggttcatccacgttgtactatgtgtcaagattttcttcttttttaagactgaatattggccgggtgtggtggttcatgactgtaatcccagcactttgggaaacccaggcaggtggatcacctgaggtcaggagatcgagaccagcctgaccaacatggtgtaaccccatctcttattagcatgcttgtaattccacctactcgggaggctgaggcaagagaatggcttggtcccaggaggcggaggctgcagtgagccaaaattgcgccattgcactccagcctgggagacacagcgagactccatctcaaaaaaaaaaaaaaaatcaacactgaataatattctatcatacacagatattgcattttgtttatccgtttgtctgtcgatggacacttaggctgcttctatggttaggccattgtgaataatgctgctgtgaacatgggtgtacagatgtcttaagtctttgcattcatttctttggggtttatgtctattagtgggattgctagatcatatggtaattctatttttccctctctgaggagtcaccatactgttttcccatagtggctgcaccattttttcccactagctgtacacaatgatggttccagtttctccacaacctcaccaacacttggttattgtttttttttttgggrgggggggcgcggggagacagagtctcactctgtctcctaggctggagtgcagtggcgtgatctcggctcactgcaagctccccctccagggttcaagcaattattgtgcctcaccctcctgagtagctggaactacaggcactcgccaccatgcctggctaatttttatatttttagaagagacgaggttttatcatgttggccaggctgttctcaaactcctgacctcaggtgatctgcctgcctcggcctctcaaagtgctgggattacaggcatgagccactgtgcctggccaacacttgcttattttctgctttttttgataatagccatcctaacgggtgtgaagtagtatttcactgtggttttgattcctatttccctaatgatgagtgatgttgagcatcttttcatatgcttcttggccacttcttttttaaaagagatggggtctcacgatgttgcccaggctagagtgcagtggctattcaaaggctcaatctcactactaatcagcatgagagttttggcctgttccgttttcaacctgggctggctcactcctccttaggtaacctggtggtcccctgctctctggaggttaccatattgatgccaaacttaatgcagacaccagactggcatagtgaactacagcccagaactcctgggctccagtgatcatcccgcctcagcatctggagtagctgggactacaggcacatgtcaccatgccagctacatatcttttttgaagaaacgtatagtcaaatcctttgcccatttttaaccaaagttgcttgtttttgttgagttataggtgctctttatacattctggaggttaacctattatccaggatattatttgtaaatattttctcccattctgtaggttgccttttcactgttgaaaagcatcatttgatgcacaaaagtttttaattttactgtagctcaattgataatggtctttttttttttttttgacggagttttgctcttgttgctcaggatggagtgcaataatggtgcaatctcggctcactacaacctccgcctcccaggttcaagcgattctcctgcctcagcctcccaagtagctgggattacaggcatgtgccaccgtgcccagctagtttttggatttttggtagagatggggtttctccatgttggtcaggctggtctcgaactcccgacctcaggtgatccacccgcctcagcctcccaaagtgttgggattacaggcgtgagccaccgtgctcagcctgataatggtgttttcaataagaatctatgtgggatataagagaataacgttggaataaaacagatctgttttttgttttttttttttgttagccatgccacttaacgagctgggtgacttgcataaggcatttaacttatctgaaaatggcagaggaagcagggaaaggcatacccagcatgcagaagttttgtgaaactagaatgcatgcaaagcaagaattgtagcaccagcacttgaaagggacatggctcctacctacccctaccccagtgggggtcatgccattagacaggacctctacaacagacactgaattcacaaagggagaattatccctgtcttaccaatgaggaaatttacacatagccaggttacataaagaacctgagatggcagcacctacattccctctgggatcttctgaaaactcctactctggctgtaccaccagccccgggtgcctcagctgcaggacagaagagctggaaaacccttccagcccattcattccagctctcccagtttayggatggtgaaactgaagctgagagaggttaagaatcttgcccaaatttacacagcaatcagctctaatggccaactcttccccttgtccagaaatgtccttgataaaatagaaggacagtgctggtgcctcccagtgccacccacacctctccagaacactcagcctgctctctgagagtgctgtctgggggagaggagaacgttttgagcagccctgtggaaaaaagcttttggatggtcagacgtgcttactgtatttgccagctgctgggcccaggcctgcctgtaggatcaggcagttttaggagctggatgacagcaatgggaagaccctgctgtttttccctcttctgctttgtctgtatgtgacctgaagacctgtactgcacacaagctgaaggtgcacaaggctgcttagtggtttatcaggaacattccagctggctgcttccaggcaacgagatacagacatttattgcctttgcctcaaagggccttttcatcattcttgttttgttaaaaaaaaaaaaaagcacaagtwatatgaatggaaatcaaaatagagacttatccgtaattataccattaaatgaccttcctttcaaaagaagactgtgacatttatcctgagtgccacaaaccaaggaggaaatacacgagaagtccttctaacggccttaaccgtttcagcaggaaggccagagggctgtgtctacaactaacgcttccaagtgtggaggaaaaaatcaaatggctgtattctaatatattctttatttatttggaacaaaaatccatgaaaagacacgctgagatgacaaaatgttattgctgtcactacaggactctctctgaccttagagaaattcctagcccatgctcattgataccctggaaacaccggctgctatgtaggtatagatgaatggatgatatgtatcattattttatagtcagatgcaaacatttggactcttactactacataccaaagttcccggttagatgctagaaaaacaaagctgattaagatagtgtcctcaagaggttcacagatctgttgtgtaaagaaataaacgacaacagtaaactctaagatacagtagaggagaccyggagggaggctgcagagctccagattttcccagcatccaccctgtatgcttctgctctagaagcatccctcctgcacacgctgtgagcagctataaggtgctaggaatgcatcccttcattgtaagtcgttcctttctacaagatcttcaggcaaggtctttataaatgttctcgtaatttagggattattgttcatgcaatgtacaaacagtatttctttttctccagctaaaaagaaagtggggatatggaaagaagtctttatgaatagctacgacaagggtgggatgggagctctgccaagctaagattcaagactcctggcttctgaatgcttgagtttatctgggtccttctgcacggtaataagacagttagcgtttgaatccaggaatcctaattctcagatttatagacaaacctctcggtcaggataaaggacatactatagagtaccaagcttaaaagtccctatgggtccccagtgagggactcgtataacccaagtcctagatgtaaggccacaagttaactatgtaaaatctatgaaaatattcaatttggagttctttaatagtgaaatttgctgtttggcataagacacgtgcaattgccatcaggcacaaagtggtgttttaatgtcacatgaagctctgtgaatgcttgcttaggaggcaatggagtgaacagacttgaaccagctgcatgacattgggtaagttattgaactcctgaatctcagcattctctcccaaccacagaaacaatgatgacatccacctccaaagagttctcctgaattgagataatgaatagaatggcatggaataaacattgcaaaattttagtcatgcatacgaatttagaattgcataaggatttagataaagatgtcacctctgtcctctttgtggcttaagagatgttcttatctttccagtgcagagatgagagggacacagtcatggattgctaacctgtgggcagccctctagaggacaaggaagtgttcacggtgatcagttcatggttgtcccctctcagggtggacagacagcaccgaggcaggctcctcagtattgcaggagccctgtttctacgttcttactaaccagacccttctaaggatttttattaacaaatacagcctatatatgacacactcatccttgtatgcagggattgtcactttctggaaagggtatggctatatttcagaagcatccataaaaattacttgcatgggtcaggtgcggtagctcatgcctgtaatcccaacactttggcaggcggatcacctgagatcaggcgttcaaggccaacctacatggcaaaaccccgtctctactaaaaatacaaaaaattagctgggagtggtggcagctgcctgtaatcccagctacttgggaggctggggcaggagaatcgcttgaacctgggaggcagaagttgcagtgaggtgagatcatgccactgtactccagcctgagtgacagagggagactccatctccaaaaaaaaaaaatgaattacttgcatggtaataatatcacctttcacaggtacagtgtcctgcaatataagtccatgtacatagacattatctcatttgacccccctcatacatcctcatgagtggggcagactaattatcccacttctccagggggaggaatgagctcagggaaagatgaaccaaatgtccagggccctctggctggaagacggtcatctgggacttggaccaccacgtgtccatcaattccagcctaacccatggactgcacagctttgctgtctagggataagggatctgcgcaggactgggcctgcaccacacagcccggtcccaggtccacctcttagaagcaccaattgctgcttagacctgaagatgtagggaaggaattttttgtttgtgtgttttttggttttgtttgtttgtttgacggagtctcgctctgtcgcccaggctggaatgcagtggtgcgatcttggctcactgcaacctctgcctcccagattcaagcgattctcctgcctcagcctcctgagtagctgggactacaggcacatgccaccatgcccagccaatttttgtatttttagtagagatggggtttcattcaccatgttggccaggatggtctcaatctcttgacctcgtgatccgcccacctcagcctcccaaagtgcttggattgcaggcgtgagccaccgcgcctggccagggaacgagttttaattcacacccaaaccatcagaagagcagaagctctcctgcaatgccaggctcctggtttctgctcttctccaggccaagcactgactgaccacggaaccaatctctaagaacactgcccatccaggtgtgtgtgtggcccagccttggtggtgacaccccactctgcagtctgcctgtctctgaaaggcatgcccatgctttctttccaggccattgtcggtgcttgtactgtcttccgccctcctcagcctactctctggcctgtctctcaggacctatcctcattgtggtccccaaagctcttcctggggcctttctttctctttgacaaagcaaagctaagggagctgggaaaggtgccaagagtgagaagtgagagaagtgatccagaagtgagagctcccagcctcgctgttgactggcctgggaccttcagccctgcctcttacattctcttgcccttcccaaattattaataacacatgagtctgaaatacagtgagctccacagaggaaagacctgtattctctggactattcagaatgttctagggacagtgtgataggaggctgagtccacactctggagctggaatgctgaggttcaaatcccagacttttcacataactgggtggccatggagaagttattaaacttctcaatgcctcagttttctcatttctaaaataggaatactaatccttcatcatggagttgggggaagattatataagacataaaaactgcttagtacagacaaatttatccccataaaaaaagtgcttagaattctgcctggcacaggctgggcaaagtggctcatgcctgtaatcccagcactttgggaggccaaggcrggcagatcacaaggtcaggagttcaagatcagcctgaccaacatggttaaaccccgtctcgactaaaaatacaaaaacattagccgggcatggtggcacacacctgttaatcccagctactcaggaggctgaggcaggagaattgcatgaacccaggaggcagaggttgcggtaagcagagatcaygccactgcactccagcctgggcgacagagcgagactccgtctcaaaaaaaaaaaaaaaaaaaaaaagaattctgcctggcacatagtggtgcccaattaatggaagccacattaacagtaactgtgttgttactcagaacccacctgaggctgaaatatacagagtgagtaagaagttacaaagaagcgaatgaaaaagatgatgcctcagaatgcattcattcaacatggtttttgaggaccgggcagtgttctgtgccctaaagatgcagtagagaacaagagaaatgtgttctctgccaggcgcagtggctcatgcctgtaaccccagcactttatttatttatttatttatttttattttttgagactaagtttcactcttgttgcccaggctggagcccartggtgtgatcttggctcactgcaacctccgcctcccgggttcaggtgattctcctgcctcagcctcctgagtagctgggattacaggcatgtgccaccatgctcggctaatttttgtatttttagtggagactgggtttcaccattttggccaggttggtcctgaactcctgacctcaggtgatccacccacctcagcctcccaaagggctgggattacaggagtcagccaccgaacccagccaatcccagcactttgggaggccgaggtgggcggatcacctgaggtcaggagatcaagatcagcctggccaacatggtgaaaccctgtcttcactaaaaatacaaaaactaaccaggcaggagtggtggtgcacgcctgcaaacccagctactcgggaggctgaggcaggagaatcacttgaacccgggaagcggaggttgcagtgagctgagattgcgccactgagctccagcctgggcgacacagcaaggctgtgtctgaaaaaaaaaaaaaaamacacacacacacacaaaagagaaatgtgttctctgctttcatggagcttacagtttactgggggaaacaaacaagagaaatattagtgatgaatggccatgcggtgaattaaaatatggtacgcaaaggagtgtgaccagatggcctcctgagatggtgaaagcaagaacagcttttcagtgaaagatctcagaagatcacatcatccatcaaaagagaaatcaggctgggcgtggtggctcacgcctgtaatcccagcactttgggaggctgaggcaggtggatgacctgaggtcaggaggtcgagacccgcctggccaacagggtgaaacccccatctctactaaaaatacaaaaaaattagccagacatggtggctcacgcctgtagtcctagctactcgggaggctgaggcatgagaatcgcttgaacccaggaggtagaggttgcagtgagctgagatcatgccactgcactccagcctgggcaacagagtgagacttggtctcaaaaaacagaagaaaaaaaagagaaatcatatccacaactgcaaaggggggtggagcctccatgagcaaaccaggaggcagctgagagcagggccagtggcaatttcacsgaggggaatcagtcactcaacctctccacaaactcgcatttggaccaatcttaataccatgcaaacagataaagagcagattaaagtgactatattttgaaaagaaatatctaatttagaccaaggtttaggaagtgtctcctcttcyaggatgaattcctctcaaatcttagcatcccacaaaagctgtattcgtcctaggcaatctcattaattttacaatgctaatgaatcttgtaaatgactttcccsctcttaattgtggcctacagtaagctcaaaatggaatttgcaacatggcctgcttatatgcatttttttctctgaaataactttattcctggcttttttgtgtctaagattttctttgctttgatctctttatgtattgtcatgtgtgtgtgtaaaacatatgcctcaaatcttctttagaataaatgtatagctctaggtaatttattttctattttaaaatcaactttttaaaaataactgcttatataacccccattttatgtaccatggaaaaaaatttttttaagtttcaattcaccttatcctcacccttacccctgcacccccacacagagctttttttaaaaaggagccaacatcatcctttgcatatgcacagaaacttgtggtccaaagctttcttgctccttaagccacacctgtggctgcaacaactgtctcctcctctgcttctcttcattttcacatcacctcccaccaccctgcacagctgcccccagcttgatttcacttcacatcacttgagcaaatcagtcctttgacagtttcaaaccatcaatggctcccactgctcacaggaatgagtgaaaactccttatcttgacattatctccttatctatttttttttttttcagatggagtttcactcttgttgcccaggctggtgtgcaatggcacgatctccactcacagcaacctccacctccagggttgaagtgattctcctacctcagcctcccaagtagctgggattataggcatgcgccaccacccctggctaattttctatttttttttttttttttttttagtagaaatgtcgtttcacaatgttggttaggctggacttgaactcctgacctcaggtgatccacccacctcggccttccaaagtgctgagattgcaggcttgagccaccgcgaccagcctatctccttatctatcacataattctccacttaaactctgctcaaacccaggcagctccccctgactctcgctggacaggtcttccccatccccacctccacgcacacttcctcacattggtgcctccaccagccacacctgcctcccttctctgcccctcrgtagaggagaaagggctgttgtttctgaagcctgcccagatgactccacctcgcactggtctcttccacttcaagatactgctggttgaacatctgatgagtaactccattccaccgtgcaaaacagtgcaactttactgaactttatatcatttaattgtttgcatgttttataacttgtttgcccagttaaattctaatgttcttgacagaaactacttttatatattcttctatccctcatgatggcctctgtagtatcatacatagctgctactccataaatacttgatagcttatatccctagtctatatcccttccaaacacagagcagacagcaaaagacaggcaagtagttaataactcatactcccatgacgatttactaacacgcaaatagttagaagacaaagaagtgtttcactaataataaagaatgtaagttaaagtgatatacattttctatcaaattagcaagtactaggggaaaaatcttaatattgaacgctctcgagagtatagggagataggtgattttataactgctagtaggagtataatggatacaaactgaaagcaattgaacaatatgtaactagtcttaaaatgtttatataccttgaccaatccatttgaagggctacagtcgagggaaaaattccgctagtaggagtacaacggatacaaactgaaaacaattggacaatatgtaactagtctttgtagggagcagccccacagggtgggtgggtttttctccccatgtgtggagacaagagattgtagaaataaagacacaagacagagataaaagaaaagacacctgggcccgggggaccactaccaccaagacgtggagactggtagtggccccaaatgcctggcttttcctaggttatgattgtagagcaaggattattataatattggaatagagagtaattgctacaaactaatgagtaatgatattcatatataatcatacctatgatctatatctagtgtaactcttgttattttatatattgtattatactggaacagctcgtgccctcggcacctgggtggcttgccacccacaagtcttaaaatgtttatataccttgaccaatccatttgaagggctacagtctagggaaaaattccgaagttcacagaaagctttgagtaccaagtacttctccaggggctgtaattcagaaatacccctaaatgtacagaaagaaaattatacatcctttcagtgcaccgttatgtagacattaaaaatgatagccaaggagtttactaacttgtggggcatgcttatattctagtgctaattttaaaaaaaaggatataaaatgaatgattccaggccagctgtggtagttcatgcctgtaatcccagcactttgggaggctgaggtgggagaatcacttaaggccaggagatcaagaccagcctaggcaatatagcgggaccccatcctacaaaacacagaaaattagctgggcatggttgcacatgcctgtagtcccagctactcaggaggctgaagcaggaggatcacttaagctcaggaggttgaggctacagtaagccatgatagtgtcactgcactccagcctgggggagagtgagatcctgtctctaaaataaataaaaggttccaaccgtctaaacaaacacatggaaagaaagatattagagcagtaaatgttatattgtttatagtttactgtattttctagattttctagagggattcgatgattttttatatttttcctttgtttgatagaaggaacggtatcacagtactgttcttaatcttatggaacataaatttttatttgttttatttttgcctttaaaagaaaaattaagggccaggcatggtggctcacacctgtaatcccagcactttgggaggccaaggtgagcgtatcagtgtgaggtcaggagttcgagactagcctggccaatgtggtgaaaccccatctctactaaaaatacaaaaattagccaggtgtggtggcacacgcctgtaatcccagctactcgggaggctgagacatgagaactgcttgaacctgggaggtggaggttgcagtgagtcaagrccacgccactgcactccagcctgggcaacagagtgagactgtctcaaaataaataaataattaaaaaataaaaaaattaagaaacagagaaaagagagttaagaaaaggggaagggaaagtgggggcagctctcttatcctaattcatctctgccatgagataaacactgctgtcatctttccagaggcaggaaagaggctcagaaatgctcaggttcaagattacccgagggtcggagctagggttcagacccaggctgtggggttcttggtgctccttgaagccaggatcaaaaagaaatagcaaggagagggctgaaggaggtgaacacaaaaccagagcggtaattgatgtcatagatagaaggttgctttaaatgggtagaactgtggatgatttttttctccactcttttccagatttttctgtaatataatattacctttttatttttatttatgtacaagaaaaaaactgtgaccacttgtattcactgaactgtgagcagcaagagagaaaacaggctcacctggcccccttctcaaggggaataaaggagttggagtggtaggtgggagggggaagggcacacagctcccacatgcataggccatacctggatcatggggctgcagaaaccttaggatctgggggaggaggctggtttatgtgtgtgcacatgcgcacatgtgctgtgggatcgccctgaggaggagcagggagtctatggagatttctgcagagtaagactttgtacttcggccgggcgcggtggctcacgcctgtaatcccagcactttgggaggccgaggcgggcggatcacgaggtcaggagatcgagaccatcctggctaacacggtgaaaccccgtctctactaaaaatacaaaaaattagccgggcgaggtggtggacgcctgtagtcccagctacttgggaggctgaggcaggagaatggcgtgaaccccagggggcggagcctgcagtgagccgagatcgcgccactgcactccagcctgggcgacagcgagactccgtctcaaaaaaaaaaaaaaaagactttgtacttcagggggagcctgccttgccctgcagtttctccaaccttttggcaacagtctcactcacgaaataggattccgtcaagcacattttcggtgtggttttttgttttgttttgagatggagtcttgctttgtcacccaggctggagtgcagtgatgctatctctgatcactacaacctccgcctcccaggttcaagcaattctcctgcctcagcctccccattagctgggattacaggtgcacgccaccatgcctggctaattttgtgtttttagtagagacggggtttcaccatgttggccaggctggtctcaaattcctgacctcaggtgatccacccaccctggcctcccaaagtgctgggattacaggcgtgagccactgtgcccagcccaagcacattttcaaaaagttgttcactgtcgctatttacagtcagcattctcaaccactaagcgggacgagaggcatttgctgaggatgaggcagcactcagaggtgaggaagaattagggcagctttggtgttagtgggatcggggtgcacagactgtggttggggaaatcctttccaaacgtccctcctagctggctgccctaattcagagggtggcatttctcagagctctgtttcacctcagcggggaaacgggatgctccagcccagatgagagcaacagggaaactcttagctatataattttttttttttttgagatggagtctcgctcttgtctcccaggctggagtgcagtggcgccaatctcagctcactgcaacctccgcctcccaggttcaagtgattctcctgcctcagtctcccgagtaaccgggattacaggtacctgccaccacgcccggctaatttctgtacttttggtagagacggggtttcgccatgttggccaggctggtcttgacctcctgacctcaggtgatctgcccgcctcagcctcctaaagtgctgggataacaggcgtgagccaccacgcccagccttagctgtataatgctaacaaaaagaaaagctcatgggaatccatttttgcatagaatttgctaatgatcttcccaccccagtaaaaatgctttcattttttcakgtcccttgtcagtctgccttcataggattcccacacaaaactgtgggcagtcactgtgtccttttagagagccatttccagaaactgatgggtttaggaatgactgagtggtgaggagacagctggggtgagtctgagaaagggaagtggctcagcggcttggcactggcacagtcgaggtgatgtgcctgtgtaagcgggggtggcaggtgatacaaacaggctgtgcccgagttggcagagaggaaaggagggaacaggtccaagggggcccaaagaggacaggctcttgagcaaccagtttcaggagctcggaacctcttgtgatgctcacaacagacctggaaggtagacagacatgcgtttcacttttgtatacagggatttaattctgagtgacaattccacttgcctgaggtcacccagccatgaaagggctcctggattcagatgggatgacctcagaacaaggattccttctatcctagatagcactgtgtccagcaaagacatggggttcccagcctcccataagcagaaggaagaaggctgagctgtggagggcagaggcagggtgaggagggggagggatgggaaacggagatcctccagagctggacagatgggaagacaaatttatagtggcacaagtcaccaaggtgggtggacaaggtacacctttacctaaagctcttaggtgactttcggctccataggggggcctctctgcccatcacgttaataaaacccctggtggtatttttctaatgagactttataggacacacaggggaggtcaggaggtgggagggggagaagcgcagtgccaggaggcccccattttcattgtgccctgttccatctaactctgtcaccctggaaaaataacttgtaaaacaagaggaaaattgcaattataagaagtctataattctatgatccccgcccccaaacctccttactcactttttttcatcactctattgacttctggtgagaaaatgattttaaatatcacatgaaccctttcttttcatgaaagtcaggaatatacgaaaatccaagcagttgagtcctcaccagggggagtgggctccctcccacacctcctaagatcagactctgcacccagcaactcagtagtaatttcccacccaagcttggtgtgactttcctttgctgcaggcaactgcccagaggattcctccattacaatctttctatgaatcattcagggtaaataccatatctgtttgcatctggggaaataaaaatatattataaaagagaaatgaaaacctgagatgtgtctgaaaatagcacccagatgctttgattccccagttcacctttctgactatccagctcttccttgtcttgcttcatacaacagaggcagcctgggaccccsaccttcagatatctcgggtaaacgaccaaattatcttggactaaatgcaatgaggcagcccagcagaacccagttcctaattctgacccattctgatgagcctgtcctaactccttccccactgcaggtgcccctgcagtcacatgcttttgtcaaatgatctgcagcttcaggctgctacctctgcagaaaagaagagggggaaaacagagagagtaaaaaaatacacacatactcctatatatatacatacatatcacaacctctggcttataaagcataaccgcctttttacctttccccagagtccccagtggtcagcagcacagcctctcaggccaacctccccctcctcccacttggtccaagagaaatggtacttgctgaggggacctgctgatgtctcaccctggatcagaaatgcaaacgtatttctgagcaactgggcagggaaggagaccgatgaaaaagttgagtcagtctctctctctctctcagtaggggggcccaccaattgctgagcctttccaccaggctctcagcttcctctgcctctaacaaactttgtgactcacagtctgttcgcggagcgaggcagctgagcagccgagcagcctcagtgatgggttaaattgggaacgcactcttctccaaacactgacccctcaagtgcagcctgagcccctaccttgcagtgggggtgggaggtgagcacagctccaattattttgctggcactagaagagctgccagagacctgggttttcatggacttatgtctaccgggatcacacacacacgcacagcccttggtgggctgcaggctcaggaatgcagtccattcctagactggtctaggtctccagtgctccattcatcagagctgcaatgtgggacccaacgcgctctctcttcttcacccacactgcctgcaaaaccagagggagtcctagcaaatgatcaagcagagccgtgcatcgtgagggtctggctaactgttgcacggcagttgaggggatggcggtggaggcggggagaggtcagggctgtgctgcaccctctcagcagcgtctcctcccttcatcactgcggagggaaaatctggaagttggtgaacctggatcccgcggggcggcaggggcaggcagaggccgagtccattcaggcgggcgagacgagactcggccactggctgctccccgggcctctgcgccgccggcgccgcctcccgccttctccgagccgcgcagacgaccggccgcgggcgtctccctcagccctggaccggcttcccacagaaaactcccaggcacaaaccgcttttgttaattccgcaaatgctgccacacgaccacctcctccagcactcccggtctgctcggctccgggagacccgctttcccctgagcctccgccccccgaaggaccaccgcccagcaccggcacgcgccgggcctggagaggaccccagggtccccggcccgaggcatctttgtcctcgcagcgcagacgcgcgcgcacagagcgaccgcaacagccccgccgggcaccaggtcagcggcctggccccgcgccagggccgtgcagggggacaatggtccgcgccggggaagtttgcggagtcgcccccgcgggcccgggcccgggcgcggagccctccttaccgtacatctcggcggggcgcgcgcctctcgagaggccggcgtcgctgcggsgttcccagccagccctcggsggcgcccgcctttcattcacagtcggggcggggactggcggcggccgacaggggcccgggcggggagggagcagacgcgggggccggccgcgggcaggacggagccgggcgccgccagcccattcagcgccgggctgcagcggccgcctccgctcgggttgctgggcactgctgcgcgcagggggcgggggctatgctaatactaatgctcctccctcccggctcggccaacccgaggcctctgcgagcccctcgccccgccccgcccctgcgccccgcccccgagaaacccacagccggagatgcgccttttccgaggctgtcgccctaagggccgcagcgtgcacctgcggagctacccaccccaactccctgctcctgtcggagcgctcggaagctctccctaacctggggtcctcgaggtcagccggggcgctgagagctgcaggtgcacccctcctccagttctgtccaggctgcgtgggctaagccggggggcgcaaggatgggaattggggaatgacttccaccctctcctggctaggtaccttagctgagcgccgttctctgatgaagccctccagccctcagctgcgccctaccagctactctctggctaggtgcccagccactctctggctaggtgcttgctaccaccaaacagcgtccttcccgggtcagggacgcaggaaacgcaccccactcccaacccccaagggctgcaggaagtccgcttgcttttcctctccctgatttatatgtgtaattcgcaagctttgccgccaggatcctctccagctgagccccagcgccgacttgaattccagctctgcacctgccgtgaccctatgaggaacaggcacagagaggcagcggctcatgcctacgcccacacctgaagatctctcctaagctagctcaggacttccctgggcttctcatccagccttctttacattgcacacgttcccgtctttttttttttttttttttttttttttttttttgacatggagtctcactctcgcccagggtggagtacagtggcactatctcggctccctgcaaactccgcctcctgggttcaagcgattcttccacctcagcctccagagtagctgggactacaggtgcgtgccaccacgcccggctaatttttgtattttttggtagagaagggatttcaccatgttggccaggctggtctggaactcctgacctcaagtgatccgcccgcctcggcctcccaaagtgctgagattacaggcctgagccacttctcctgcccctcctggcctttcaatatcgatttcttagtttctcttggcccatggttgagagttgtttgggttttcttttgtttttttctactggtagaaatattctactagtagaagttagagaggaaaggaacttaaagatacttaagaactgaacttcattttacttcatttaacgttgagaggttaatttatgttgttaggctgggctgtgtgtctgtaggccaatgatctactctctcaaccccagcttcctgcaggactgttgggaaactggaataaaatctacatgaaatgacacagtgggcactcatgtatattttttccttccttcatggctcaaggcaggaacagagccagagaaagaatccaggttgccagactcttgaaacagtgctcagtctgttgcactcaaaacttatgtttcctatttttctctggcctgggcctccacctcccgcccgcgccccactctcttgctgtttccaggttttcttcttcttccttgacctctttgactctcttagcagcatgccagccccaagggaaaccctgggatggttcctggaacacacatttagtctagacccccctaccccgggcacacactccctgcatctcacaaataacctctgtctctgttcttcagttccaggaccaggccaggtggctttaagattgactgagagtcagacttgaactggagcaggaaggagaatctcagctctagcttgatatgatcacccagagacactcccttcccacaattctgctcaacacaaaatatactcatgaaacattggtgtctacagtacagaaggaaatgcagtgtctgtcttcaaagaatgaaaggtctagcagggaattccagatgaatactgataaaaacattacttgaggccagacgtggtggctcacacctgtaatcccagcactttgggaggccaaggcaggtggatcacctgtgatcaggagttcaagaccagcctggccaacatggtgaaaccacatctctactaaaaatacaaaaattagccgggcatggtggtgcatgcctgtagtcccagctactcgggaggctgaggcaggagaatcgcttgagcctgggaggcggagatttcagtgagctgagattgtgcctctgcactccagcctgggcgacagagtgagacactgtctcaaaaaaaaaaaaaaaaaaattactgggcaggaaaaaaacatagtcaattctgcatgagaagtacagacctctatttagaaaattcacaaggctgatagtttaatttgttctttctatcagctatttaccaatcactccctatgacatgctagacactgtggaaggtacttaggagcggggagacatgtaaaaattatcataaaatcttataatgactatggaggcacatacaaggagcagggaagagtttcatgaagggaaaaagaaaaaacaattcaggtgtgggaggaggggcacagggcttccaagccctcccccaggcaccaccctccaggaacctcgatgtgttcagttatcccaaagctccctgaaccctgtccgcttgggtttttatgaaagctttataacgtcagcattccttcccccggggtatagggtgggaacctctctgggaatggtcttaagaacaaccattggaaagtccaggaaagattagagtcctgcctgggggcaggtgaaaggagggcaggagaaggagagagtctgtttcctgtggcctaacacactcaatattacaacaaaagactgtaacaagggctatgggagttatgagccaggaatcatggaggaaaactgtctatcataacaacacagcattcaaggtccttccaacagggccccagacttcctttcccacctggcttccacctcctgttccctcctcaactgtgctcccactagatgggcttgcacaccacacttaccatactctttcctctaccatctctgacctttgtaaatttcagtccctctgaacaacttcagcaaattaattgaacccgaagagggagtcacgggaaccccaacttgaagccagttggtcagaagttctggaggtctggacttacaactggtgttgggggaacagtcttggggactgagccctccaatgtgggatctgacactacttttcagtgtcagactgcattagaggacacccagctgcttggtgtgtggggaaacgccccccccccaccccgacatttggtcataactcttctgcgttgattgttgtgatgtgagagtaaaggaaaaacgctgttacagagtattttccccgtaaaaccgcccaacccaaaagccttcctgtcagctctagggttagcagacgagcttagccaacatggcaaaaccctatctctactaaaaatacaaaaattagccgggcatggtggcaggcgcctgtaatcccagctacccaggaggctgaggcaggagaatcacttgaacccaggagacagaggttgcagtgagccgagatcgcgccactgcactccagcctgggcaacagtgtgagactctgtctcaaaaaaataaaaatacaagatgcccaatgtaatttgagtttcaaatatataaggactgatttgtaatgtacgccccaggcagtaggtgagacatactaaaaacattttttgtttgttttctgaaactcagattccacctaagttttatctggcaactgtagttagcaacagccattggagggtgctcctggatcctcatgactgaatcaggcctggggtaggcttccccacccatgctcccaacctgtatcaccaaacagatcccactagaatgtggttcctaaggagatagggataaggctgctttggccagtctgtcccctttggtatgggtgccttggccagaggcctttggccctgcagatgccagcttctcccatctgtgtgtcacatggcctgtgagaaccatgaaaagaggctccaattctctgctgtcccccaggggctcagcagacaacattgttctgcgggctgtatgcattaaatggcaaaggaatccggcccatacccagcttctctgaggtgcagtcaaggtgtttagacaaaatatgtgcaggaaatgatgctgtagaggttgaccacggtggcattatgtatataaggaaactgagcctgggagagaatgcagtcttcgggctcacagtctagaacagaagggctggccaggtatggtggctcacacctgtaatcccagcactttgggaggccgaggtgggtagatcacaaggtcaggagttcaagaccagcctggtgaatatggtgaaaccccatctctactaaaaatacaaaaattagctgggcgtggtggcaggcacctgtagtctcagctacttggaaggctgaggcaggagaattgcttgaaactgggaggcggaggttgcagtgagccgagattgcgccactgcaatccagcctgggtgacagagcgagactctgtctcaaaaacaaaaacaaaccaaacaaaaaaacaaacaaacaaacaaaaacaaacaaacagaaggtcggaactctaggatctccctctccagaatagtgcacccatgaagaggtgctgaacagaagtcagccatttaggtgagctatgaaaaggaggcaaagtgagaattgggattcctatcttaaaaagcttcttaactttagctgcagaaatccaaaacatggggaccggtatgacaggaaggcaagtagaaaagacatcacatttactgagtgccctaatgtgatatgcctatgccaggcactttacacgggttgtgtcgtctcatggaattctctcagcacccgtgcaaggtaagtactactattcccattttacatctgggaaattgaggcccagagaggttcgactactctctagtacatgggcaagcagagattcaaacccaggacactctgttcaaaacccattttctttccaccacactatgctgtctcgtggcacacaccaatgtgcacatcacagctgcactgtaagtcaagtatagttcggaattcttgacccgcatttgctcctctgcctcacctgtttcatgtcccccttcactgggtttggagggtagggattggagagggctgcaggctatccataacatacctgggcacttaatttccaccctgctcccccaggcctcatccatggtgggcctctcccatgaccttgactggaacccaggggcctcctgggactggtttggtcaggccagaggaactaagccttagaaaggttactattctttggccaaagtgcaccctggtaaaggtggtcctctgctatgacagctcaaatgatatcctctgccaagagcaagcagcacagtgaggtcccaagtttccatatgaactagagactgaatttccctgcgtgtcacagaaagggaggcttagaagtgggaggaaatctacagccattgcataaaacgcaggaacccccactcgcattccaggcttcagcatccccgtcacatccccatcatcacatcaccagggcctgtcctgtagttacaggagtctggtttcctggcactccagcctcacacagcccatcagctcaactgtgtctacagaaaagcctcttatctcctcctcatcagctacaacaactgcagcccctcttgcctagggcgccagccttgagcagccaacggctttaaagcacctcccagagggagggaagagggaagaatatgacagtccagggaatatagcttcagggaaaaaaaaaaaaattgtgggacctagagaagggctcagggagacccagaggggagaatgagctcctaacgactgtcacaca

SEQ ID NO: 96799 - DNA, 19440 bp, Homo sapiens
  misc_feature (1)...(19440): n = A,T,C or G
gtgtgcgccccgggcacaccggccactgcgctgggcccttcccgcctccttcaagcgcaggccgtgccgcgggccggtcctgcccagggcgcctgcgggggaggccgggccgtcaggcggggaggaaaggacagagcctgaggatctgaggagcccgtgggtgaggggctggcggggccggagggggtgagctgcaaggactggggtgggaccacggaggggacgggtgagcctcggggacgcacggtcactgggaggccgaggacccccggggctggcaggaggtctgtgccctgggtgatgccacttctcctattaatctccttttgtggccgggcgcagtggctcacacctgtaatcccagcactttgggaggccgaggcgggcggatcacctgaggtcaggagttccagaccagcctggccaacatggtgaaaccccatctctactaaaaatacaaaaattagccaggcgtggtggcatgcacctgtagtcccagctaactcaggaggctgaggcaggagaatcgcttgaacccgggaagcagaggttgcagtgagagccgagactgcgccactgcactccagcctgggcgacaagagcgagactctgtctcaaaaaacaaacaacaaacaaacaaacgtctgagtcatttctaagtaaaacactgaaacattaattactaagcgtaagtttaagcttatatactttagtatcttatttttatatggcataggaaagctaaatatatttacatctgttaacaaaaaaatttaggagatgcatctctgtaaaacatgatgaaatggtttccatctacacatacagttcaaaattattcgctgagtttttaacggaaaattagggtcacgaagttaacactgtaattaatatatgtaactgaaactactaaatataagagaaacaattctgtacgtgagatgtataagaaaagcagagtttgtttttcttttgaacaacatttcgtgtagtaataagagattgtaaaatatttttatcttctgagtaaacagaaaaaaaaaaaggggaaagagggagagacattctgtttgcctcacgctgtctttagtaggtctattgattgcttgggaaactaagtctcctctctgtcatagtaaaggtttttggtttgggaaatctctgaattaccaatttgattaaatgaatggcttattttacagtgacctgtggtcctattttgagattgttttaagcctctgatatttgacttcccaaaaccaaatttcaagtcctaacattaagggtttttttcacctgaactaacttggatataacaaataggaaccccgagaagtccaagggagatgtacgaggcttatgtggtatgttaaaatcatacaggaagcattgtcaaatgtggaatgctgttggagttatattggtataaatgtattattaacatatgttccaaaattgtatgagattcctaaaaattctgacatgtcttggtatatgttatcagtcgtgattacgattatatgttaaactgttttaacctcagaagtaaccaaattccctgccaatcgcgtcttcacccatggctactctaagtcttttgtcatctgcagaaaattactgttttactttgattcttctcaaaatgcagtttaaggccgggcacggtggctcatgcctgtaatcccaacactttgggaggctgaggcgggtggatcacttgaggtcaggagttcgaaaccagccaggccaatgtggtaaaaccccgtttctactaaaaatacaaaattagctgggcatggtggctcatgcctgtaatcccagttacttgggaggctgagacaggagaatcgcttgaacctgggaggcggaggttgcagtgagccaagatcgcaccactacactccagcctgggcaacagagcgagactccatctcaaaataaataaataaataaaataaaataaggtacagtccaaaatttgcattttcttcaaggaaattcatggaaaggacattgacaagtatacagacttccgataacctgggagatcacaccagtagaccagataaaaacttccaggactcttatttaaaagctgatgcattcatgaggattgttaacccaacatcatacagaaaaaagcggccgggcgcggtggctcatgcctgtaatcccagcactttgggaggccaaggcgggcggatcacgaggtcaggagatcgagaccatcctggctaatacggtgaaaccccatctctactaaaaatacaaaaaaattagccgggcatggtggcaggtgcctgtagtcccagctactcgggaggctgaggctggtgaatggcgtgaacccgggaggcggagctggcagtgagccgagattgtaccactgcactccagcctgggcgacagagggagactccgcctaaaaaaaaaacaaaaaaaaccccagcaaattacatagaactgaactgatagaggcctgaaatgctttttatgattttttgttgttatcgaaaccttgctgactctttttatattttgttttccagagtcagaaaacctttttctttttgagctatttatagctatagcaattgagtgacatatacttttgtgagcaaaactgaaatatttgtctttttctctacctgatttctcaaaaatctggaagcgattcatgagtattcttattttatggcaatgtagttctttgcatgagttcagtaagaatctgttgtccttgtaacaggacacaattggagaccctggttattctaccaaggcttggactgggatgacgtatttttggatatgacgagactgctttgaggaatcgaggttcgctttatagagccaataaaaagccccttgggatgactggactggtgccctgtttacatagttcccttaaaaggttcttggccttgaggtaaggaaagaatgtcactttccgacagatccaggaacttcaagatagtttgggacctggaggacagacattcacccccccccccaaattcatacaggtattatacatacactgtgatggggagccactggcttggcttcctagacatgggaagtgtttgttttgtttagagacagggtctcgctctgtcacccaggctggagtgcagtggtgcgatcatagctcactgcagcctcaatctcctggactcaagcgatcctcccatttcagcctcctgagtagctgggactacaggtgagcaccactatgcccaggtaatttttaaattttttgtggagacagggacctcgctatgttgcccaggttggtctnnnnnnnnnnnnnnnnnnnntggcttttaaaggtctattctgaccctcttgtagttcataagcatgatgattgcctcatgtgtagggtctgtctccttcaaacgctgttatgacgccagcacattacctgtctgatgtggggaaaaaaagtctgaaattccttatggcaaagttccagccagtttagaaaggagcctatatggccaatcaccactgttgtactttaggcaaataatcaggccaaatataatcctaaaatttattttacaagtaaattggtcttaccaagatttatctttggtagaaatggggaagtagagaaaaattatgtttcagagaaaaactacagcatacctgttactggattctagccctgatcattgtattttttattttcctacaatctggactaaatcctgaacaatcttctggctacaagtctcaaagaagaacctggctgggcagaggttcacacctataaccccagcactttgggaggcccagatgagaggatcacttgggctcaggagttcgagactagcctgggcaaggtgtcaagacctagtctctaccaaaaaaatttaaaattagccggtcctggtggcaaacacctgtattcccaggtactcaggaggctaagacaagaggatcatttaagcccaagagttcaaggctgcgatgagtgggaatcgtgcctctgcactccagcatgggtgacagagcaagaccccatttctaagtaaacaaataaataaaaagaaagaagaacatggattttagtttcttcatgtttttagttgtctccctaatggaacaggtttgtttttttcatcctggcatacaaattggttatagtcctatgtgttacttctgagaaaattaaaattaatggtgtttctaaaaactagagatgattcaacaggtgacagcagttgtataaattaatgacttcactgagacctcatgtttgccaccctgtaatgccattccaattcagtttgtggtgttcttaaaaaaaaaaaaaaaaaaaaaactccctgaaatgtctcctccttccctgcttggcatgggacaggactatgtgggaatgagccttcccagcaagaggggacactctgaccctcagattttgataatcaatgctttcaagaagaaagattttgatcaaaaggggggcaaatgagaaagaaaaaaatcatttatctgaggaatgtaaagcccttttaaactgtgggcccagaaagcttgatgttaagtgccagaaaacatttcaaatgaaaccgcagcccctcactacccctcgagccaagtaactatccactgatgacaccaagccgtggtcaatcgcgaaccaatgccatttctacaagccagtgagctcctgggcaacgttcgaaaccacctgctctccgatgggctctgttttctttaaaaacctgagcctctgttttgttctccgttgcacctggtgacccaggccgccctcgacctctgtgcctgaataaacccaccgggcaccacattctgaccattttaattattttaggttgacaactaatacaggactcagcgccggtggacaggaagccagggcccctgcagggaggcgcccgtcccttctcccggggagggcagggcgggcgcgcgcgcgtcccaccgggagcgcctcctcctcggcgagggagcgaagggcctccgggtcctgtgatgtccgtgctcggaaggcgcggaggagggcaggccctgcgggacagggcggcggggtcgccggggtcggctcagctccccgcggcgtccggctgctcggcggcctccggagcggggccctgcgggagaacgcaccttccccgccccatcggggcctcagtttccccaccccgggagagccggcggcccgcccccggctcactcccagctacggccctcacctcaggacgcgcacccggcccggccccgctctgcccccggcgcccagaccgcccacctggcccgcgcggcccggggtnnnnnnnnnnnnnnnnnnnnnnnnnnnnnnnnnnnnnnnnnnnnnnnnnnnnnnnnnnnnnnnnnnnnnnnnnnnnnnnnnnnnnnnnnnnnnnnnnnnnnnnnnnnnnnnnnnnnnnnnnnnnnnnnnnnnnnnnnnnnnnnnnnnnnnnnnnnnnnnnnnnnnnnnnnnnnnnnnnnnnnnnnnnnnnnnnnnnnnnnnnnnnnnnnnnnnnnnnnnnnnnnnnnnnnnnnnnnnnnnnnnnnnnnnnnnnnnnnnnnnnnnnnnnnnnnnnnnnnnnnnnnnnnnnnnnnnnnnnnnnnnnnnnnnnnnnnnnnnnnnnnnnnnnnnnnnnnnnnnnnnnnnnnnnnnnnnnnnnnnnnnnnnnnnnnnnnnnnnnnnnnnnnnnnnnnnnnnnnnnnnnnnnnnnnnnnnnnnnnnnnnnnnnnnnnnnnnnnnnnnnnnnnnnnnnnnnnnnnnnnnnnnnnnnnnnnnnnnnnnnnnnnnnnnnnnnnnnnnnnnnnnnnnnnnnnnnnnnnnnnnnnnnnnnnnnnnnnnnnnnnnnnnnnnnnnnnnnnnnnnnnnnnnnnnnnnnnnnnnnnnnnnnnnnnnnnnnnnnnnnnnnnnnnnnnnnnnnnnnnnnnnnnnnnnnnnnnnnnnnnnnnnnnnnnnnnnnnnnnnnnnnnnnnnnnnnnnnnnnnnnnnnnnnnnnnnncctcggagaccccgcagccccgcgcccgccgcctggccccggccccggcccctccgcgggatcctggcccctcctcgagcgccgccaccggccgccatggcctctctgggggagctggtgcgcgcctggcacctgggcgcgcaggctgtggatcgtggggactgggcccgcgccttgcacctcttctcgggcgtcccggcgccgcccgccaggctgtgcttcaacgcgggctgcgtgcacctgctggccggggaccccgagggtgactcacaccgggaagggggaagctgctgggctgggtcaggcccgaggggccgccctgccctaaggggaaagcgttgcgcctgtggtcatggccgggagaccgggtcagtctcctcctcagagccctcagccctcccccagcccactccccgaaacagccaggagtccagggtgccagggtgcagyggccgaggccctgcacggagcccggtgcccttctcgtgccccctcgcgttccggggccgcctgttcctgcgcatcccaaacgccagcgctgcccacccccgctcagtcccaagcaccccgcagaagcaggcaggtgcccacggttactgaaggctcggtgacagcagtgatttaaaggagagggaactgcgcgctgtgggagggtctccacgcccctgactggcaaaatatcccccttggaggagactgggcaaagcgcatgagacccccctctcttgtgtcttaaagctgcgtacaaatttacaatcacctccataatgatttcatttttttgtttgtttcaaagatggagtctcgttctgtcacccaggctgaatggagtgccgtggcccaatcttggctcactgcaacctctgcctcccgggttcaagcaattctcctgcctcagcctccctagttgctgggagtacaggcgcccactaccacgcctggctaatttagtatttttagtagaaacgggtttcaccatgttggtcaggctggtcttgaactcctgacctcaggtgatccaccctcctcggccacccatagtggtgggattacacatgtgagccatcttgtccggcccacaatgatttcattttaaaatgttatccaagaaagggaatgtaatctttagacaccaggtggttcagcaacaaatcctatgtccggggctaacccagtcacttgtgctcttgtgcctggtttcactacagagaggggacgcagtgaaagtcatacgactaacccacagcatatgcatgttaggaatatgggaacttaggaaagcagatggaacagctatgattcataaagccgatcacgtgaggggcagcccagggtgcagagggtgtcgctggaactgctgtctcttgttaggagccttgcgtgacgtttggggcagacaggtgggttctgctggccctgagccgccaccccacatcagggctgcgtgcctgtgctcagccgccacacttcacacctgtgtgaacttggttcaacgacaagcccccactcagccagatttgtgaaagagaccgtagcacccttcctgtcacacacatttaactgatggccacggtccctgttcagaaccttctgtgtcctcctgagtctggtttaaggaagagctgtgctttacacacagataaacacatgaagacgtgtgttgttctttctgattctaatagatttctagggtgtcattttgcatgaactatcaaaaaaggatttttattttatttattttttgagacggaatctcgctctgtcttgcaggctggagtgcagtggtgcgatcttggctcactgcaacctctacctcccgggttcaagcgattctcctgcctcaacctcccgagtagctgggactacaggcgcgtgccgccatgcccagctaatttttgtatttttagtagagatggggtttcaccatgttggccaggctggtctcaaactcctgacctcaggtgatccgcccacctcagcttcccaacatgctaggattacaggcgtgagctaacatgcccggcctgtaatgcagttctttagctgctgactctgggatctggactgcgttatctcgtctccagtatgtgacagccaaggttgcctgaggtcaggagtttgagaatgtcttgaacccagaggcggaggcagcagtgagccaagatcgagccactgcactccagcctgggtgacagagcgagaccccgtctcaaaaaaaaaaaaaaggatttttaaaagacaaaaatcttgcataaccccactccccagaggtaactattattaacatactggaacacttttttctggcctctgtccttgtgctcatggtaaacacattggttttagcagcacctcagtgggctctgcgccttggacgggttggggttgggtgggctgtggcaacctgagtggcgacagccctgcccaggcaggggctccgaaggttcctggacaggagcaggaggggctgtggggggtccccaggggctgacggaattccgtggycctgtcacccatcacgctgtatctgtgatgctgcgtgaccaggttacagaccttggcatcccgtgggcatttttgtccccaggcatttgaccaagccgtgaccaaggacacctgcatggcggttggcttcttccagcgaggagtggccaacttccagctggcaaggtgagtacasgggtgccttgttccttctctgacggccctttgtctccctgcagagtccactcctgcacctcctcctcctccctctccatccactccctcctcttgcccaccccctcctccatggttcctggctccagggaaacctgagactgtggccctcgcctctgctgagcgccacccttggacacaggtcgtggggtcctcactgcttacctgggctctctgcaccatgtcccttcctaaaggaggaatgagggaaaggagaccatcgggactgcagaccaggccatgcctcggcctctctgctagacactcacaggccccatcccaggagggcaggctctgtggggaagtggatcacagtcccgagagcctcgcaatcctgaaatatcaaaacccctcaaatctaaaatcccaaaaaatataattctagaaaaaataaaattctgtaaaagatatttatttactttttaaaaattgttttgagaaggagccttgctctgtcatccaggctggagtgcaattgtgcgatctcggctcactgcaacctccgcctcctgggttcaagcgattctcctgccttagcctcccgggtagctgggattacaggcatgtgccaccacgcctggctaatttttgtatttttagtagagactgggcatcaccatgttggccaggctggtctcgaactcctgacctcaggtgatccacccgcctcggcctcccaaagtgctgggattacaggaatgagccacctcgcccagcctatttacatattttaaagggatttatttgagaaacataaaaacacgacggaacccttcattggccgataaaatagacaaaaataacatacatattttttcaagcacaaattcatgcaygctagcgacaggctcacgggtgtgagaactacgagcagawgaacagtgctcatgaggagctaggtcagaaggggtaagacgtaggtgcgtagactctggctggtgactgtgtgcacctggctttataactggtcatcaaaacaccaagatgaacaacccaccttctaacaagatccatcaaaggcttcagggaccaccacatacgcagtcgcccagagagcccggatctggagatattttacctttcagaaaggcagatgaacgaaaaagccatctcttcctttactgaagagtcccagcattcgggattatggctgtgggactgtccctttctggattacgatccagacccctctggggcagcctctccttcacatcggcgcgggaagcccgcctggaggagaggcctctccggcaggcgctggggagctcccagcaaggcttggaaggaggctcagagtttggagggggagcccccatggggtggggggcctgagaagcaggagggaaataaccagggctctctgcacggttcagaagagaggcttgggggcgggcaggggcccaggaagctgagtctgagctgggaaaatggtggagccccagcacacagtgacccccacacccactcagcacacatgtgcatggacccctggcccaccagacctgagtgtgcagacctaggcaccgcactgccctccctcaggtctccttggaaccaggtgttgggggcggctsgagcggggctggtgtgaaagctgcctaaccacagccccatctccgccctgtgctgctgaggggaccccggctgcccacaggttccaggaggctctgtctgacttctggctggccckggagcagctgaggggccaygctgccatcgactacacgcagctgggcctgcggttcaagctgcaagcctgggaggtgaggccgggcagggctcactgtgctgctggctgtggggtgtccaygggcrgtggcactgtcacaggaggrccctgtggactggggagcgcctctggccgaagytcttggtgccatggaataccctggccactccttgacccgcaggaggttctggtggcagtggaggtggagggaccattttgtgccatttcaggccaccaggggtggctccacccaggaggagggcagaggcgaaaggctgctgggtgggcagggagcaggcagggggttgtgcccaccctccactgtgcccccagccctttcctggctgcctggaacgtgttggcaccgaaggaggggtgctgagaggcccccccaccagaccccggaaatgcatcgccctgaagccttctgggaatagcattgtcttttaggacaaaaagatggaagggaaagcccactggtgtgggtctggagtcagggttaaagccaggtgggggcccgccagcccaggacacagaacggtgcaggggaggggccgggtggggggattgggagaggagctgggtggggagacgggggagaagccaggtggggggactgggggagaggctgggtggggggatgggggaggggccaggtggggggactgggggaggggctgggtgggcagaccgagggaggagctgggtgggggaaccgggagagggcctgggtggggcatcaggcccctgccatcaccttggccccactcccaggtgctacacaatgtggcgtcggcacagtgccagctggggctctggacagaggcggccagcagcctaagggaggccatgtccaagtggccggaggggtccctgaatggcctggactcagccctggaccaagtgcaggtgaggagtgccagcccggtcatggttttgggctggtgcctaccaaagctcctcaagaccaatttcatgagatgaagaagcttccggagggagatggccctagtgcccagtttcgggtgccaggcgggggcttcctgtgacctgcgggaagggggtggggggcccaagcggccccttctgctccaaggcacaggggctctgcggctgcaggcctggttggtcaccccgtctgcatctgctggatacccaccccctccagagacggggctcactgccgccacggcaggtccccaggggygaggtcttccggccccaccggtggcacctgaagcacttggagcccgtggatttcctgggcaaggccaaggtaaaggtggggacggcgtcctggggcatggcggctggtgctgagccctcgaactgtgttcccagggatgsggggaggtgcagtccaggccaccgtaagggccaggagggtagagagtgggcccacagccatcctcaaactggcgcccacggtaggggggcggtgccccaaatggggctgtgagcttgaaggcagagcccactagagccggctgcataggagggggctccagctctctcaacaaggaccctgcaggtgccaccccgcccccagactgggccatggccacagccacagccttgcagcctcccagagtccctgcgtctctctgcgtcctttcatgcctttgtgtctccctgtgtccctgccacagacagcgaggtcccgggggggtccctgcgtccctgccacagatagcgaggtcccgggggggtccctgcgtccctgccacagatagcgaggtcccggggggggggggtccctgcgtccctgccacagatagcgaggtcctggggggatgcctgtgtscctgccacagatagcgaggtccccgggggggtgcctgtgtccctgccacagacagcgaggtcccaggggggtgcctgtgtccctgccacaggtagcgaggtcccggggggggtgcctgtgtctctgccacagctagcgaggtcccggggggcgggggtgcctgtgtccctgccacagatagcgaggtcccggggggtctccctgtgtccctgccacagatagcgaggtccctgggggggtccctgtgtccctgccacagatagcaaggtctcacgggggcrggggctgcagtccgacggtctgggccacgtcacgcccacacttgggtcagagccaggcaacacccctaaagtcacaggaatggggagctgctcacccccaaaggcagcgggcgaaacatggcggagaagaagaactcctggtgggcaaagactgggtcacccttggctggccacgccccggactggccacgccccattggctggccacgccccctcggtcacctgcgctgcgccacggccgactcctgggcccagtgcagctgcccagcaggggaggcctggggtgggcgaagccgggctctgagctgtgttaatgcattaacttagagtccgcatatcacagtagagtgctgtttataagaaaccaaaatgtttttaaagttgtgctaaaaataagttaacattgcagcagatgtttttctccatcagacatttccctccatggtggtctggcagacgtgggccgggcatgggcagctgtcacccagcccccggggacttagagctgcggggcacggtggggcgggctgcagggagcagaccctgctgggccgctgatccctgacccagcgtccccactgtccccgccaggtggtggcctctgccatccccgacgaccagggctggggcgtccgccctcagcagccacaggtgggtttgsggcccctcagacccctgcctggcctcacccagctttctgggaaagaaaatgctgcacaagctctgagccctcctggggctgcgaagttcctctgatgggaggtgtggggtggccatcccatccctgtgtaagacctggggaaaccactcttcaaggttcaggaggagggagggcggcccccgacccttaaccagagcgaggttgttgctttgtgtccacagggaccaggagcgaaccatgatgccaggtaggaggggctgactgggccctgcgagcgcgtgcctttcctgctgggcagaggccctccacatggggccacgcgggccgggcacaggagggcagtcagatgggcagggcctgagagcctccctcctctccctaggtccctaatcatggactccccaagagctggcacccaccagggccccctcgatgcagagacagaggtcggtgctgaccgctgcacgtcgactgcctaccaggagcaggtgcgtgggcctgggcctcttcccctgctgggggtcggtgcttctgctgcctccgcagactggggaccacaatgggaccaacatgagggtggagggagcagctcactggggggtagacggggccgggctcacccgtggtcctggcccagcccagccagatgggaggatgcctggctgtgcccgaggcgagtgggcattggccatcaggacaggagagaggtggtgtccagtggagacatccacgtagccctgcaggccctcagcccccaggaccacctcagtttggccattgcccctcccctcccactggggtgcgagtgaccaggagtgacccagctggggacaggcgggaggcaggacagctctggaggggccccaaggctcccgccccccatgggggcccagcagcgactccatcccccgagtcctcccggacaccccggcacctggggagaggcggaggaaggcaggaaccccagctgctcccagggtggcagccgtgggcggaggctctgctgcaggatccgggaggcccagagaaggcacctgcatttcacgctgagcgcatctgaggatgcgatcaggaagcagccccggcactctctctttatggatgcccacttccagtttaaccgtggcatcccgggggcaagggcgccctccaagctgtgcttcactaattccctcagggtttggaactatttgcccagttcccacgatgggcctttaagctctcgtccttcctaacctaaggcaacttcaaccatctgataaatctaataataagttacaatcgaggccgggcacagtggtctgtaatcccagcaccgtgggaggctgaggtggaaggattgcttgagcctgggaggtggaggctgcagtgagccatgacagtgccactccactccggcctgggcaagacagcaagaccctgtctcaaaaaaaaaaaaaaaaaaagccaggcgaagtggctcacgcctgtaatcccagcactttgggaggcctaggcaggcggatcacaagatcaggagatcgagaccatcccggctaacatggtgaaaccctgtctctactaaaaaatacaaaaaattagctgggcgtggcggcgggcacctgtagtcccagctactcaggaggcagagccaggagaatggcgtgaacccaggaggcggagcttatagtgagccaagatggcgccactgcactccagcctgggcgacagagcgagactccctctcaaaaaacaacagcaatgcctgaccctcagggtctagccagcgctgggctgtgactttgtgacttgcagctggtgaactggtctcctgctcagtgcccaactcagggcacacggttaatgtcgagcccacacagaggccggggcccagggactgggtcctcagcttcctggggtcactggggagcccacccacctggagctgccacctcggtgggccttgggggacggggcgctccctcctggtgacaggcagcctctaggtctgcagggacccagccccatcctaaggcagccgacttgtggccagtgccctgaattcaacacccacagaccacctgctgggtgctggccgggcacacaggccacacccttggtgtgggctctgcgaggacagtaccggcctccagcacctgaccgccccagcccacccagcctgtgcttctcttgcagaggccccaggtggagcaagttggcaaacaggctcctctctccccaggtatgggcgtcctcagcggcggggtccccgggtgaaggaggaagctgctggtgcatgggtgccggctgccctccacccacagggcccactttggtggtagtggctgtgtcagtcttgctctgtcctacagggctgctggcaatgggggggcctggccccggcccctgtgaggaccccgcgggtgctggggtaagaggctctagacccttcacctgtcagtcacctgagggaggctgaggccaagccccatccctcagaatcaaggcttgcaagcccccctcacctgcccagtctctgtccacacccctcgggctgaagacggccctgaccaggccctgggcctcagcgaccacccctccccctcctgcctggacccagggagcaggtgcagggggctccgagcccctggtgactgtcaccgtgcagtgcgccttcacagtggccctgagggcacgaagaggagccgacctgtccagcctgcgggcactgctgggccaagccctccctcaccaggcccagcttgggcaactcaggtgggccagaaagcccccggtggctgcggtggagctgggcaccgccccgactgaggcagctgctggaagagggggtggcagaggtcactgccctccctgcaggccccacccaggaggccccctctgaggaatctctttgcagttacctagccccaggtgaggacgggcactgggtccccatccccgaggaggagtcgctgcagagggcctggcaggacgcagctgcctgccccagggggctgcagctgcagtgcagggtgagccaagggcgaggcaggggcaggggcaccctgaggggcggtggaggcccctcctcccagtgcccggcccgacctgcagcccactctcctgcctcagggagccgggggtcggccggtcctctaccaggtggtggcccagcacagctactccgcccaggggccagaggacctgggcttccgacagggggacacggtggacgtcctgtgtgaaggtagggtgggcatggcccttcccaggcagcaccgtggtgcccggggtgtggggggcttagagctcggcctgtgctgtgagcagacgtggcacccagaggccacgcctgggtaacgccctgcagagcccgatgtcccccttgcagtggaccaggcatggctggagggccactgtgacggccgcatcggcatcttccccaagtgcttcgtggtccccgccggccctcggatgtcaggagcccccggccgcctgccccgatcccagcagggagatcagccctaatgatgctgtgtccatgatgcttttaataaaaacaacccccactgcagtctcaccctccaagtgggtgtgggaggccgggctggcccagcagaagcccccaggcctggactccatccatctgctcagacaacagcagggagagcgggggtccaggtggggcagctccctcccttccacccctctccgcccctcctgaggccccatcaggagcaggacccctgtgcctccgtggtcttgccctgtttgcaggcagcatgtggccctgcagtcacacagcctggagacaccacgagtcctggcggcctgtgtgcagaaaggcacctacggccctggaagcccagttgcggaaggaggttgggggagggacgccgggaggggaggtcatgcagcctctgtggccagcaccaccctgacggtgccctggaggtggctgtcacctgaccgtgggcagagccacagagcaaggccccacggcgctcagggctcaggaagcctccagcatccgggacgcagctgcctgtgggctctgtgggggcccacctccgccttcccactagtcctgcaaccagaagagctggaccaaggcagcccccaccaccgccaccagggccagcaccatgaacaccactttggccacccagacgccgtagctctctgcccgccactgagccggcgcatcggccgggatcatcccggtcaggttcagcatgtagcccagtgtccagccaatgtccacaccgcccgcctgcgggacacacggctgctcagggctgcggggcagctaccccaggaccacgacctgcccacgcccacgccccgcccacgcccaggggaggcagtcacctgctttcggaactcgaggctgggccaggtctcctcgctgaacccgtagccctcgtgcaggagggtgaggatgtacaggcctgaggcacagtagtcccgcagccagcggtcctgcccagggtagctggcctccacctggggcccaggagaccaagaggcgaggtgagggcccctgatccccagtcatgcggggaccgccccatctgtcctggccaacctgagcacgcagacaacaagagggtgccgggcagtggtagagagcccctccctggccccaccgaccagttacgtggtgcgggttgcggccccttcttggcgggccagaggctgggcccagctgcggccgtggccacagcctcctacctggagtggcacggcctggagctgtcctctgcccttgcctcccccggccctgctggccgtgctgcccagaatgaggctccagcatcctgcccgaggcagccctgtaccctcagggaccctcgctgcagccagggagcccagggcccacccaccagtttccagggcctctggcaaaactcccagatggtggcgttgaccgtgctcaggggctgcctggaggtgaggttcaggaagtggaaggtgtagtagaagttggagaaggcctgagtgagaggggaggtggctgtgccttcgctgtggccacgctgggccagatccaccccacccgggctcccagagcccctaagagccagcctgggcccctcctgggcctgctggagtcagacaggcacctgaggcctcacaaggaagcccggacccctggtgggggcagtgtaggtgctcacatagaactggccccgcagcgggggctggtagaccccgtcaaaggcgcagtcctcctggccctggcagctggagaagttgaaaagttcccggatggctgagacgcaggctccagggttgcctgtcccttcaactgtgaggttctgggggaggctcagcgggggcgtggcgtggacacagggtgactcatacagcgggcccagggccagtgtggtctggtagccgctgaggtagcacgggtgacggagcagggcagccgggcggctctgcagagggcagggaggcctgagcaccagccgcacacctgcggccctgtgcccctccccggggccggatgacccacgccagccccgcgcccataccctgtgcgccctccccggtgccggatgacccacgccagccccgcgcccataccctgtgccccctccccggggccggatgacccacgccagccctgtgcccatagccctgttcccacagccccatgcaccctccccagggccagctgacctgcaccagccccacgaggagcctgctcagcatctggtcccgtccaaagcacaggtagctgtgagtgtagacgctgtagtcggagccgtagaggcgaaaatcggcctgggtgctcttgtccaagatggggcccccaggcacgaacgtgatctgggtggaggcccctcccatgtccagggcacccaccagcatctcctccggaggctggatccattctccagtgaaggagtactgggcacagaaggggccactcagctgggagcagccacccggaccccgtcccggtcagccagccccagacaccagcccctcgcagaccagcccccgccctcaggcagcctgtggcaccttgaccagcgtccccaagccgtagttgacagtgatccaaccaaaggcaccttcggcctgcccggccaggagctcggcaccccaaaagtccacgggagaccggcccaggacctgggtgactgctgcaaagatgtccctggcctgagagctgttcttccggctgggcacagaggaccaggggctggagctggctggaagcctgggcccggccccaccctgcctgccacgctggc

SEQ ID NO: 96800 - DNA, 13489 bp, Homo sapiens
  misc_feature (1)...(13489): n = A,T,C or G
aacatggtgaaaccctgtctccactaaaaatacaaaaattagccaggcatggtggcacacacctgtaatcccagctacttgggaggccaaggcaggagaattgcttgaactcgggaggcggaggctgcagtgagctgagatcgcaccactgcactccagcctgagcaacagagcaagacactatctcaaaaaaaaaaaaaaagaaagaaagaaaaaaaaagaaacagagaagatccagataaacataatcagaatgacaatgggaatattaacactaacaccagagaaatacaaaaaccaggccaggtgcggtggctcatgcctgtaatcccagcactttgggaggctgaggcaggcagatcacctgaagtggggagttcgagacagcctgaccaacatggagaaatcccgtctctactgaaaatataaaaaattagcgaggtgtggtggcgcatgcctgtgatcccagctactcgggaggctgaggcatgagagtcgcttgaacccgggaggtggaggctgcagtgagccgagatcgtgccattgcactccagtctgggcaacaagagtgaaactccatctcaaaaataaaaatcctcagagactattacaaacacctctaggcatacaaactagaaaacacagaagaaatggataaattcctagaaacatcccaagattgaaccaggaagaaatgaaatccttgtaatagtccaataacaagttcgaaaattgaatcagtagtaaaaaaaaaaaacctaccaaccagaaaaagccctggactagatggagtcatagccaaattcaacctaatgcacaagtaagggctggtaccaatcctattgaaattattccaaaaaatcaaagagaagggactcctgcctactcattccatgaggccagcatcattctcataccaaaacttgtcagagacacaatggaaaaggaaaacttcaggtcattaactcaggtgaaggcagatgggctgggcatggtggctcatgtctgtaatcccagcactttgggaagctgaggtggaccgattgcttgagctcaagagtttaagaccaccctgagcaacatggagaaaccccgactctacaaaaaaatacaaaaaattacccaggcatagtggtatacaactgtagccccagccactcaggaggtggaagtgggaggatcacttgagcctgggaggcggaggttgcagtgagccaagattgcactactgcactccagcatgggtgacagagtgagaccctgtcttaagaaaaagaaaaaagaatataaacataaaaatcctcaaaaaagtatttgcaaactgaatccagcagcacattgaaaagataatacaccacaaccaagtaggctttattcttgagatgcaaggttggttcaacatgcagatcaataaatgggattcatcacagaaacagaactaaaaacaaaacaaaaaccacatgatcatctcaaaagacacagaaaaggcttttgataaaattcaacatcgctttaccttaaaaaacatcaacaaactaagcactgaaggaacgcacctcaaaataataagagctatctatgacaaacccacagccaacaactgaatgtgcaaaagctggaagcattctccttgaaaaatggaacaagacaaggatgcccactcttaccactccttttaaatatagtactggaagtcctagccaaagcaatcagtcaagagaaagaaaggaaaggcatccaaatagaaagaaaggaactcaaaccatctctccttacagatgatatgattctttacctagaaaaccccataaacagtctgctcaaaggctcctggaactaataaacagcttcagtaaacttgcaggttacaaaatcaatgtatgaaaatcagtacatttctatacaccaataacacccaagctgagagccaaataaaaaacgcaatcccattcataagagccacaaaaataataaaatacttaggaatacagttagatgttttaccacaatgaaaaggaaatcagagatgacagaaacaaatggaaaaacattccatgctcatggacaggaagaatcaatattgataaaatggtcttactgcccaaagcaatttacagattcttatttgttattcctgtcaaactaccaatatcatctttcacagagttacaaaaaaactactctaaaatttgtatggaaccaaaaaagagcccaaatagccaaggcgatcctaagcaaaaataacaaagctgtaggcatcacactacctgacttcaaactatactacgagacagtaacccaaacggcattatactggtacaaaaactgacacataggccatggaacaggttagagaactcagaaataaagctgcacatctacaactatctgaccttcaaaaaagctgaccataacaagcaatggagaaaagaatccctattcaataaatggtgctgggataactgcctagccatatgcagaagatagaaactagacccctttcaccatatacaaaatcaactcaaaatggattaaagacttaaatataagacctacaactataaaaacctagaagaaaacctaggaaacaccattctggacataggccctggcaaagatttcatggcaaagtctccaaaagtaattctaacaaaaacaaaaataggtaaatgggacctaactaaagagcttctatacagcaaaagaaactatcgacaggtttcttaaacagacaacctactgaatgaaagaaaacatttgcaaactatgcatctgacaaaggtctaatatccagaatctatagggaacttaaaacaattgaacaagcaaaaaacaatcccactaaaaaatgggcaaaagacatgaacacttctcaaaaaaagacatacaagcagcagccaataaacatgaaaaaatgtttcacatcactatcaccacagaaatgcaaatcaaaaccagaatgagataccatctcataccacttagaatggctattcttaaaatttcaaaaaaaaataattaaaaaaaaaaaagatgctggtgaggttgtggagaaaagggaatacttatacactgctggtgggaatataaattagttcagccaccgtagaaagcagtttggagatttctttaaaaaaacttaaaatagaaccactatttgatccaccaatcccactactgagaatatacccaaagaaaaacaaattgttctaccaaagtgacacacacgtccttaagttcatcactgcactgttcacattagcaaacacatgcaatcaactgagatgcccatcaatggtgaactggataaagaaaatgtgatacatacacaccatggaatactataaagccatttttaaaaaaacccaaatcacatccattgctgcaacatggatgcagctgcaggccattatcccaagcaaattaatatgggaacagaaaaccaaatactgcatgttttcacttgttaactgggcgctaaacactgagtacacatggacacaaagacaagaacaatagacgctggggcctactagaatggggagggcaggaggtaggcgagtgtcaaaaagctacctactgggtacaatgctcactacctgggtgacaaaatcacttgtacaccgaattccagcaacacataatttacccacgtgacaaacctgcacgtgtaccctctgaatctaaaataaaagttggaaaaaaaataaacaagaaaaaaatggactacgataaagccaaaagtaattctggttttccctttcaaagtactgaattttgttacttcagaaagcactacatctttacaatcatttctataatgctaccaaaatacactgaaactaaatgtgatagattcaaagaagaaatagagataaggagctgggtgtcgtggctaatgcctgtaatctcagcactttgggaggctgaggcaggtggattgcttgagcctaggagttcaagaccagcccagacaacatggtgaaacctcgtctctacaaaaaatacaaaaattaggcaggcatggtggtgtgcatctgtagtctcagctacttgtgaggctgaggtgggagaatcacccgggcccggggaggtagaggctacagcgagttgtgatcatgccactgtggcctaagcatcagagtgagaccctgtctcaaaaaaaaaaaagttctaatctccactctaacattttgactttcaagaagtttaactctgtgaacttcttttcaaaaattattataatgtgataagataataagacttgtcctaactattttataaggctgctgtgagaattaaagtctaggttgctttaaaaagatgaattattttaagtatttgccaaaatatatcattcagccagtaacaaaaccaagttctctgctttgtccttcttcataaatacatttaaaaaaaaaaaaaaagaacagtgcagggcttctcaattatctgcttttttaacggaaagataatcacagataaatgaaatcaatagataactagcaatctttagatcatgttctcaaattcttctatcagaagttgaataagaccatctattcaaaatcaaatctctgcttctttccccaatcaccctctcctttataattaaaaagtgaggattgtaaaaaacaaaaaagcttcactcattaatttcttcatatgatattgctctaatatacagaaattttggctcacaattggtttaactaatttttttttaactggcaagtctttttttttgagacaaggtcttgctccgttgcctaggctggagtgcagtggtgagatcatggcttactgcaaccttgacctcctggactcaagtgatcctcctgcctcagcctcctgtgtagctgggacaagcacgcatcacacacccagctaatcatttgaatttttgtagagatgggggtctcactttgtttaagaccactttgcccatgctggtcttaaactcctgggctcaagtgatcctcccacctcagcctcccaaagtgctgggattacaggcatgagccgccatgcccagccaagttttaatatacgtttacttatctatattacgccaataagaaatttgatggatttttctttttttcgctttcaacttgttacttaccaagcagcattctgtttgtaaataaaatctatctatctcaaagtactagagccttttgttaaccaaatcaagaagaatataacaccccgggattggtttcattttgtcactataaagcagggattagcaaactttttctgtaaagatccagagaataaaatatttcaggctttgtgagccatatannnnnnnnnnnnnnnnnnnnnnnnnnnnnnnnnnnnnnnnnnnnnnnnnnnnnnnnnnnnnnnnnnnnnnnnnnnnnnnnnnnnnntatatatacatgatattagacagacacatagagaaaggcagaaaataatctagaccacagcaatgttagctccattacctatataaaaataactaagttaggccaggtgcggtggctcacgcctgtaatcccagcactttgggaggccgaggcggccagatcatgaggtcaggagtttgagaccagcctgaccaacatggtgaaaccccgtctctactaaaaatacaaaaattagctaggtatggtgatacgtgcctataatcccagctactcaggaggctgaggcaggagaatggctagaacctggaaggcacaggttgcagggagccgagatcgcaccactgcactccagccttgagcaatagagcaagactccgtctcaaaacaaaacaaaacaaaacaaaaacaaaacaaaaaaaaaaataaataacaaaaataacttgagagatgctgtaatggtgagagtttagagcattcctgaggacctggagaaaactcgtttctgagaaggacattttgaaggttttgttgcctgaaaaagttatctctggaatcacactcctagatctttattgaagacttgaaaagaattagattaggaccatgcggacacagaaggtcaccccagctctgatcgttgccattacagttgctacaattggctctttccaagttggctacaacackggagtcatcagtgctcctgagatgatcataaaggaatttatcaataacactttgagtgaccaggcaaatatccctccctctgagatgttgctcacgtccctctggtccttgtctgtggccatattctccattgttggtatgactggctccttttccgttagactctttatcaaccactttttgacaggtgcaattcaatgcttatcgtcaacctgttggctgtctctggtggctgccttatgggattgtgtaaagcagctgagttggttgaaatgctgaccctgggctgcttggttattggcctcttctgtggactgtgcacaggttttatgcccatgtacattggagagatctcagctactgccctgcagggtacctttggcactctcaaccagctgggcatcattgtcagaattctggtggcccagatctttggtctggaattcaaattcatccttgggtctgaagagctatggccggtattattgggctttaccatccttcctgctatcctacaaagtgcagcccttccattttgccctgaaagtcccaggtttttgctcattaacagaaaagaagaggagaatgctaagtagatcctccagcagttgtggggcacccaggatgtatcccaagacaaccaggagatgcaagatgagagtgcaaggatgtcacaagaaaagcaagtcaccgtgctggagttctttagagtatccagctaccaacagccaatcatcatttccattgtgctccagctctctcgacagctctctggaatcaatgttgtgttctattactcaacaggaatcttcaaggatgcaggtgttcaagagcccatctatgccaccattggtgcacgtgtgtttaatactatcttcactgtagtttccctatttctgctgcaaagggcaggaaggcggaccctgcatatgataggccttggagggatggctttttgttccatgctcatgactgtttgttattaaaggatgagtataatgggatgagctttgtctttatcggggctatcttggtctttgtggcctttgaaattggaccaggtcccatttcctggtttattgtggccgaactcttcagccagggcccccgcccagctgcgactgcaatggccggctgctccaactatacctccaacttcttagtcggactgctcttcccctctgctgcttattatttaggagcctgtatttttattatcttcgcyagcttcctcatcaccttcttgacctttaccttcttcaaagtccctgagacccatggcagggcttttgaggatatcacatgggcctttraaaggcaggcacatggtgcagatagatctgggaaggatggcatcatggagatgaacagcatccaggctgctaaggagaccaccaccaatgtctaagtcatgcctccttccacctccctcccagcatgggaaagccacctctccctgaatgagagacctcatcaggatgaacccaggactgcttctgaatgctgctacttgattcctttcttatcccacgcactccatgcgcacctcaaggctggggtttgttggattttcaatggttttttaaatattttatttcctggacattctcttctgcttaggagagaccaagtgaacctaccttcatttcaggaggcaatggccacttggcatatgacaactttgccagtttttccttccttgggttctaatattgccgcactaggggatataggagaggaaaagtaaggcgcagttcccccaacctcagacttatcaggaagaagatatacatatgagtgtggaaggcagacggggtttatgtaagagcaccttcctcacttccatatagctctacaaggcaaattaacttgagttttatttattttaccctctggtttaattacataattttttaagttctgggatacaggtgcagaatgcgcaggtttgttacataggtatacatgtcccatgatggaaatgtttatttttttaagtgtaattttgccaaataataaaaacagaaggaaattgagattggagggaggtgtttaaagagaggttatacagtagaagatttcatgctggggaggttagcgtgcaatatgaagaatttagggagaaatgtagttcattattggagggtatattatgtggtgcctgaagtctgcacattacctcttgacaatttctgtccttcagatggaaactcttaatttcccataaaagtcatatgcctacataataaagttattgatttcctttggaacttttttcttttaatagtttacatgtagtagtacttgaaatctaggattattaactaatatgggcattgtagttaatggtggttgatgggttctaattttgaatggagtcaagggaagggaaagttatttctagaaagcttgttccccctcactggaccaaacaactcctccttgtaggagactcattacttttgaagtaatcccaccacctatctggtgggagagccatccaaatgagaaacttaaaataatcagttcttggtagagattcattatttctccattttgtgctttaggagattttaggtgttgattttgttttattttaactcatatctttaaaggaattccccaaagaatgtttatagctaacttggaatttataacctcagctctgggatttttttctgaacgattattatctaaaggtgtgttgttgcctttagggtcatgccatgcttgtctatgtctgttaccatgtcactgtggtcctatgccaagtgcccttagggggtctcaatctttccaacagaccatgttcgagatagtatgagtcaatgtacagtgtagcccacacttgagaggatgaatatgtgtgcactgtccctttgctctggatggaaataggttattgttgacttattttttctgtgttcctacagcccctttttcatatgttgctcaatttcccttccccttcttggtgcttacacatctcagaccctttagccaaacccttgctgataacggtatcttggttctcagttctcactgtttcctctggtcacggagacttcaaataaaaatgcacatagctatggagtggggtttagctggaaaaggtgaccttcttccaacttcacgtcaacttctggctcctcaaacagtaggttggcagttaggcagggaagttgttttcccatttctcactgagcagattgtgaatatttccatatggattttctattattaacattaccctgattctttgttttaaaataaaaattctgaatgtacgcacacaaaaaaactctaaatgttccatatatctaatttatgcttacctttggctgtggcatgaaccacagcagcctgagagataacctggtaagtttcaaaacccaaatacgacaaagctgagagtaaaaggcctcttttgaaagttcctgggtttcccattacctatggaaacaattatgttaagagttacaaactttgaaaatttgaaggtactgctaccccaagcaaaaattacatgaattttctcccacccccaaagcaatcgatcataatactggaagcttaaaaattacttcatcaaaatctttagtaaaactatctcaaagcgtatcttattgagaaaaagatatcccctggagtcgccgctcatctaaaaatcacactcctgctggaaaggaagagctacaacttatttgctacaacttatttgcaaatgcatggatattgcaaattgtatgaagtaaaatatgagacaccaacacataataaaaatgaatcttacagacaagattatcatatatagtaattactacatataaaaatgtacatggctaacttttaaatttttttgtagagacagggtctcactgtgttgcccaggctggtttcaaacccctggactcaagcaatccttccgcctcggcttcccaaagtgctgggattacaggctgagccaaggggccaggcctaaaatgggacttcaaactcatcattgttccaatttgaaaacttacggctaactagtttcatacttagaactcctcccatctctctgcctatattatctataacctccccatttggttataaacttccaaggaaggggaatatgccaaattttaaccacccctccccaccatcagtcccataataattctgaaagattttaactgagcagttaaaaatttgagtttaaaataatgaaacccctagttcatgtgaaatatatcatatgcattaatgccattccaattccctgacaagaataaacagaggcccacgagcagtgctaatagaaataccagaactgagactacaacatgccgacaaccttcattgacgttatgcagataaaacgggcaactgagaaataaannnnnnnnnnnnnnnnnnnnnnnnnnnnnnnnnnnnnnnnnnnnnnnnnnnnnnnnnnnnnnnnnnnnnnnnnnnnnnnnnnnnnnnnnnnnnnnnnnnnnnnnnnnnnnnnnnnnnnnnnnnnnnnnnnnnnnnnnnnnnnnnnnnnnnnnnnnnnnnnnnnnnnnnnnnnnnnnnnnnnnnnnnnnnnnnnnnnnnnnnnnnnnnnnnnnnnnnnnnnnnnnnnnnnnnnnnnnnnnnnnnnnnnnnnnnnnnnnnnnnnnnnnnnnnnnnnnnnnnnnnnnnnnnnnnnnnnnnnnnnnnnnnnnnnnnnnnnnnnnnnnnnnnnnnnnnnnnnnnnnnnnnnnnnnnnnnnnnnnnnnnnnnnnnnnnnnnnnnnnnnnnnnnnnnnnnnnnnnnnnnnnnnnnnnnnnnnnnnnnnnnnnnnnnnnnnnnnnnnnnnnnnnnnnnnnnnnnnnnnnnnnnnnnnnnnnnnnnnnnnnnnnnnnnnnnnnnnnnnnnnnnnnnnnnnnnnnnnnnnnnnnnnnnnnnnnnnnnnnnnnnnnnnnnnnnnnnnnnnnnnnnnnnnnnnnnnnnnnnnnnnnnnnnnnnnnnnnnnnnnnnnnnnnnnnnnnnnnnnnnnnnnnnnnnnnnnnnnnnnnnnnnnnnnnnnnnnnnnnnnnnnnnnnnnnnnnnnnnnnnnnnnnnnnnnnnnnnnnnnnnnnnnnnnnnnnnnnnnnnnnnnnnnnnnnnnnnnnnnnnnnnnnnnnnnnnnnnnnnnnnnnnnnnnnnnnnnnnnnnnnnnnnnnnnnnnnnnnnnnnnnnnnnnnnnnnnnnnnnnnnnnnnnnnnnnnnnnnnnnnnnnnnnnnnnnnnnnnnnnnnnnnnnnnnnnnnnnnnnnnnnnnnnnnnnnnnnnnnnnnnnnnnnnnnnnnnnnnnnnnnnnnnnnnnnnnnnnnnnnnnnnnnnnnnnnnnnnnnnnnnnnnnnntcttggtactagtgggtcttttttggaagtaaataattggaagaattatgttgcccaacatgaagaagggaaagtctcagtctcttcgactgagcgactcaagggggtagattcaagagagagtccagagcaaagaaacaaaaaatgcaaagcgttttgggaagaggaactagcgggaggaggcctctggaaaggatactgatgcccttgaatgctagggcatgtgtagtaaaaaacagaaacaaaaacaaaccctggtctcccctaaaattcttcaataagatgttttacttactcgagcaaagtattttattttactcgagtaaaataaaatttcttgctcgagtggaattcttttgtgggaaaatgaagaaattttggatcctacttgaggcctgatcagggtgggtggaaacacagactgcaaagggagtacctactatatgggtttaacgaaaaatcttatgggtaataagggaggcgagtcatggttttaaaaaattaggttgcatttctatggtacttttaatactgtatagggaattaatacatagtcgtattgatcttccgaactaccttgtgaagtaagtggtatcccaggtttacaaatgaaaaaactgtaactcaaagagatgtattaacctaaccaaggatatgttagaagacaggaatccatgtctttctactcctgagtccagtgctccttctactatatgattgctacctccactagtcccattaaatcagctgtatttctttaggattatgtctttaaagtctatctttaaaaatatatagatctccttcccaacttctgaaacctagctgttttttcccaaagacagaatcacttttattttatgcatttctactggcagctaccccctcaacattgctaaatgtttatgccactggataccatgataacagtgaaattaagtttctgatatctctgctagagtgaatttgtaattaagtttttagctttgaaaaaaaaattagatcctaagaaaagttgcaggaactcccatatattcttcagctagattcagccattgttacctttttctcacatttgctttatctttctttacatatcttacctataatacacatattatattcctagtattttctgttgtaaggccttttgagagtagattacagatatcatgactcttcagtcttagaaacaagacattcccttacttagtcccagtttaattatcaaattcaggaaactgaaattgacagaatactattatttaatatacaaattttgtttaattcccaatactgtcctttatactaatgatttttttttctaaattcaagatcaaatcttgataatgtcttgcatttgttatgtttctactttctttaaatctttaaatcgtcagccttggtctttcacgacattagtattttttaaatgtatagtcccatcggtttaaagcagggtttctcagccttggcacaattgaacttttgggctgaagaactccttcagcccgtcaggccatcagatgattgcagccttggccaatatctgactgcaacatcaagagagatgatgagccagaagcacccagctaagccacttctaaattcctaaaccacagaagctatgacagataataaatgattgttcctgttttaagccactaaatttgatgtaatctgttacacagcaactgataactaatataacagccaagtaaagcatagagagttggagtgtggagtttcagaggaaaggtgtggaagtttgataaccttaagaatataggctgggcgtagtggctcacacctgtaatcccaatattttgggaggccaaatcgggagaacagcttgagcccaggatgtttgagaccagcctgggcaacacagtgagactctgtctctacaaaaacatgtttttcttgttgttgtttgttttttgtttttgtttttgttttttaatttgctgcatgtagtggtgcatgctgtagtcccagctactcaggaggatgagctgggaggatcatttgagcccaagtgtccaaggttgc

SEQ ID NO: 96801 - DNA, 13990 bp, Homo sapiens
aaatattgtactttttaaaaaaattatggacgttgtaagttactgtctactcaaagagacttaaaacacagaaaccagccatttactataatcctagtcattttaacataaacatcagagaagacccaatataagttttttaattactcactgaataaatgtggtaagatattcaaacctcatgcaattgctcacaattactgttttggatgtacaaggtgtattcaaggaaaatgttattttaaaaaattgcaaagttctgcatttaattataaaactaatcagcctcagatattcctgctctgatggtattacaggcaggaacatgtctagttctgggactcacatgtttgcaggacatggacaagtgtgtgtcaagagaagggtggatacaggagaggtcaggtgattgggattttgctactcatgggcctaaggatctggtgaagaacctgggaatccatatctggtgatgggaaggcttactgggagccagtaactttcttcaaacatttgaatgaataaatgaaaggactatcatatgagaatgtagatatattctgcataattccaaaggctaaacatgtgaaggtctaagaggagataattttaatgcaaccagaagaagaatgtcctcataattacaggcatcccagaaagaaaaggactgtttggttaggtagtaagttccctgaaactagcagcaatcaagcaaaggtatagagaactccatttgggggcgctaattggacttttttagttccaaagtgttatctaattttatgactctaaaccagtgtttctcaaacttgagtgtgtatcagaagccgctggagggcttgggaaaacctagattgctggaaccaactacaggagtttttgaggcagcagctctggggtagggtctgagagttggcatttctgaaaaattcccagatgatgttgatgttgctagtccagaaaccatgctttgagaacctctgctcttaaaaaaaaaatagtaaatcaacttaagttttttggtgttttggtcaggccattaaaatgcaggcccttccttgaattactcactgcctccaaatagacttccactgtagtcttctagagggaggggaccacttttataggtgatttcttctaaggcctttataggaagacaaggttctttgctgtacaataagaatataaggaccctgggattcttttcagatactgatattaaatttcttttcagccattttcactctgtcctctgtttcctccataaccgatggccataattttaaaataactggccagaattagagatgagtctgagtccaaaaaacagtgttgtttgacccacagaaggatctgacctggtgtaaaccacattcacgaacaggtctggtgacactaactagccactgtctctggaatgcatctttgtcaagcactgctttggggaagaagacagaagtgctgagaattctcttctttttaattcaaaggggggaagaatgtaaaacacggctcttgaaccagttccatgggcagataaagttcagacaaaaatgttaaatcacacatttgtccattagtatctggtttcttcactcaacaaatgactattgagcttctatatatacctggagctgtgcttaaacctagggatacagttgtaaataatacaagcaaatgtcaaagatataaaaacatagaatctatgtcaggtaggaagaaaaatacagcaggtgcttagttaggaaagcctatgcctttcacacagcctcgcttggtgcttattttttgcccaatgctaatgctgaaaataaactgcttactctggccaagccaaatgatcagtgatagaatgggttactgtgattcatttctaagctgcttttcttttataatttgggggaaaatgcagttattagtagtaaagtccctagaaatcatttctagttcacttgaaaggttcagttgcataaaaatatgtttaaataaacaacttggaataaagagtggttaaaattgtatgcatatgtaatcaacaatgttagctttttttcatgcatagcccagacttttttttttttttaaagcaaatgtcttctgaaggccacaaaatgaatcttaggaggtttgtttgaacagtttcactgctaataatttttaaaaggtgtcagttctggaggctcgggctatcttagccaaaataatccatccaagcttcttaattttagtcattctgaaatttagtggtgaaaattaaaggtgtgcaagaaacctgggagacagagtttttatatgaaatataattatagtatcttttggtcctgtctgaattaagtcattatacaaagatttctgactcacagctatagctaataagagctcccactcatttcacaaactgaccacctactactactatctattaccactaactgactacctactacatgccaactgctactgaacactaactatgttccaagcatcttatgacgctaccttaaaactcacaacaaagctaggaaataaatatcatcatcatgcccattttgcaaataaaaaaattgaaattcagaaaaattaaatgatatacccaaggtcatacccagctcataagtggcagactaggaatttatcaccaaagcctttctcttcactctatggtactgctcccccccaatagcccagatggcaggtttgattttgtgtggattagcaacagatatttgttcctcaaggtgctttgctatcatatgctagaaaactggcatagttactacctgtatctatatctagctacctatctatccacatatatctgtggtaactatgatgtgaagagtgcccctgtaactttgcaaaagcacaacctgaaccacctcagccagcagccctgacaccatggtacagccctgatattgtgttacaagacatcacagtgacaaatcatggcataaatcatattcatttccacttatgcacccatgacaagacccacacaatgcacactgggatgcttgtgggtgtggggagtggcgggcgcgttagtgacagacactcttagaaacaggcatgaaaagcagcatctttaggccgatcaactgttatgagcaggaacacaggctgctgtgctgatgtgcatgtgagtgtgtgtgtgtgtgtgtgcacgctttctttgaggaagaggaggaggattataacgcacaaattagtcagaggatacacaatgtgcaacttcaagggaaaatgcttcatagcttctgtgaaacagtcactggtgatgtagctatcctaataagccataaccatcactctttgccaaagggtacctgactcctcctttcttctccctccccacgccctacaatccctactacccaaggatgacagtcattcttcccccgctttatttcacacaaaaggccccctctagaatccagaagggcaccatcataagccgcaagccattactcttcactgaatataaagttaaattcatttatctctatcttcaatgagaaaaggaaggaaattaagcaagaaagatggcacaatgctttcaagaatggtgtattcaaggtcaaagcctgccataattgagttaaaaaataataaatgaaaatatgtctgctcggcagaatacggtccagctagaagtcttcattaaatgttccagtacacacaatgtgttagctgtgtgtttgtgtgcttgagattctgtgagatatcctgtagctcataaatactgaaaagggacagttaccatagtaactaagtgctatttaatgaataccaaagaactgaagctccgaggatggttttaaattgccagaacatgacttactgctgcagctatgggcttgcaagtaactgacatgtcactctctctaataagatttttaacaagttggccaatttggctgatctctgtcttgaccacatgacaccacaagattctgtctttacatcacatgaaaagcatgttcctgatttcttctcctgactctaagtaccaagatcttctacagaaatgggtcagacattcagatatggaaaacgtccttaaatttgaaactttgacccaagtagtgaagcagtaggacacatacttccgtcataagcaatagacaccagttcaatgagctgtcaggctgaatacagcaggctctttatttccgaaaaaggtgaatgctccctttacactaaatgcagtttgttctttattgtgcaatgacacagaagagctattgcagttgatttttgcaggaactttttacaggctagtgacgtcttaggtaatctttcatcaggatgtccaaaccttccctactacgcccactcccaattctctctcgccatccatcaccatatgtcaaattcctcaccttggaatcatctcactttttacagatttaaaaggaaaaaataagcatggctgccctgcttttctttccactggtctcccctggtaactttaacgtggtccatttttaaggctacagattgtgtggcaagcatacttacgtctacatgccattaataagtaacaagaattttaaaaacgaaaacatctatgtaccatgaagccaaaaatctttagcaaatgcatccgttctccagaggctggcttgttcttgcataaccagcagctcgaatggcctggctggagccagcctagctcagtgctcgggctgcgggcgcccccttcagcatctagggtgcaatgcatgttgctttcctgttagatactaacaagacggctgggcaattatttttgctaaaactgtttaaggaaattttgtaggaaaatttgggccaacatctaatggtgtgagacaaaaatcctgcacattaccagcctgcatttaatgttaaaatcaggcacgtaaaatttaaaagggaggccttcattgcaagaagaaaaaaaaaccgtatagatatattcatttattcatttgattaaataacacttctctacaaggtgaactctatttaaaattgcctctgtctgtgataaacacaattaaaagtggagacagccacaacctcttcaccttctcatttccttctacagcctgaagctgttctctctgtagtgcaatccccagccttaactgcttcctcctagaaccccctgtcaatgccttggtttatctcacctccatgtttagtcttgactcacagggccacgttatctactcacctctctcgtacgatttcatgtcgatgactgctctaactccacaatgatctttcttctttgaatttctaaggcatcttgtttctgcctctcgtgtgatattcttaacccatcccttcttaggctgagaatatttgactttacatctcctctcctctcctagactgtcagcttcttaaaggcagggtgtggctgttgtataagcttgaccctcagcctgcggcttgccgaggtgctcctgtgcagagtgaatttgtgaatgaaggaacacacaaaggtgactcttttggcttcatttcatctctctaagagctctgcttaacaaactcgttgctccaacctaaaaaatgaaggggcacttaaagaaaataagaccagcgagacagttcttcctcctctccttggaaaatcttttctacttaaattcatctttatccattcattcttctaacacagtcatgtattgatcacatgcagtaagtaaaaagcatgaaatgggaagatgctattcttacttttcctctcaccatagccagtgctgaataaaatctttctaattttcctttatgctgtttcttagtcctgccgatcttccatgccgtgtggaaggctgcatccttctcactcacctgttcaacatttattgtgcttcttctctatgctgaaccgaactggcccacgtcaaataggatcaattaaaacaaaaatcgagagcataactcctcactccttaagtatgggctgtacatggtgacttccttccagaaaatacaacatggaaaggggtggggaaaacagctgtatggtggagaaacttggcaagtacgacctcagccagttcatccaggtcaacaccagtagtggtaagtcgtgctcaccgtatgtcttttgatgaaaatggttctttacttttgtgatcttcctcccgcaaacccacaacccgaagcttataattagaaaaacatcaggaaaatcacarcagaggccattctacaaaatacctgatcgatattcctcaaaactgtcatggtcatcaaaaacagagtcagagaaattgtcacaagtcaggggagcctaaggacacatgaccactaaatgtaatattaaatcccggaagggaaaaaacaggcaaaaactaaggaaatatgataaagcatggattctagttaataatagcatatcaatattggatcattaattgtgacaagtgtaccatactaatgtaagataataatagtggcaaccagctgtggggtacataggagtgtcttgtactatctttgtaacttttctgtaaatctaaaatattctaaaataaaacatttattttaaaaaatggaactagacctcaagaatattaatgagaaagaaaaggaagacagattgtggtacaggattgtaagtgggttttctggattcagtagaactcgggctgcaaggtgagaagaggcagacagtgacgatggtaggggtagtgtctaaggacagtggaaagctatggatgattcatggacagttagaaaaggctaaaaatattattgcacttcagaaaggtcctagttgaggtcatcagcataaattttggtcgggaacagccagcccagatgagcaactttctcataacaaccaggccaagaatagagaaagctggtgctgtgatcgacccagayaagggctcagcatacagtttctgcaacgatctctctcttttaacgtgaaccacaacaaacacgctttctccttgaattcttccagattcattattctatgaagcctcctcttcaacagcccccttctctcctttttcccacattctgtaactgaaaaaaatgaataatgatagtgcaaaaacattctgatgatggtttagaggaaaatgttaaattagaggagtaaagaagcaagatatagagtaagtcaaataagtcaaagaaatccaagggaggctcaatcaattcaatataccctgagaatatttttccacttttcaaaaaaaaaaaaaaaaacgataaaacaagaaaagaaagacaaaaaggtcaccagctttttaaaaggatctagagtcagagaaatagaaccccatggttcatctgccttctgatcaccacaggcaaaatagctaagaacatctaaaaatgaaaatgtcctgcaaagaatgaaactagtcaaactagagaaatagaaaataaccataataatacatatcttgtctttgtgtaacacgttcttagttgacaaagcattttcacatgtatctcatgtgattctaaccaaaactttatgaggtaggcataacaattcttaatgatcacattttacatatgagagagtggattttcagagactttaaatggccttcgatggatctgggaccagaacttacacatcaggctctggggcctatgctggttttccttatgtctggcaccgaggtgtacacaatcagcagacatagataaagaaggcttcatactagtaagataatgcagaatatgtatctttctcccaaaagacacacatacaaaaatgtaaatatttaattttctattatcattattgtgataaatatatttgatcattaatgtgataaataatgtccttcataaagtgaaggatggaaatcatacaaaaatgcaaaacagctgggcgcggtggctcatgcctgtaatcccagcactttgggaggccgagacgggcggatcacgaggtcaggagaccgagatcatcctggctaacacggtgaaaccccatctctacaaaaaatacaaaaaaattagccgggcgtagtggcggccgcctgtagtcccagctactagggaggctgaggcaggagaatggcgtgaacctgggaggcggagcttgcagtgagccgagatcacaccactgcactccagcctgggcgacaaagcgagactccgtctcaaacaaacaaacaaacaaaaaagaaatgtgaaagaacttatgagagaaagcaatagaaagaaatgtaaaaacataggagctttttagtttgaccttaagttagttattcttagactagaaatgagggaaattaagcaggtaatatatatagatcttttaaaaaaaatctacacatctggatctttatgtgctattctgaaacaactgaataggaaaggaagggcaagacaatgttatagaaatcagtagcaaaacttgtgagaaagtggtctaaatttatatagtctaaaacgtgactcaaagagacataatcacagcctataaatatcctccaagcagcaatatgtggtaaataaagcaagtgaattattcacaaccttaggttcaggtcatctctctttgtccagttgtctagggaagacaatgctctacccctgagctggtgtcatccctagaaattaaaacggcagacgagggctccccaggctgggccctgttggagatactcaggtgtaggattcaaaagaagaagcacatcaaatggcctcctgagattctccatattattaagaattagactgaagagtctcaccacacaataaagtattttcattttttccctcacctttgataaagaatgacagagaatgaaatcaaatccaaaaatgcttttagttattggcccacctgattggaagacaacatggaatatgaaaaatcaagaaaattataaagtgctctgctttgctatcagacagcctggtactgaatctcatgaagaaacatctgaatttatgaagtcaaagtcactaggtcagggttctcatagcaaacctgtcacttacacggttgtacagctaccgttttctcattgtcataaggtaatcaatatttgtctttcctggtaaaattacatttaaggcaccaaaacattttaaaaacccacgagagctgtgacgtacagattattactgatgattaacattagtatgatgctccctgatgttatgcttcaaaaacaccatttttcagaaatatttctttacagaatagttttctcccttttgaaaatttctaggatttcagattaaagctcacaatctccttaagccacaagttatttcaaaaggtctgcctggtcccagcccttgaagcagcctaaattgtttgaattacagccaagatggccctgggcaggcccctgctgggtgtacagcagcccgctgtagagtgatattttaaatatcaggagttctctaaacacagcatgctcaattcagccacagaacaagcaaaatccaagcaattttttttccattgcctttccaagcacaatttttctagctttgtagagaagctgcctacatttggttttacttgtcttcattttgcatgtaattattttgtatgcaaccagatatttagtccttaaatgggcaatagttccttattaacataagaaagaccttgaaccatgtcttgttgttatcttaagatacttatgtgagtaagatgtgtataccaccctttatggcattgcatggatcttaaccagtgatgaggtgatatgctgaagtgtttaactgaaggctgcttgcttgctatgactacggcctgccaaccatgtgaactggtccctgagtgggaacagtgggtgcccagagagtgtcaagtggaaaaaaacaaggatttcctataggaatatctggggcttgtttttaggcttatagtgatggtaccttagtgtttcaaatgatcatcgttttcccaaaggtaacccaggagcacttcaattgaagctgggcctttgtgacaatattagcccaagaaaccgtagactttttcttactacaataaaaaccctaacagactttgaacaaatgcctgtacgaggaggcagaagtccacgcaagtgcacatacatacagattattaaagcatttaatgggattttctccactacgactgcaaaatttatgaaaaacacaaatcaggctgcaggtgttgcctgtactaacgtcctataaggagacaataacagagctccagtctctattgactgctttcctgagttggtggaatttgccagacttgcaatattaacatagaattatggaaattggaaacaaaaagctggaatctactaggaatgataggctgaagatgaactcaactggaaaatttggctaactgaaagtgacatcctttgtgctggaatttttctatctgaaagctttaaaaaggctgtaattattttgagttttcaattcaacccttttcaaactaagccttttatttccttcatcacgctttacctttcttccatgtgaactcgggcatttgccaggcactgaagtggtaaattcatattggttttatatacagatccattgtcagagaatgcaacacaacttctacatcctctatgccaagaaaaacaaaggaatatttgcacatcaaaacctttatcttgtgtacaggatcaaaatacctgagcacagctaaagaagtcatctaaggagaagcggctgattaatgccaaagcattatttctgtgcaagttagtgcattttctccacaatgaagccaaggaatacaagaacttagacttaccttgtgccttttgggtcccaaataacaatgtcagcatctgatcctacagctattcttccttttcttggatagagattaaaaattttggctgcatttgtgctggtaactgccacaaatctgttttcatccattttaccactatgctgtaaagcaattcaaagaatcattctaatgatcaaatactaaaaagtatcctatcgataaaatgacaagacttgcatctcttaaacaaacagaactgcacctaatttcttatattgtagagcatctgaggatgctggtaagtattaaacagtcataatgccaatgatggagatgatggggtaacatatggaagcctgaagatgacttttcagaaaccccactacttagcatccacactaattcttcccattcatcctagaatcacaaaaattgttataggtgacagctaaattttggtaatggtattttcgattctcctttaaagtttgacaataccacatttatgatctgacttatttattacagacctaagatttatgagataatcatgtagacattagatagaatattatagagtgagaataggtgacaacactttttttttttttttttgagatggaatttcactctcgttgcccaggctggagtgcagtggtgcgatcttggctcactgcaacctccatctcccaggttcaagcgattctcctgcctcagcctcccaagtaagtaactgggattacaggcatgcaccaccacacctggctaattttctgtatttagtagagacggggtttcaccatgttggccaggctggtctccaactcctgacctcaggtgatccaccctccttggcctcccaaagtgttgggattacaggcgtgagccactgcacccagctgacaacatttttaaatcagctggcaatgcttttattatttttaaaagaatattatagaggataggtgacaacacttttgaatcaggtgacaatgctttttttaaattttttgtttcgagatatggtctcactctgttgcccaggctggagtgcagtggtgtgatcatggctcactgcagctttaacctcccttggctcaggtgatcctccccactctgcctcccaagcattaggttggtgcgaaagcaatctgttttgccatcacttttaatggcaaaaactgcaattacttttgcaccaacctaatagctgggactacatggtggggtatgccccaccatgcctggctaattttttatagagatggggtttcaccatgttgcccaggctggtctggaactgtaatcctaacacttcgggaggccgaggcaatccacctgccttagcctccccaaagtgttaggattacaggcataagccaccacacccagatgcaatccttttgaaaagataaaaaaacaactcaagaggttcaattttatgcaattgaagttttacatgaaccaacaattatggatagtctattgcaagagattttaatgtggacagaattcagaggggtgtggctcctctaaaataaaattggaaagtgttaggggtttatccctatttatatggtaagagggtactaaaggtttatttaattatcaaacaatgcttgccttaaaaatgactaagaaccatgccctgaaagtaatattcccataagtaaaccatattaatgtttcataaaatgacatggttttctatatattattaagaactattcagtcactgtaaagccatttatataccagggaactatatagattatgaaaatctgctataataaagatattcattgtaaaacagaagttcaagtggaagcttgaacttttatcaagaaaatctaagtgaagagaagtcatctgggatggttagagttagggtggaggaaggggggtgaggaaaataatcagcagaagatgaggctatagagatgttttgaagatctaattgtaagttaatgattcaactatcatccaataagtaatggaggcaagtaaagggtttttgagagaacaatagcacaaacagaactttatttctaaatgagaactcccattcaaaacctatcctccctctataatattgtaaaaataataataaaagcattgtcagctgttctcagtacagaacaagagttcttgtactggagtaaagaatacactgtagcaagtgagactctggagatggggaccagctgtgagattactgcaaaggtccaaacaaaatatgagcctccaactagaatggtagcaacgaagaaagaaataaggaggccctttggaaacaaaattgacaagacttggtgaataattcattagagttagaagtaggtggtatgtgtagggtaaaagcaattgaagaggattctgaagtgtgagatataattaatgtgtcatttgagggaggcatcctaggagatgggtgaaaagggcatgacactggggaccagaagtctaaccaggcaagtcccctctgctagtcttcacagctccacatgtcaactggctggacaagttaacacatagacatttagtcatgtgattcttctccgtcctcagggagaagttttgtagtcatggacatttaaatttttttccagactttaaattattacttttgtgacttcatatagcaattttaaaaacatgatatccaaggattctttaagaagtgacatcaggctgggcacggtggctcacgcctgtcaatcccaacacttcgggaggcgaaggcgggtggatcacctgaggtcaggagtttgaaaccagcctggccaacatggtgaaaccccctctctattaaaaatacaaaaatttgccagtcatggtggtgcacatctgtaatcccagctacttgggaggctgaggcaggagaatcacttgaacccaggaggtggaggttgcagtgagccaagattgcaccactgcactccagtccgggcaacagagtgagactccgtctcaaaaaaaaaaaaaaaaaaagaactgacatcaacaaagatttcatggaaaggaggtatgagcataacgaatacgcttcgtgtatttttttttttttgtgatggagtctcactgtgttgccccaggctagagtgcaatggtgccatcttgactcaccacaacctctgcctcacaagttcaagcaattctcctgcctcagcctcctgagtagctgggattacagccacgtgccaccatgcccggctaacttttgtatttttagtagagatggggtttcaccatgttagccaggttggtcttgaa

SEQ ID NO: 96802 - DNA, 13404 bp, Homo sapiens
atgtttgtatcttatttcattttgtaaaatctatttgcttttgaaatattttcacatacaacattttttgttattatactcattaatttataaaagaatatggaggaccaggcgcagtggctcatgcctgtaatcccagcactttgggaagcctaggtgggtagatcacttgaggtcaggagttcgagaccagcctgaccaatatggtgaaaccccatctctgctaaaaatagaaaaaaattagctgggcatagttgtgtgcgcctgtagtcccagctactcgggaggctgagacaggagaattgcttgaacctaggaggtggaggttgcagtgagccaagattgcaccactgcattccagcgtgggcaacagagggagactctgtctcaaaaaaaaaataaaataaggaaatataaaagaatatggaggcattaatatagtcattgtttatgttggcattttgatgtctatattattttttaaaacatttaataattttataataatttctaatttatgatttggtaccgtgtcttgtacagtaagttgaacatcatgaatccagaacatttatctgcagttattcttatataatgttaataactaggtttttcattgaatgttagtcaactattttagtaacttagtaaaaggaatcttctaagagcattgtacaaatatagcacatacaatatagatttctttttattttacttatgccctcttttttatttctaaaagctgcacatgtaaacttaaatatttaaactgaaatgggatgtcttatagaatgatttgggggggtgttaatgttgtaaaataatatctgtacacaaaatattggttttatatattataggtatgcccaagaggacagagaacgaatgcacagaaatattgtcagccttgcacagaatctcctgaactttatgattggctctatcttggatttatggcaatgcttcctctggttttacattggttcttcattgaatggtactcggggaaaaagaggttagcacatttctatgaacatatctggctggactaatgttggaataattatcactcagaagaccttattaagtaattatgcttcttctgttttaaaagtggtaaacatgtttttctttatcttcagattattcttaactgtgacaagaaaacttaacaatagggcatgacttagtaatttttaagggaactgtccttagtctgttttactctcagtgatcttgaaggaatacttttacttctcaactataatccttattggttttctacacaaaattggttatgattacaagctatttattgttatggaacacattctttgtaatttaatttaatactaataatctagtatgatgtagttaaaaatgatatagctgtaacctaatacaaaaactcatattaacatattaaatcagcacacatttactaagcactgcattttatgtttggaagatcagggaaggagatataaaaataactgacatggcttatagtcataatcttgtggagaaaacaagtgtgtacataattataaatcagtcttagaaatgtagtggaagagttataaacaaagtactctggagttacaaagaacagagagataaattatgcctcatgggatctgaaagatttcaaaaaaggaacattttaggcagaagaaacagcatgaataatggcatagaggtatgaaatatgtgatctgtggtaggcaggaatggaagtaatctggggtagtcaagagtgggttgcaaatgaagaaaagtaatataaaggggagtaggaaagataggttgaggccagaatgtgaaggttcttgataagcatgtgaactttaatctgctgggaatgggaagtcaaattctgccttactgattttcttttagttcctccaacttctcaggatctttcctactttaggttctttcccttcctgcaaactctttctgctgtctgaaatactctcttcatctgactgcaacttgttacctagctaccttcttttccttctgatttcagtttaaaagtcactcagaaagttgagtactaaaaacaaaacaacaacaacaaaacaaagagtgcccaattaaaagagaaaaataaggaagacagcctactttctattctttccttctaggcctctgggcctgtggtcggacaggcagtctgaaagacttctgaaatgccttcaagcctttttctcattgtgttggctattagcacttggctctcttttagccatgctaacctctctagcaagttgctgtacagcctggttgaattcctctcctgaaaatgcttttcttctctaccacatggccaggctgcacattttccaaacttttagactccgctttcctttttaagtataagtcccaatttttaagtcattcctttgctcccacatctatctgatcataggctgttagaagcagccacagcacatcttggatgttttgttgcttaatgatttcttccactagataccctaagtcatcactcttaagttccaacttccacagatgcctaggacatggacacaatgcagcagagttctttgctagggcatagtatggatgacctttactacagttcctgataacttccttaattccatgtgagacctcatcagcctggccttcactgtctacatttctgtcagcattttggtcacagccacttaaggctctaagatgttccacgctttccctcaccttcctgtcttcttctgagacctccaaacactttcagcctctgtctggtacccagctccaaagctgggtatctttatagcactgccctacccttcagtttcagttttctgttagtccatttccattactataaaggaatacctgagactgggtaatttataaagaaaagaggtttaattggcccatggttttgcaggctgtacatgaagcatagtactggcatctgcttctggtgatggcttgaggaagcttacaatcatggcagaaggcaaaggggaaccagtgtgagaggaggcaggaggcaaaggggaaccacatggtgatagggggaggaggtacctctttcattttttttaatgttttattttttaatttatcttttcgtttttatttttcgagacaatgtcctggtttgtcacctaggctgtattgcagtggtgtgatcactggttactgcaaccttgacttcctaggctcaagtgatcttcccatctcagccttccaagtagctgggactacaggcgtgtaccaccataccctgctaattttttatattttgtagagacagggtctctctatgttgcccaggctggtctcgatctcctgggcgcaagcagtcctcctgcctcagcctcccaaagtgctgggattatagatgtgagccaccatgcccagccaccaggatcttttaaacaaccaaatctcacatgaactcacagagtgagaactcactcattactgtgagcacagctccaagtcattcatgaggcttccactcccatgacccaaatacttcccactaggccccacctcactgaggattacatttcaacatgagatttggagggaatgagcatccaaaaaaatcactccgtatttgagtgaatcgtttattggtgaaggtctggtgtatggaagtggcatcatttgatgtatattttaggaagaaaatttctgtggagggtaggtagattagaggtgagatatttaatagaagactgttgtcaaagaaatagactatggtagttggaatggaaatggaaaggatggtcagatagaaatagaatcagcagttttctggggcctacctaataaatccagggtggttatttacattgggaaagcatttataattttttagaataatttataaaaatactttaaaaatagcagctttcatccagtttttaatttctgttatattaatagaatgatgagagatggggtgagaaaggagatatgacaaagctgaaatagaataattgtccagtcaattggtgggaagttctcagcccacagtaaagaagagctaacaggcataggtatgtcttcaccaaatgcgtttgaattcagacgtcagctatgttttgagggagagacttgaagcagagactagagggtggtttgagggaaggcgaggagtgactaatgctcagacaggaaaggaggtgggtttaaaaagagggagttgtacaactgtgctttgcctaggaaattggtaacaaggaccacaagggccatctcttacagtttcctgaaattttgcacttacagtccagatagatgggggctggaggtgtcttaacaaatgttcataaaaactggggataacccctgagctgatctggaaggatgcatggtttggcagataggtaaaatgtgtttgaggtggagggtgatgcatgcccagatgtgtggaggcacaagtgaacttaaagtcatttagcatggccaggaaatagagaagacgatgctggtgggggtatttttccagaaagacaaaaagactcaaaattagtttaatgagaggagttctaaaattgtatttcattttgtaaagattatgtgtctggctgtagataggttgaaagagaacatgacaagaagaccagttaagaaggttatcaaagtaatggcaagaaataatgaagttgggattttgcctctgaaaatattaattctataaggaagcaaaatgtcaaattatgtaatgtgaatgtgtgtttatgttttcagtgttttcatctttgtaaaatggcacaggagttctgtttccaacaatgtgagttaattaggagctccaagtgacccacctgcatgaaataactaaagtctgggaaagataaactatgtgagacattgctggtcccagctggagatggagagatctccaggaactcttctctttcaaaacacaaaccagcccaccctgagttaggccagagtgacaaggcaggcagttgggatgagagggttgtctgaggtcaattgctggtagcagcagtgttatctggatactgaatcttgggtagcctctgctaagactagaccctcaagggcctgaagcctaaggtagtagtggccatggctgctgacaaaagtagcagagcctctttgctggaaagcttccccattctcaatttaaccctgtaagactcttgctcattaaaatctagtaatggcctcatagtctgtggttactaaataaaatagcactaggacttattggtacatgcaacaaacaatatatttatgctctgagaggacacagataatggactttcacctacaggatatgtaactgctacctataaagaaagtaaggatgtagtcacaagctgtccataacaataagattattaggaataaatacatgtgatggggaagaaaaggaaacttttagaaatgaaagtttatacttgccaaaataaaaaaaaaggtagtcagcagattaaacagttgaagatagaattagtgaactagaaaaaaatgcatagaaataatggaatattgcactgagaaagaaggagatggaaaatcaggtgcaagaaggtgagatccatgttgggtaggtgtgggagtggtccaggcttaaagtcttacacctcacagaagccagtctctcttataacaattccatgaacttctggggtcctgcaagtgacatgccaattataagagtcactgaactcaagaaagccaaaccatggtatccccatcaggcatttatagttcatttatggttctccccagtcgagatataatttaccaggcaaggatcatttgtatcataagcagtgttgcctagcaatatagttgacattctatccttatcaggcttccagaggaaaagagctagagagttacctgaagcccagattctcatgcacagcataaatgttttgttaagtctttgcccaaagtatctaattagggtctctggaaaaatagagactatgaaggagagctgctatttttttttttttttttttgagacgagtcttgctctgttgcccaggctggagtgcggtggtgcgacctyggctcactgcaagcttcgcctcccaggttcacgtcattctcctgcctcagcctcccgagtagctgggactacaggcgcctgccaccacgcccggccaatttttttgtatctttagtagagacggggtttcactgtgttagccaggatggtctygatttcctgacctcgtgatccaccygccccggcctcccaaagtgctgggattacaggcgtgagccaccrcgcccrgccaaggagagctggtattttaagagataactggcttcaggttttacaaaaataatgagaaaccgattcacagatcccagaaggaaaacacatcccaagcagaataaacagaaattcacacctgcatgcatcataattaaactgcagagtactgaaaacaaragagaagccatatggaagagaaccaaggcacacctgttaacagccttggttgtgcttccagctaacagccagcacttactgcagccatgtgagttagtccttttaaatgctgcagcatggtcaagcctctagaccagtgcttcccaaattgacaccatgtggagcagaaagaactgcccagttsagcccagtcacatcacaaaatagtgagaaatgatcagtggttcttgtttcaagccactaagtattgaggtagtttgctatgcaatgatacataatggaaacagtgttcaagtagaaaactcaaaatcacctatagactagatattagaaataacaagacagtttaataaaaaggttgactataagataaatatatgaaactatttcctrtattccatgtacagtacaagtactgtgacatagctcagaccattaagttacataggatttatctgagcacttgacaagccaattttaaaatttatatggaagagcaaagggccaggaatagccaagaccaccaaagaagtagaaaaaatgtacatgacatcaaggattatgatcatattattcttctggctcaggaatagataaatggactcaagaaacagaatagagacccaaaacacagacaattatatatgaaactttatatgaaagaagtgccatggcaaattagttgggaaggtaggggtgggaaggagtacctgttcagtaaaatgctgctgctgggacaactggcaattcaaatgggaaaatgtaaagttagatcctaccttacgttaggcacagaaatctcttctaggtgaattaaagataaatgtgaaaagcaaaaccttaaaatttttagaagaaaatttgggtgtgtktgtgtgtgtgtgtgtgagatacacacacatctcagggtgtggaaggactttttaaaacatttaaactgctaagtagaaaaaaaaataaaagcctggtgtattaaaatttagaacatgtttataaaaaggcttcacaaagaaagtgaaaattgagcccacaaacaggtacacatttgcaacacatttaactaaccacagaatggataaacaaatcacagtattgtcacacagtggaatcctaacacaatagcgaaaatgactgaacctcagctataagcaataacatggatgaaacttggaaatgtaattttgagtagaaaaaaaatctcagaagacttccattagtgtgatatcattcaaaaataagcaaaactaaccagaatagttgtgaagcagaaatacaattgggataaaaactttctggaaaaaagtggtaaaagcagtttggtacatggttgcctctaagggagagacagaggtatggatggggaggaacaaagaagtagttacaaattgttgacagtgttctagttattgggtaggagatgagcttataatattataattactatactttctaacaaacacgttacataccatcttttatgtgcatattaagattaaaatgatacacagataactaagaaatttttagcaacaatttggcaagatactaaagatgcagggtagatataatttctgcttttctgttacacatttagataatactgctacagtgttatttatcccttttgagaaaaaaaggttatactcgagtagtttttgacttttcttatagatttagaaatctgtatcttgacacatgtacatgttttattaaagccatttaaatattgcaatttttctagtaatcatgcctcttttccttctctagttccagcgcacttttccaacacatcactgcattatttgaatgcagcatggcagctattatcaccttacttgtgagtgatccagttggtgttctttatattcgttcatgtcgagtattgatgctttctgactggtacacgatgctttacaacccaagtccagattacgttaccacagtacactgtactcatgaagccgtctacccactgtaagtgtttatttcgacttaagatcattgtttttttttaaatctctgaggattattatagattttatggcgtttggagacaaaaacaggtgtgggtttgagttctgggtctgccagcggctttattaccttgaacatgtaaacagcctcttgtaacttcagttttctctttggtaaaatgggaataatgatccttataaggtgtcgtgaggattaaattaatccacacattctagataccatataacttacatataggaggcactttatagtaaatggcattattacagtgtttggattagtgttttttctttttttctccccaaataagtgtaatttctgttagaatgttttgttttcaaaatattaaattcataaaattctgtatgcaattatgccagactattccagtttcagaatttttatgaatttttgtaaattctagaactagaaaatgaatcaaattcattttgatattttttgggggaaagggaaaatagaagtctggtatttatattctcataattgtagcaggctttcagtacataatatgctcagggaaattagtcctttttgagcaagttcttaataataaaacatcaaaaacatagaaatgcaaataggtacaaaacaaccagatatcttagaaaaaatgaaaatcttcttttctacctgccagttttttgtttgtttttgagacagagtctcgttctgtcacccaggctggagtgcagtggcacgagatctcagctcactgcaacctctgccttctgggttcaagtgattcttgtgcctcagcctcccaagtagctgggattacaggcatgtgccactatgcctggctaatttttgtatttttagtagagagacggggttttgccatgttggccaggctggtcttgaactcctggccttaagtgatctacccaccttggcctcccaaagtgatgggattacaggcgtgagccactgtgcccggcctctccctgccagttcttaggtatggcaaattattttatagatatatatatatagctataatttatatataaaatactatataaaacactgataatgtcctttttgttgattcattgattcgtagagcttaactctaagcattaattaccctcttgtcatataactctcctaaggccttgcataacttaacgtggtcctatttggaaaacttaataaatgaattgaatattatatttaaataagatataatgtaatcttatttaaaacaaaatcagacttatttagcgatagtctcatttatgttatttattgtaatatttataaagcctattacagtaggagggtcagaaaatataagattagaagagaaatggcaaacaggtactaccaaccctcatctgcacctgtaatagtcacttctaatttattgtagcactttttctgctgatttgagtgtagcctaagaatcttgtggcagcactctctgtcaatcagaatcatcacacagcttcattgattaggacattttttgtctattcactatccctgaatcaagattgtttgtttttcttcctcagcacccttaccaacagtcattgtagaacagcttgcctgccttgttttattattatacaaaacagtgatttttaaaattatgagatattatatagtatcttatagcattgggtttaggcatattatttatttacctaagcattctaaatataaatgtatggtcagactgggctaagcacttccgaaggttgtagggctaccacaagtcatagtaattttttttttttttttttgcaagtcaacaaaaagcaatagcacacaattaccagaaacctttggaacactagtgcattgacaaatgaaggctgtttttcccaatgtatatatagcctagtttcttacaaattgaaaaataccacaggactttactgataattatagttttaaggggaaacagatgaggcatgaaaaaacatgtaagcttctatcattataacttactgcaaaaaaataacttttacattactaaaactttaagaatgagttatggaaaatgagcagttattactcttatagcagtaattagctttagtttgtcaaatttaaactatccccacatgtaggcagcatggattgaaagaggggaagagtggaatgggatgaggtcttctggtggaaggcaggagtgggaaacgtaatcacttccagaaactagtttcctagttcatttggagaaacacaggatggtttcctcctgattaaagtgaatctttttggagctcttaaggaattacaagttgtggaaatggacagattttttttcttttgctgttgataagaggtagcaaacaagactaggaaactaattcattagaagaggtaacacataatggtttcctcttgattaaaatcatcttttttagagctcttaaggaactacaagttgcaggaatggatagattttgttttcttttgatgttgtttgggggtggtataacaagacaaaaaaattatcacccaagagatcaaacatgtactaatgcattactgtacaggactgaacctaaaagcatcataggaacacaggattatggtatcatgatgctgtgtggggaggaagcatgtggtccgtgatctgaaatgactgctgacttcctaggacactcccctgtatagggagagggtttgagtagcaagatagtaaaaatgatttgaaaatactcaggaaaattaaggtagaactatgtggataaaagtcccattattcaaaataaagtgctagaaatctggtgacacatagctctttctacagctttttttttctgattataaaaattacattaaaaatgggacattcaaaaacagaataaaagcacacacagaataaaataatctgtaattctattccttgagatgattctgctacaaattttatctttccagttttatttctgcatgtgtatgcattttaaggaatattaaggctatactatgacatgctatcttgtaagttgttggcacttaatgtattaggcacagttaattttgttaacatttatttcataactagatttttatgtctgcataatattgcagcatgaatatactataaaatataaccagtttcttacatttgaatatttattttcttctgggctttattataagtgattcaataaaaatccttgtacagtaggtttttttatgtatccctggttgtttcccttggataaatttctacaggtaaaattgctgaatcaaaagggataaacagttttaggatttttggtacatatttccagactgcctaagaaagcaaccattgtacccttgctagccgtgtatgacagcctgtttggccagctttccaccaatctgaatatccaatggatagagtaaatatgctttttaaacctcttttaggctctttcatttaaaaatgatcaagattaaaaacatttttaaaacatttttgatgttacaaattctctattttattttacagatataccattgtatttatctattacgcattctgcttggtattaatgatgctgctccgacctcttctggtgaagaagattgcatgtgggttagggaaatctgatcgatttaaaagtatttatgctgcactttacttcttcccaattttaaccgtgcttcaggcagttggtggaggccttttatgtaagtttgatgggtaaagtcaatgaaatatatttattattgtatgtagtaatatttcctctagatttaattttggagctttttccttaagatagtttgtttaatcctttttttttttttttttttttttttttgtgatggaatctcactctatcaccaggctggagtacagtggcatgatctcggttcactgcaacctccgcctcctgggttcaattgattctcctgcctcagcctcccaagtagctgggactacaggcatgtgccaccacacccagctaatttttgtatttttttttagtagagatggggtttcaccatgttggccacattgatctcgatctcctgacctcatgatctgcccacctctctttgcatttgaagttcatgaccaaattaaaatattttaaaaatctaagtatgtaataagaaataaaaactggtttttatttaggaatttatgaaaattagtcttgataatgtatactgtttattattaagtagggtcttaggtttctaagtgtatttatgaaaaccttttatagtaaaaagtcctcaatatatcttttattttaatgtaaccattaattcatttgtttagtaaccatttagaccaaactgtgactcaaaagaataagacaaattcactgttaaaaacctcacttactaccaggagataaagtaggcaagccagtggctgagaaaatgtagtgtggttcttttgaatatgtgacattgaacgtcccaaggatgttggacaccatcctttatatggagcttggtaatgtaatttggtaatatagtttgggaatgtaatttggttcaaggtgatggtggggcttgagggtaagaccaagggaaccagaaattctgttatccgccatattctggtttacagatgaactgtttcatttggcctgcacaggatttgaaaatctatagttccctctagctcctctatttccctgttagatttggcccattcccttataccttcctggctaccctctctgtcttttgaggttgccattcttgctctagggaatagggacctgttcttaaaaggatttaggcagaagagtgacatgattacatttgcactgatttgcactaatttgggcttagttagaaacttcctctttattcctttttactgtatatggctttttactaccaggtcttaaatttgtatcattagcaacattgtttagctacttataagttaagtagagtttttgttttgttttgttttgaaaagttgattgaggacctaataactgtctatgaaataaaaagttataaatgtc

SEQ ID NO: 96803 - DNA, 14136 bp, Homo sapiens
tgaaaccaaagcccaagccacacagagcaggccgaggggtcgggcaggcccccagtgctggctttggaagaccatcgactccggagcagaagttctgaggcctcagggatgcttgggtctctacggcaggttaggacccaggccctctcattgctcccaaatccctgtgttgctgaccacacccagcctgaggcacccccctgggtgacctgtgagctccccataacactccttcagcccctgatgtttccagcaagaccagcctcctctcactgttcagccaggttaggatgccagggttctggtttgctgtgcactagtgtgtggccctgggcaagtcacttaaaactgtctgtacatcagtttcccacacctgtcaagcggggtgtcccttaaatgaattaatacatcagcactaaaggccgtgggccagagttcaccccaggccctgtgattccccggtagtgaagaggacaaggaggcaggggaagtttcctgtgtgggccctctcccacctcctgctcgagcgagcagtctcctctgctgcagttctcagggagcctgaagagctccacctcccttcttttctagaaggctaaagcgcagtgccatccaggcctggccatgtgctgcagctgccttcatgctagaactctgcaccgagaacgccactccgagcacggcgtcgaatgcaatctgcctgtgacgcgtctctctcccgcccagccccacacagagaaagcctcccctgtgcacatccataaataccactgtatcttctctttgcatttatttctttacattttgatttcaatggaaagcaataccaagcaccttcttcttgcaccataatattttttattcttatttttcaagcataatttaacttacagtgattgttaacataagcttttgtctttggcattgcatatatccatctaaatgagagaaacagaagtggcatataaaaactcacctacatacgaagctccaaggtagggccacttaagttacatgttatctacagaatatttttatatctttaccttaaagaatacttctactttctctacctcgtctctactttgcgtgcgtgcccctccccaccatggtaaatacaacagttgcaattcagttaagaacactgggggaaaatgacatcacatgtaagtcagcgtttggaatgggtctcagttatgaccgttcaggcctttgaatgtcagcttcagcgcgaggtgctctccatagctctgaggagggatggcaggtcaaacacgcatgtccgtccctcaggaaattcacaaaaacgccagtaaagatcgatagttcgtaagtcccaacccaataacagcgcttaccccagtctccagactgtggtctctaagactatttcccaagaaagggacccacacaggggtcaagaaatgtacaggaagagggctgggcgcggtggctcacgcctgtaatcccagcactttgggaggccgaggcagatggatcatgaggtcaggagatcgagaccatcctggccaacacggtgaaaccccgcctctactgaaaaaatcaaaaaaattagccgggtgtggtggctggcgtctgtagtagtcccagctactcggaaggctgaggcaggagaatggcgtgagcccgggaggcggagcttgcagtgagccaagatcgtgccactgcactccagcctgggtgacagagcgagactccatctcaaaaaaaaaaaaaagaaatgtacaggaagaccccaaagcatctggtagcagaacagggcgctgctctcagagagcactcacagggtctggagggccgcccgatccaaccacggggctcctgctcgtcaaggacaggactgtgagcattcgtaaacagtgaccggaaaacacaccctcctcactgctcgagtttggaggctgccacgagacccactcaggattttcagacatgggcaaaccgaggaagagaatcaagcatgacactgcctttctcataagcgctgtttgtgagagtaacaagatagttgatcttggattccttcccgttagagaaatggtcctgctaacacatggagaggggctgatgggactcgaagagctctgtttttaaccctgatgagagaatctagtcagtgatcattttgagccttcgcaacacaaaaaagccacccagagagcaggggttcgccttaggccttgctggcaagtctaagctgcctctgaccaggcctctcggtgagcacccagctttcagaagaacgggggacagagccttgctcgtcagcaccagggtgtaatcagcaaagtgcagatgacccgatgtcttcagctaataaattatcggggtggggggcaggaagcaggaggtcaggggaaggggtcttaaaagatacatcagctaattacaatgtatttggatcgtgatttgaacaaaatatttaaaagtgtttatgaaactatggggacactttctggctacttcataatattacagacttgtccatttatttgcgtgtgttgatggcatttgatttggaagtcttcgcagtgacgactggggcctgcttccctgtcatctagaaggtggggaagtggtggatgagcagaggacctgagatcggcttgattacactattcttcatgcttttgtgtatttttggaatttctcatgaaacataaaaatatatattccagagaaaggtcataagctcacaaagatggggagaacagaagaggggcgacacgaatgagagcctggcaactgacagcaggtgacagagtcacagcgattcagcagacccaaaaaacagatctcagccaaccacgaggagcactgagaactcaccagatggaagctgcgctgccacaaaggggtgctctccagcgactatgatcctgagcgcctctgcatggggacaggagcaagctgaggatgtgggtactgcagcaagaacggggggctagtcactgtgtccacagcaaacactgagtagggggtccctcccttggtacactgaaggcccagctctcaccctctagtcccaggatggagaggcgcctctcgtggacagtaggccagccctaggggaaggttctctgggcactgagccagggggttcctgatgatgccacctccagtcaccctccatgaagcctggcattgagaaccagactgtgcccacagttggcaggtggttttcgtgcctccactcacactcggcaacacataaccaggggcaaccaggcacctgaggggaggcttttgcagggacggtggagagcaaacagagactccacagggaaaagaaaacttgtcaccaggcttggtggctcaggcctgtaatccctgcactttgggaggccacagcgagaggatcacctgaggtcaggagtttgagaccagcctggccaacatggaaggaagggagggagggagagaaattagctgggcatggtggtgcacacctgtaatcccagctactcgggaggcaaggcatgagaatcatttgaatccgggaggtggaggttgtattgagccaagatcgcaccactgcagtccagcctgggtgacactcagcacacacacacacacacacacacacacacacacacacaaacttttagtgagctatcattactatcttcagagactagacaagatattttatctaggaaatatgaacaggatgacattttaaaaaaagaatatccagggtccattgtcctctgaaaatggctgttttatttgtcagttagaaacaaaatagcaaaaatcatgaaacctcatttaaaaggttagaatatacatttaaggaaatcacacatgaagaagcgtgtaagacaaagacaaggaaaacagggaggatggaaaagacccagtattgttctgggagatctcctactcaaggggtagaagttccagaaggagagaatgggaaaggggaacccttgatgaagtgcttcagggagccccctacgatgggagcacgggagctgccgtctccaaaggaccagccaggcgcccagcagtgggtgtgaaaggtcttcaccaaaccacacggcttcgaaatttcggaacgctgggggcctggagaagaccttatagatacccggagagagacatcgagtcacactcaaggtgcagcatcacgtggcgcccattttcctgacagtactgggagaggaagacaacagagttgcgccttcagaatcccgaaggcgaaggatggtcttcaagctggaattctatacccagccaaagtcaggacgcgtgaaggggagaatcgacacgttttcagatgtgcagaacttactctcatgcctccctttttaagacacagctggagcctgagttctgcagagtgagaaaataaaccaaggaagacgatggctgggacaaaggaagcgggagacttaaggtagggcagagacagagggaatcccctggaggagttggacccgtccaggccagcagcagtgcagacagagggagcgcctgcccggggtgagtggcacagcttcggaggcagcgtctgggccggcctcaccagactgcctgcctcgctgcctaaacctgaggatgcaacactcagccgcttgtctgtgcctgacctctgttgaccacatggccccactctctcttccttgccccactgcctcgattccccgaggtcactcatttctccaagggggtcttctgcccagttcccacctgagagctggaggtggccaccatggagggcagctcaccccccagaccacaccttctggcacctggttctggtccacatgactgccctgccagatgttagacggggtgtacttggtttcctgggggtcacccgtggcttcaccccagaagaagctctggtcccctgtcccagaagctgacggcagactcggactcgagactgtcctgtcccgggaaccatcgtcaactcctccttccactgcactggtgttgctgccttcagtcttcagaaagcaaaggacgtgttttcagggccacatatatgcagatgttattatcatagcaaagcaagaggacacttaacaaggtcaggatgttgctcacggggtagggggtgcatgtggtttgaagggacgcagagggtgacgtttgggcctcattgaagcggaggatgcactggtgctggtttcattactgttcttttactaaacatacttgttcttcagcatggatggcacactgcacaataaataaagggtgaaggacattgtagctaagtcatgcatttctgatgtgctgtctccctcctcttctgtcccatcctctctcttccccccacccccacatagaggcaaaatatcagtgtaagaggaaatcatggttacatagttgaaatatctattatttttcccttgatttgaatgagtcattctttacttgaagagaccctaaacattgactgtgttacctaaagaatagtgcctctttttcttccatatctgtatgatggcatgaaatcgcgtcctgagaagaggacctaagcatgtcgtggaaaatcagtatgcttctttatgaacatttattttaaaagagcgagagagagagactaacaggtttttctgtttgtgattgagaattcattcacagcacactgaccgtctcccattggactctgaatgcggcctttgtgctctcactgacgtcaggagtctgattgtcttaatatgtttctcaaggcacaacctataaaagccgttttctgctgtaccgtagaatattcatgagaatacagacttttttgttttgatgctgcattctttaaggagagaaggttttattgttttcttcagggtgctttgggtcaaaagcactagcagcttctgttgggaactcgtggcattttgaatggtttttgatacagaaatagcacaagtcacgtctgacacagccgtaggcgcacgaatgcgtgaatgcgattgtggttctcatctctgcagctggtgtgtggggccgggcctgggacagcttgggcctcatccccacccacccggctcccaggatcctcattaggaagccctcaggagccctggggtgggtctccttgccctgtgaacgctccatttgtgttaytgaatccaacataaatgcagcattgtcttcagaggtgagcaatggccgtggccggaggtgcgcatgggatgcaggcggcgtgtgctgctgttgattttctctgctctgctcttagcttactttagcagatagtggagtttcacktggcagtccggtaaaccaaggcagtgtgaacatcccttccccacaatgagtgaaaaygcaggaggtgccgtagygagaacagcgacagcattctgcgcattggtgagcccgactccccagcctcggtgcccaccgaagccccctctggctgcactgtgccagtgagtccaggctccttctcagcagaaggtggctgctctgcagggcccctcgcctccctgctcctcaggggacccgcactcttccatgtccrtaggsagacgcgcacyragctggagacacagatctgcgaggagtaacttgcctctctcaccagcactgccagggrcggatcagcgccagcaccttccagcatgcgctaaactgctggagaagctggagtggctggaaggagccctgcctgcctgccctcctcctcctcagttgctggccttggcagctctagggtgacccagcaggggcctggaggagtmggaagcagcttcccagctgcagtctgcatcatcctctctgtgctgtcacagaatggaaggttttagcagaaaaaggagtttgtaagcgacattcagaagatttgggcagcagtttcttcccccatagggtcctgtcttttgggrgtggggagtgctgggccaggctgctcgctggctgtttcacaggtggtggaatttaagagcagacttgggtcgagctgtgaccgttcaggtgatgcacgcacaggaggttcagctgtgtgcctgtgaggcrggcaggagygtcacccaagcttcagaagagaattccccggcagcagcgtggcgctcagcatgttccgtgtctgactgttttgattgtctctcagtccagttgacaaattccttttaagatgaaatttgaattaatttgcagaacttgtacaaatctccaagaaaacagcttaaggaacagattaaagaatgaatgccttaggaattaaagcattaatagctcttgagtagactggatggaaagatgagttgtgtaggttatccagatgaggctacatccagggagcaattcttaccttcagagggcgctgcctgtcctccttggcatccaagtgagcgcatctcctccacgctcaatgatgaatgctggccggcatccctgtgaggaaccttgtgatcattttccatttctgaaaactcccaggtggtgggggcccttggcccacatcagcattgaccaccccgggytcagatctggccaggtgcctgcgttgtgatgggaatttcagtacactgaattttgcctctgaccctgatgaaatagcttcggtggcatttgcatcaagatcatgttagtgtcatctctattagatgctttggagcaaacatgaacttgggtttccttttaagatgtcctgtgattccagattcaggggaatctgagaaaagtttgaagaaagaaaattccactcggccagccaaccttgggtgtgcagagcctgccccgccttccccactttgtcctgagaagctgggtcctccccagcaccagagttgctgctgcttcccctygcrcycttggctgctctcccggccccaagcctgagtgacactctaggattgcagatggcaggctggtctctgggctccccsgtccccatgaccctccacctgcacccagacctytgggtccttgctcaggcagcccctgccctcggtgagacgcagcccactgtgggcccttcccctgggcctgccatcagctcctgtgctcctcggcgccccagcggctgccctgggcccgttcccacagcacctggcacacagcaggagccatgaatgttctttgggaactgaatgaggagtggaaatgygggcatgtcatrtttttgaagttaataaaaaaaatcccttaaaagttgttttatgttcggtttttaaagagattaacaccagacgtttacaatgctgccccctccctccatctgtgagaaattagaaatggagggggatgcgctaaagccagcagcgggtcaggcctctgcccagcgcctgtggtgggaccctgtttctacatgggaccttgggtgacagcagcacatcttataagcaggggtcccacccaggccccccacacagggataaatgaggcgagacgtaggcaataacccagcttccaagatgcaacgctgtgcagttacttattccctgtgcttatttgttcaagctaaaatgtctctgtttgaccaaacagaaagaatatgagagagaccagtttcacctacaaatatagacaccagcattctaaataacatggtcgttgttgatgctattttgtttttctaactttatcccttcctggagataaatgcaactttgttcttctacattatacaagtgtatgccttccccgatgggttcacccatgggtgctgactgtgtaacttagaagaacaaagttgtgtttatccctggaaagcacgggcccgctcacctgaggcactctaggaagtcactgcagggcactggtcccaggagaaccgcgtgccaatcacagccatgaacgcggaagagggaaccgcaacctgacagtcattcacgagactgtgtgttcaggaaagcatttagcaccgccgtgcttgtgagagccggacccgtagcccccagtgcccacagcagggagcccgccagctgagtcttcttcaagaagccaggccccgttctcttttctccgagtttgcgagtttgctgacttagctctcctccctgcctttcatatattttattccttaaaagaaagtctgaagcaaatgtaggtgaacgctgatgtttcataaaaccagcattgcttacgcagtttttccattttgctatattttgtcataaaaatgatcagaaaagggaagaaaggaaatgaatagggtccagtcctcacccacatatggggtgggggagtgggtggacccctgctttctgctcctgcacatggaacagtcctcacctatgtgtggggtggggggtgggtggacccctgctttctgctcctgcacatggaacagtcctcacccatgtgcggggtggggggtgggcggacccctactccctgcttccgcacattgaacacgcagtttatgtgcgtagattcttctcacataatagcaaatgaaaaccttttactgtgtcaaagtcgacacccaattaaaaactaaatacatgcattttaaaagttgggggttgcacttcactgatttggggaaagaaacagaaacagtcagagaggaggatttcatttaaaaaacaacaataacaacgaggcagcccgtgctgcgctgtggaatgtgatcagatatattcagaagcttctgtcaccttctgggttgctttgtgtcttttcactgtccaggaaagtggcctgagctggtcttcgtggcctgaggcctgggcactcctcaggttcaagccagtccagccagggcagccagcagggccaggttaggagcatgattgactgcggtggggcaggggaggggtgaggagacagtgaagtcagccagagaagctgagagcacccctcaccctgggcaccaggagctcaggtgactgcagctcccacggctaagcggcaacccagggatcagaaccccaagctccggccagtgcccaggcctcccccaaagcatttcccacccttttctcaggagaaggctgagtcctgggaccaggacctccagtggtttggagacaaagccagtgtgggacctgctgcctgggcagtgactgtggaaatgctttgcacccaggggcagctgccacctatgggctgtttcacccaaatcggtggctttgagactgtggagtgcaggttttcctaggaactgagttgctgacaaggcctggtcttaagccagtccagagacgggctgagtgtcagggtgaacgtgggtgggctgctctcagggatgcacctggacaaggtcacgcccaaaggtgctgaccctgaggggcgaggagctgttttctcagcagccctcttgttggcccagacacccctctgagcttgagaccctcctagagggcaaggccccacctccccacttggcccaggtcacatgagtgttggttatggggagctttctgaggggtgggcctgtgggaggggagcaggcaggctgggctctcacttggactctcagtgaagttttcggcagagtcgcgtgtctgagaagtgacgctgggatgtccctgggctgtgccaggagcagtgctggctcagagtgagtgcctgcacacactgcatgctttcagaatagggacctgccgtaaaaggggtgcgcaggtcgggctgtttgtgatatctgtaatttaaacctacccttcttcctgtgttacttttctcactttcatttggtattgattgtaaggaatgaaattgattcagcttctgttcctcatcaaaattacttgtagccttttctcaatagcacattagtacagggcagaaaatccatttcttcgcgaggtgcagaaacgcatgcccagaggaacgcacttgtgccaagagccaggagcacgtctcgttggctgtgtctggtaaacatgttttccaagggggcgcttgtctcaccatggaaacgggctccgggtctcgagcgtctgtctggaccacttctggggcacacgctcttgtggctctcacagcggcacggtgacttcgatggaagaggaggaagaggagcaggacaggcagtcttcctggctgagacctggcgcccgcgcttttccttgaacagccacaacctttttctttatttttctcattattggcctctagaaatgacgtcagcaaggcctctgggcctgtagcggggtcctctgagagccggcctcccggggagggtggaggaaggaacagggattgtggagtgcgtcctggcctgacctcccatgggcttttgtggtttttgcccttgaggaatgggccccagaggcctctgagtcttgcattttgagtttgttgggcaagagggggacagggggagaggggtatccaatcctcaaatggtcacaaccccccccccgccccgtgaaggtggccagtgtgttgggtgggggctctggggcccagggacagcaaagggcggcagtgaccggctctcctgcttgtttttcccacagtggatgtggccacggcgctgcctctgcaagtggccccctcggcagtgcccatggacctgcgcctggaccaccagttctcactgcctgtggcagagccggccctgcgggagcagcagctgcagcaggagctcctggcgctcaagcagaagcagcagatccagaggcagatcctcatcgctgagttccagaggcagcacgagcagctctcccggcagcacgaggcgcagctccacgagcacatcaaggtgaggcgcggtgcggggctgcgggtgggccaggcctccggcaccctcaactcccggtgactccagccctgcctccgcggagtgtgctggggccccaggcatgatgcagggttcctgcaggaggccttctgcgttgggacggtaacaccaggcaacaaaccgcgggcagcacttgcgtgtattgtggaggacgtggtgctgagtgggaacggcggtccaaagtcattgagtggaagcatattccaaataggaaaaatgcttatcgcctaatttcatccgaaacatgctcagaaatagaaaagctaccaaagggaagaagcaccagaaccttaatgatcgttgctgggaggtgtattgacaaatctgtgttttcttttccttaggacttttctatattttctattttctctactaaccttttataattagaaaaagataatattttcttttaatttaaatgcggtaagaaaaaaaagactttttttggtacttactgtctacaaatatttaatctgataccagattttaaaattaaatcaattggaaatatgtactagtgatatgtagcaaagttatatagttggcaggctagttatgatatctgtgattataatatgctgtcactgcatttagaaccatttagagcaacaccgtctaatagaaatatacatgagtatattaaaattccaccagtaattttaaatattctagtggtcacagtaaacaaagtgaaaaatcccacaaaaccagattaagttatctatatctgtgtaacaaaattaccccaacacttagcagtttaaaatagcaagtttgtattgtcttgctctgtgggtcaggaatcctggagcagcttcgctgatggggtctcccattatgttgttattaagatgtcaggcagggctgtggtctcatctgcagggttgactggactgaggcgggaggagctccattcaggctcactcacatggccgcaggcaggaggcctgaggtcctcatccacagggctgctcacagcatagcagccagcttcccagagggagcaacccgagaggaagcatggccaacatggaagccacagggtctctcgtgccctgatctgggaagtggcaggccgccaccaacactgctgctgttgttgttcatgctaagtcttggcaagccactgggtcgcacgtagggcatgtctccattcaggccagccgcatttcgagccacacgtggttcgtggcaactgttggacagcacagatgtagggcatcaaaagcctatgaccgtatgcaacctggtgcttctgagatgctcacgtggtccatgggtagaagttgttcacctgaggtcttggctacctggcattagcccacacacagatattagtgtgcccacctagtgtgcagagtagcttaggggtgcatccctctgtttctgccctagctgataattctcttgaccacaggatcccagtttcccttcctttatatgtaagacactttgttcagtgtctttatttcataatcactgtcgagaaatggaggtaaagtagtatcagttgtctgtagacttagtggcagattgtgggggaggctgcatcccaaagctgggctggccctggaggacaggctcagggacagctccatgtcccctctcatgggtgccaaaccattctgtgagtgcctgtgcttcaaaggtgagcccggagagctctgtactcggccccctctggccttgagggaacgggggctgggaggtttctggctggaccctgaggggctgcttgcgggctctgggtctttggacttggcaccgttgccttggcatttgttggcttgggagttgttgctgctgctttttcccagatgcatgggcctgctaatgtcagtgtttgacaaaccaaggagaggacactttcctgagctcttgaagtccatgctttatcgtttttgccttcagatttcagagcgacctagcagccgtgtgtaacaaacacgtcacttgtccctgtggagattggcccaccagcctccactggcaccctgtccactttaacaagcacactcgagtttagggtggggcagttgagagctccacaagcaccataccctttgggatccctgtgatcctgacactcctggcaggtgggacatgagagaggacacagtcttcactttactgatggcaccactcggtgcagtggacaggccagtcttgcctccctcacggccctgaccatgggcaactgcagctggcctctgtttttctggcctgggagaagagttttcaagctggctgcaggaaacaggtgcatgccaggcagaaggcgcgggtccgggggagtcactgcaggcaatccctgcagcctgcccagggcttcagctcaccagcctttccatgatctgcgaagagcagccctcaagaggccactcgttttatttagtttttgcgccataggctcacattctatgactcctagaagtaattttttaaaatgagtaccgtagctc

SEQ ID NO: 96804 - DNA, 136917 bp, Homo sapiens
  misc_feature (1)...(136917): n = A,T,C or G
gccaccgcgtccggcctcttttttcttttcttaagatgaggtcttgctctgctgcccaggctagagtgcagtagcaccatcagggctgactgcagtctcgacctcccaggctcaagtgatcctcccaccacagcctcccgagcagctgggaccacaggtgtgcgccaccatgcccagctaaaaattagtgtactaattagttaaaaattagctactcgggaggctgaggtgggaggattgcttgagacgggaggttgaggctgcagggagccatgattgtgccactgcactccagcctgggcgacagagtgaccccgtttcaaaaatagaaaacaaaaattttggaaaaaaattagatggttgtatctgtactgaacatctgtagacttttttccttatcatttattccttccacaatacagtgtaacaattatgtacatagcatttacattgtattaggtatataagtaatctagagatgatttaaagtatacaggaggatatgtatagtttctatgcaaatactacgcagttttatataagggacttgagcatctgtggattttgttatcctggaatcaatctcccacagatactgagggttgactgtacttttagaatatggcatccaaacatgacttctttggttctgctataatccttaaattgtttgatttcttggtcttgtttcttcaacttaattgcaagttctttagaagctcaaacatcataggaccttgtatataaatagccaagtatctgttttttcccttgcctttctaaatctgtgattacatacatagtataagcttagggaaacatttattggtgtgacaatgcagaagttaactaaactgatttaagtctttgaaagtttttgaaataaagattttatcatttattttctagctgtcaccactgactaaagaagagaaaactgcggcagagcaattcaaatttcacatgccagatttatgaagaaatggacttggaaaggaaattctaacagagaagagcttaattccggagaaatttaggaagatgtcttgttaacccttgatgtctagagattgggggctggtgaagggggtttggcttcaatgactggataatgatatctttcatgagagagattataagaagaagggcagataatatatgaataaagttcagccaaaaggatcaaatgagaataaaacgatttaaatatatgtacacacgcatgcacacacacacttagtcttgtaatttcaggccagaaattctcaacactattttgcatctgttttctttttctaagtcatgataatatagatgttctggtctatcataaaagaatgtttatgtacatttcagtcattcggtatgtggctttgtaaattaaagtataggcaaaacatttgtgttatacatgatatataatttcattttgtaaatgttgattgcacatgtggtcacattattgttgagactgcttttatgtgacctgtagtctcccacagaacctaaagtaataagctggcttttctgtgatagccacgtttgcgtatttctttccctatttcccttgcctgctaatgttgaacagcatgaacttgctttctgatgctgttttagactgtccctgttgtatctcaataatatctttgttttccttcagcctttattactataattgttcattctacatgaaagctaggaaactgaaattagaagagcacttatctgctacttgccagttttgcgtgagtgtgttatatgtatgtgtcaatttccctttaaaataactatttattttaaaataactattggcaataaggaaactgttcaaagtagaggcagatcttgatagaaagatgttaatcacagggttgtttataatagcaatatacatacacatttggctagtactaggtgaataggaaaataaatcatgctgtatgtatacaataagaggtcaagttgccaataaattattactgttaatgttctgggaaatgctgaaactatgctaagtgggggagagggaaagcaggtattgcagttttgtagtgaagattgggctttggagtcatatctgagatgtaagtagcagcttttaaattctagctatgaccctgtgcagatcacttaacttttgagtgtcaggatgtttggaaggacaagacaggaaagtgttttaatacagggttcagtatttagtaagccttcaataagtgatattacatacatgtaataaaaactaagcattgaaaggactaggaaaaatgcatcaaatgttagttctgcaggttatagaattatacttttatgtaattttaaaatttcagttatgaacatgtttgtccattaacaaacttataatagctgaaaaacagggttgtgagaacagcttcagttaaaattgtcctgtctagtttgaatatttcaagaacagaaagcctttttttttttttttttttttttgagacggagtctcactctgttgcccaggctggaatgcagtggtacgctctcagctcactgcaacctccacctcccaggttcaagcagttctctgccccaccctcccgagtagctgggattacaggcgcccgccaccacgcccggctatttttttgtatttttagtagagatggggcttcaccatcttgaccaggctggtctttaactcctgatggtgatccacccacctcggcctcccaaagtgctgggattacaggcatgagctaccgtgcctggcccccttttttttaattacagagaaataagttacaccttagtatcagatattaattttcttcagtgttcaggcaattagtatttagaaagctcttgtcatgagatggctctgggatgtgatgatgattgttgggattgaaaaaatggtagtatcatggagagatcataataaattcttagtattaaaagtggttttgctttcagttagggagaaaaattagattgtactatttttcctctatgatttccttcagttatcttccaaatgttgttttttccccacagcccccttaacattgttctctatgcacttctcaatacattttcatttgtttctcaagcctctttgtggatgactcctaaatataacttcttccactagctctagatccgtatttccaataaaatcccctacctgaatattcaagttaaacatgtccagaatacttactgattttattgttaatagccactattctgttgtctggaattaaaacctgtataactaatttgcatccctttatcttcttagtcaataaaacctacaatcctctttctaaaatggtcatagtatacaacctctacattatcttcacacctccttaatttagatcttttgtttctcatttggattataattgttttctcctatgtgactatagtgtctttatgtcttaagttataaataatacatgtttaagaatttaaaaatcacaggcatggccgggcatggtggctcacgcctgtaatcccagcactttgggaggtcgagtcgggcagatcacaaggtcaaaagatggagaccatcctggccaacatggtgaaaccctgtctctactaaaattacaaaaattagctgggtgtggtggcacgtgcctgtagtcccagctactcgggaggctgaggcaggggaatcgcttgaacccaggaggcggaggttgcagtgagctgagattgcgccactgcactccggcctggcgacagagtgagactctgtctcaaaaaaaaaaaaaacaaaaacccaaaaaaacaaaaaaaaaacaacaacaaaacaggcatataaattatctagaggtaatctgcaaataattgcttcaggcatttctacatgtatacaaactaaaaaaaatttttttcaacaaaagtaggttgatactatgccttgtactgctgctgtacttagattttttttcatttcattattttatttgagagagggtctcgctctgtcacccagggtagaatgcagtgttgctatcatggctcactgcagcctccagggctcaagcaatcctcttgcctcagcctcccaagtagctgggaccacagatgcatgccaccaacccctgctaatttttgtatattttgtaggacttggtttcattatgttgcccaggctggtctccaactcctgggctcaagagatctgccagcctcagcttcccaaagtcctgggatacatgagccactgtgcccggtcttcaattctaatatatttttgttatgtcacacatccacccttctttttaacagctgtaatccattatatggctataccatactttttttttttttttaattttagacaggatctggctgtgttgcccaggctggagtgcagtggtgtgatcttggatcactgcagcctcaaattcctgggctcaagtgatccttccatctcagcctccagagtagctgggaccacaggtgtgcaccaccatgcccagctagatatatagtcatttttatcagttccttagtgatagacatttaagctctataacagcaagttatacaaataatataacaagtaagttgtataacagcaagttatttaaggatatgtatgaagttaggagatttttcttgtggggagggcagcaaggtcagcctttaagggattctgatggagcagaccgttggctctcaaaccccagggcttggcaaacgatgtgagtttagcatcttgccaactaaattatttattttgctcaagttatcctttttgcttgcaaccaacggcctctaatcagctgtacaggtttctaattgttcgctattatgaattggtgcaataagtccttcgacattcttaggttcttcggcaaacatacaagaatcttaactatttatcatgtaagtattgcaatttgtcttatttgtcttctgtactgctccttgagagcaagggccacttctcattactctgaatcccaagtacagcattgcattttttttttttttttttttgagacggagtttcactcttgttgcccaggttggagtgcaatggcgcgatctcggctcaccgcaacctccgcctcctgggttcgagcgattcttctgcctcagcctccccagtagctgggattacaggcatgcgccaccacgcccggctaattttgtatttttagtagagacggggtttctccatgttggtcaggctggtctcgaactcccgacctcaggtgattcgccagcctcggcctcccaaagtgctgggattacaggtgtgagccaccacgccaggcctagcactgcattctataaataattcttttaagtaaaattctcataatattaaccatcaaccatttaaaaatgtacaactgaggccattttcgtaaaaatagctccatgtaggtcaaagaccacaaataattcttactgaaagaatttttcagtctcagattaatctttctaaattatatcttgttcatgacccaagtagttaaaaaaaattgttgctacccaccacctataagcctaaatgcctgatattcaagaacttatttctagattattagtgattctctacatgtgcactctaggtcggttaagtataattagttgtttgcaataaatacaggaaaaattaaattcaaattacgaatttgatatgccctctttgtctcacaaaccttcaattcttgcaatctttacacatctggcaggaaactgtagaaagcagatcccatttataggaaagatgaatatcgctgataccctttcaatagtcccacggcgacaacttaggcggcaagaatgaagtgtgggatgtgggaacgaagacttcacagtgtgtggtcccgtcctctcaccaccgtaatgagaaatgacacctcagtttggagccttctaactcgattagctttggtaggtggaacgcaagtcctacaaaccttagactgttccttccagagagaaccactaaccatgaaccttctgcaccagggtttctcaaagtgcgggccacagaccacctgctgccgaatcacacgatgctgggtgaaaacgcggatggcctgggccccaccctggaatctcagagtccgaatacttaactacgggtgtggctctgaagtctgcgctttccaccagtacgccaggtggctccgtctttggcgcgcaagtttgagagccgtggggccccgccctccgccaaggtgggcgtgggtggcgtagcagagccccaagctcaggccgcctgcgcaggctagggccggaggcacgcaaccctgaggcagcgagtcgccaagtctcgtatgcgccccgcaacgcgggaactaggcgatcgctccacgctcctcccctcctttcccctcccacagcgtcctgcgcgcatgcgcttcgcagcttctctcgccgccgcgcccccagctgctctggttacggttggtgtttgcgaattctctgcggcaccttcttsgckgaactccaccgtcagttccataggcgcgcgcccgcgtcacgtgggccgaggttccggcgcggctgctggccggcggctgagccgggagaaaggagctgcggccaccgttcgccctrcttctgcgcctcggggcgggcgcgccggtaaaaatggcgaaatgggggtaggcggcgctggacctgaagagatggggcgcgcaggtggggcggttgtcagagccccctgacgtgggcgccgggcttttatcggcgatttgatctggcgacctcgggccggcgcctaagaggtcagactgcggagcctgcgggtcgccagcggccccgccgagagccggaggcaatggatgaacagagcgtggaggtgagggggttgtgagggtggtggttagtccccgcccccacccgatgagcggtttttattcggggagtcgtgcccatgtcctccctccagtagggcacccctaccccgcccctgccgctgtggagagggctggcccggtaccaaggatgccgtgcccattctgcagcgctccgggtgtcttgtgctcactgttccgcagtcaggtggtgcgtatcctggagttttcaaggatgtcttggcacaggtactcatccccaccgggtgtttgcaaacagcatccttttccgaccaaaactgcagattcatcagatggatgtaccctgccactcgccaccagtccttgcgagttcttgagctgatctaaatctccttccaaatggatagtcatctttccctctcagtggcacattttgcaggcttctgcccttccttcctagattgaatcagcatatattatctcatgtgtagtttccagaacaaactcttctttttataactgattcttgtaagctgtgagttaaaatagttgggatatgtaggatatgtaagtaaaggctaggaatatattttaaaagattgtttattgaacataattgtgtaatcattatcaaattttgaacctttcagatactgaaataggaaatccttgctttttagtaaggggtaactatgttatggatattccacttgaaactagtcattcagtagtcttattgtccaccccgttgcaggttacagaatctgcatctcccaggttctttctggccctacagagtcatgatgagattaatgagtaattttctccttaattcctcatataaagtattataaaggttttgtaaacttatcttggttttaggagggtttaattctagaatggagtgaaagtaaatgtcagtaatataaaaacaaagtatacaatacaataagtatacgtttaattgtatcctttttcttgttaaaaacttttcagttacttcctaaattgattaaattgaggcttgcaaagataatactgtttcttgtatttacatatttttgttgttgttgttcccaagatcgctttgaactaccgtcaacattttcaattggggcagaatctcaggttcaaataagtagctagtctgttgtaacatcagggcagcaattcagatttctggattctgaattcatttttttctgggtcacagtacactgcctttaggatgtgtctttttaaacttctttttcctctaaattataaaatcagtttataccttttggggaaattgcagaaaaagttaaaagttcatgttgtgtattcagtcatatagtctgccttttttccttttttcttttttttttttttttgagacagaatctcactctgtcacccaggctagagtgcagtggcaccctcttggctcactgcaacctccgcctcctaggttcaagcaattcttctgccttagcctcctgtgtagctgggattacaggtgcacaccaccacgcctggctaatttttgtatttttagtagagacggggtttaaccattttggccaggttggtctcgaactcccgacctcgagtgatccacctgcctcagcctcccaaagtgctaggattacagtaatgaaccatcatgcctgggccttttttccctgctgttatacattatatgcatttttctatatcattagatgaagaagtatttctggtgactgtaatctatgtgtaactgccataatttacttaatatttggacatttgggctgtacctagattcttgccattataattactgctttagtgaaaatttttctgcatgtctgtgtttgcatttcctatattttccttagaatagaatcatcgtgaaaccaaacgggagtacattttccagatgttttgaggtactctgtatcttgaccaaccaaatcctgatatggaatagttaaaattgagagatcagcccaaaataaatgtaaatgtcaagttgttttgagcttgccttttactcttgattcagtagcctaaactggtggaccttacatcttttactgttttcagagcattgctgaggttttccgatgtttcatttgtatggagaaattgcgggatgcacgcctgtgtcctcattgctccaaactgtgttgtttcagctgtattagggtaagttgtatttctttttacatgcagttagtatatatagtatatattgtaaggattaaccatttcccttatctttttattttacattttttgccctaaagtgcttgcttgcactgtgcttggggttgargaatactaagataaatgayaaattgcctgccttgaaggagcttaaatctaattgagggaatggagtttagaatgtttattttgaagaatgtgcggtatcataaggaggcactaaagaagtgctgtggggctcagaagaggactggtttatatgtgtttggtgagtaagatagagaaaaagtgtttaatcttacaattacaagacactctagagatgaatataatctagtggctttaaaacttgagtgttggtgctttgggaggccgaggtaggtggatcacgaggtcaagagatcgagaccatcctggccaacatggtgaaaccctgtctctactaaaaatacaaaaattagctgggcatggtggcatgtacctgtgtcccagctacttgggaggctgaggcaggagaattgtttgaacccgggagggcagaggttgcagtgagccgagagagcgccactgcactccagcctggcgacagagtgagactccgtctcaaaaaaaaaaaaaaaacttgaatgttggcctgagcgcggtggcccaggcctgtaatcccagcactttgggaggccgaggcgggtggatcatggtgtcaggagttcgagaacagcctgaccaacatggtgaaaccccatctctactaaaaatacaaaaattagctgggcatggtggtgtgtgcctgtaatcccagctactcaggaggctgaggcaggagaatcgcttgaacccaggaggcggaggttgcagtgagccgagatcatgccagtgcactccagcctgggtgacagagcgagactctgtctcaaaaaaacaaaaaacaaaataacaaaatgaggaagtccaagattttggttgtgtatgcgagagtccaatagcacatctacagagcatagttgaaaactgccttgttcacattccccttcaattatttattttcctgagaaaatcaaagaggtcacatgctcttcacctcaaactttctgtttcagctgggcgcagtaggtagctcacgcctgtaatcccggcattttgggaggctgaggtgtgtggatcacctgaggtcaggagttcgagaccatcctgaccaatatggtgaaaccctgtctctgctaaaaatacaaaaattagccaggcatggtggcatgctcctgtagtcccagctactcgagaggctgagacaggagaatcacttgaacccgggaggcagaggttgcagtgagcagagatggtgccactgcactccagcctggcgacagagcgagacttcgtctcaaaaaaaaaaaaaatttckgtttccttattcttgcctaaggaagatacatatgcctttgtcaagagtattatccgtaacacttaaataatttttttctagtcacacagctcacaattgatggtactggatttgaacccattaagttcaagaactctatagcctgttctttgtcactgtaccatgcgcagaagacccagttaaatatgatgttagttctcatacttctaaaactaagagattcactctttcttggccttctttcttcagctgtagaattcagatatgatttgctttacagggtggttatggcattaaatgagataacctaaggagtaattcagaaattatgaaatactatatctacttgtttgtaaggtgttattttattgttaaaatagcaactaatacacattaacacttacccatgttttaataaacagtgaaactgatgctagataaattaagtaattggactccgttatagttaattaagtggtagaatctggatctgggcgcatttcttttgatgaaggtcccatgtgcttatggtctctggttgttaccttatgcctcattgattctgtattttttcattgttacatcttcttcctcctgccccttaaatgcatttatttcttaatttcctaagatcttgttgctgtcgttctctactctgaggtttctgggagtattcacctactttgggaaatttgatttactttagcagctttagctatcatctctgtgtgtatggctcctaaatctattccttcagcactgacttttggatgtcttgtccttctagcatcttgaactttgttcaagatcagattattcatattattttctcaaaccgattctaagttcattctttttgttctgttctgctagtcactcaaactggaaactttataccaatgatttttttattttttattttttatttttttttgagatggattcttgctctgttgcccaggctaaagtgcagtggcgtgatcttgggtcactacaacctccgcctcccaggttcaagagattttcctgcctcagcctctcaagttgctgggagtatcagcgcactccatgatgcccggctatttttgtatatatatatgtatatatgtgtgtgtatatatgtatatatataaacatgtatatgtatatatgtgtgtgtgtgtgtgtgtgtgtgtgtatatatatatatatttttttttttttttttttttttttttgtagagatggggtttcactatgttgcccaggctggtctcaaactcctgacctcaactgatcttccctccttggcctcccaaagtgctgggattacaggcatgagccgctgcctctggcctataccaatgatttttaagtgcaattagttattatctccctgtttcacttatatttgtcttacccttctgtttttatcattaccatgctaatagagaagtatgaacattggttacctcatgcttagattatttaattactttctgtctgatctctcaggtttgagtcttttcttatctccagtccattttctgtcctgctactatattaatatttttcactgatatctctttcttttccccagaagcctcagaaatgtattatgtaaaggataaaatccaagaatgttagccttgtgttcagaccatccagatctggttctgacctttctttctagggctgtcttggttcctgaatgcactaatcatttgttcattcattcagcaaatattgattgcttgcctacttgttttcaagccagtcattttttattaggtataactgacatgcagtaaactacacatatttaaagtgtacagtttttttgtttgttttgttctttttttttttttttttgagacggcgttttgctcttgttgcccagcctggagtgcaatgacgcgatctccgctcactgcaacctccatctcctgggttcgagtgattctcctgcctcagcctcccaagtagctgggattataggcatgcatcaccacgcttgactaattttgtatttttagtagaaacagggtttcaccatgttggtcaggttggtctcaaactcctgacctcaggtgatccacccacctcagcctcccaaagtgctaggattacagatgtgagtcactgagcctggccaagtgtacagttttgacatatatgtattcttgtgagacaatcattgcatccaagttagtgaatatatctgtcatccccaaaagtttccttgtgcctcttggtaattcctccctctacttgccttgtccccaggcaaccattgatctgctttctgtcacgatagataagtttgcttcagagataagggggatggaaaaagagaaaaaagataagtttgcatgttttggaattttatacaaatgaaaatcatacaatatgtactcttacggatctggctttttttcactcagcaaaaatactgtatgtatcagtagtattcctttttattgctragtagtattccattgtatgtatttaccacaatttgtttatgcattcacctgttgatgggcatatggcatgtttacagtttttgctattacagtgaaaattgctgcgaacattcgtgtacaagaagctttcttttctcttgggtaaataattagtaatggaacggatagagattatgtggtagatgtgtgtttaacattttgaaaattgccaagctattttytaaaatacttgtatctgggagctaaacaatgagcatacatggacataaagggggaaatgctagacactggggacttcaaaagagggagaggaggagagggatgaaggttaaattaaaaaaaggattgggaggccgaagtggatggatcacctgaattcgggagttcgagaccagcttgaccaacatggagaactctgtctctaccaaaaatacaaaattagccaggcctggtggtacatgtctgtaatcccagctccttgggagcctgaggcaggagaatcacttgaatccagaaggcggaggttgtggtgagccgagatcgcaccattgcactccagcctgggcaacaagagcgaaactctgtctcaaaaagaaaaaaaaggaaatagttttataattttacattctcaccagaagtttatgagagttccaattcctccacattaatgctaacagttggtgtgttcggttttgtgaattttagccattctcagggacgtgtagccattcttacaggtatctccttgttttagttagcgtttctctgttgagtaatgatgttagcatcttttccaggagttatttaccatccatatgttgtctttggtaaggggtctgttcagtgccccccattttgtgctaaaataaatataacaaaattttccattttacccatatttaagggtacagttcggtgtctttaattacattcataatgttatacaaccatatcactatttccaaaatctttcatcaccccaaacagaaagtctgtacccattaaaaaaaaagaaaaaagaaaataaacataagtaaacatagaaaaggtatattaaaaatacagtataaaagataaaaaatggtacacctatgtagggcagctccattctaatcttacgagactactgtagtatatgcggtccatcatttaccgaaacatctttatgtgacacatggctatataccactttttgtttatcctttttcttaagtttttttgttttttgagacagagcctcgctctgtcgccaggctggagtgcaatcgtgcgatctcggctcaccacaccctccacctccgaggttcaagcgagtctgctgcctcagcctcccgagtagctgggactacaggtgtgcgccagtacacccagctaatttttgtatttttagtagagatggggtttcaccatgttggccaggatggtgtcgatctcttgacctggtgatccaccctccttggcctcccaaagtgctgggattacaggcgttgagccaccgcgcctagcctatttatccatttttatctcttgatggacacttgggttgttttcactttttggatattggatattgttaatagttctgttgttaacaattatctgtttgagttcctgctttcatttcttttgaatatatatctagaagtgaaattgctgggtcataaggtattctgttaatttttttttaattgtggtaaaatatacctaatgtaaaattagccttttttnnnnnnnnnnnnnnnnnnnnnnnnnnnnnnnnnnnnnnnnnnnnnnnnnnnnnnnnnnnnnnnnnnnnnnnnnnnnnnnnnnnnnnnnnnnnnnnnnnnnnnnnnnnnnnnnnnnnnnnnnnnnnnnnnnnnncactcttgagtagctgggaccacaagtgtgtgccatcgtgcctggctaatttttttattttttgtagagacagggttttactttgttgccaaagctggcctcaaactcctgggctcaagtgatctgcctgccttggcctcccaagtgctaggattacagatgtgagccacttggcccagccaaatttgcaattttaactgtatttttaagtgtactgtttagcggcattaagtacattcacattgttgtgcagccatcaccactatccacctttagtactttttcatcatcccaaactgaaactctgtacttgataaacaataaattctcattattctcttccccctagcccctgttaaccactattctaccttctgtctttacattgactattctaagtacatcatataaatggaatcataaaatatttttgtttatttctacctctctattctgttctattagtctctatttctgttcttatggtagtaccacactgttttgattactgtagctttgtagtaagttttgaaattaggaagtgtgagtcctccaactttttcaagatagttttgactatttggcatcccttgagattccatgtgaattttaaatgcagttttctaccaatataaaaagtaccattggagttttagtagggattacattgattctgtacatgcctttgagtaatattgctgtcttaacaatattaaatcttatgatccttgaacatgggtgtctttccatttatttaggacttctttaacttctttgagcagtgtattgtagttttgcacgtataagtctttctttttgttttttattgttttgagacaggatctcactgtcacccaggctggagtgcagtgatgcgatcatggctcactgcagcctcaacttcctgggttcaagagaccctcttgtcttggcctcccaatgctgggattataggtgtgagccaccacactcagcctccatgtatgtctttcaaattcttggttttttttttccctaagcattttattccttttgatgctgttgcaaatgtgttattttcttaatttcgtttttagattgttcattgcaagcttatagaaatgccagtgttttttgtgtgtttgtctcctgtaactgttgtgtttattagctttaacaatattttgtggactctttagggatttttacagataagatcatgtcatctgcaaaaagataatttcacttcttttttaattaggatactttttatttctttatcttgcctaagtactctggctggaatttttagtacctgtattatgtcaaatagaaatggtaaaagctggcatccttgtctttttcctgatcttaaggggaatttttcctgatcttaaggggaagagtttttagcctttgaatcgttgactatgatttttatgagtttttatatatggcctttatcaagttgaggaagttcccttctatttctattgagtatttttatcatgaaaggatattggattttgtcagatgccttttctgcatcaattgagatgatcatagtgggggttttccatgaagtggtttattacattgaatgatttttgtagttgaatcatctttctattctaggaataaatcccacttggccacagtgtataattttttaaatagtctgttgaattagttttattgggattttgttgaggatttccctagcacaatttctctagtaaatatcttaaactcccagaccacatatacattaaaatttttcatatagcattatgaatgaggatgcacagtacatgtcaataatgatatctctgattatattctgaagaaatggaaggaatttaataaatacttatatttttarttaatttcaaatgcaggattaggcattggaaatagtatttaatcaatcatgagcccatgatctaagatttttaataattgctgtaattaatgtttcttaaagaccttgttttctgttacaaagttggtttttttttttttgkttttttttttttgagacagagtctcactgtcacccaggctgtagtgcagtggcacgatcttggctcattgcaacctcygcctyctgggttcaagcgattctcctgcctcagcctcccgagtagctgggattacaggcacccaccaccatgcctggctaatttttatatttttagtagaggcggggtttcaccatgttggccaggctggtctcgaactcctgactccaggtgatccacccacctcggcctcccaaagtattgagattacaggcgtgagccactgtgcccggctgatgttttttttttaaactctctttttttggtctcctgttacactaacagtaattttatttaccatctggcttatttagttctgtatgctagataattaatatatacaatctttatgataattactcattcttacaggtttttggaaatgaacaaaaggacagcttttccctttctttggtagacataccataagaagtggacttttgttatagtttagtggtatagatgtttgtaagaaactattttagtctgggcacagtggctcatgcctgtagtcccagcacgttgggaggcccaaagatggaggattgtttgagcccaggacttcaagaccaggctgagcaacatggcaagatcccatctctgcaaaaaaaattaaaaaattagctggatgtggtgggcacacctgtagcctcagctacttcagagggtcaggtgggaggacctcttgagatgaagaggttgaggctgcagtgagctgtgtttgggccactgctctcctgcctgagtgacagagtgagacttgtctcaaaaacaaaaacaaccccagaaagtatttagcatgtttttgtatgtatatatagtttgcctcaaacagtacattaggggatgtaagaaattttgtatgctttcacaaggcatctaagatcctctatgatcggcctcctagtttccttgcaattttgagctgtttgggaataaaagtcctttgttaacaaatttcctatttactgcctgttttctcttatagctaaaagtatttaaaagagtgttttccactccatttccctgcaaccttgccatctacttacccttcaacccattctaacttggctttagctccctccacactactcacatagctcctgcaaagtgtagactcagttttgctaaatccaatgaaccttttgttggccttatctttccttctcggagcattcagcataaattacttcatctgtttttcttgaaacgttatctttggtatctttgccataatagctataccatcttcctagtaacttcatggtctatggattttttttttttaagagaccgagtcttgctctgtcatccaggctagagacagtggcatgatcatggctcactgcagccctgacctctggactcagttgatcctcccacctcagcctcctgaggagtagctgggactacaggcgtgtccaccatgcccggctaatttttaaatttattgtagagatggtatcttgctatgtgacccaggctgatctggagctcctggccttaagcaatcctcccaccttggcctgccaaagtgctgggattaaaggtgtgagccaccacacccgactggtccatgacttttaacactacctctagacttaaacttcccaactttatcttttcagtcctggccttttctctgcctccagtatctaactaccttcatttggacttgtagtatgcatctgaaatatatcgtctctataagaggtttttttttgttttgtttttgtttttgtttttgtttttcaccatgccaaatctgtttcttttccagtcaggaacccagttttttatccaaaaacctagctcaccttaatcttcctttttcctcacatccagtagtaattgaactataaatgttagcagccagtttgttttttttttaagattatcttagatacttagtatatattgctaacagcttctctctaacccttagagcrgttttgcagggtagatatgttgattctcttgttgcatatgaggagacgagctcagtcacttgtccaatgtcatgtggtccataagtgccagagctgggaatcagacacagatctgaatactttctaaagcttgtgattcttccagtttaatgaaggagagaaaataatttttaattttaattttattttatgtttatgattttttaattgaatgagggggaatgctctaaagatatttgtttaatattatgcattaatattgtaccactggttctttggttttggtttgagagaaacattgcttttctcaaagtattaacattgtcatatttattttgtaattaaattagattgtggaggctgagcaatttcatgcctgtatgcctgtaatcccagcactttgggaggcccaggcgggcagatcacttgaggtcagagttggagactagcctggccaacgtgggaaaaccccatctctaataaaaatacgaaaaccatctgggtgtggcgtcgcatgcctgtaatcccagctgcttgagaggctgaggcatgagaattgcttgaacccgggaggcagaggttgcagtgagttgagattgcaccactgcactcaagcctgggggagggagtgagactctgtctcaaaaaataaataaataaattagattgtggaatacaagataaaaataccacaaatattcagagaatgtaaaactcactatagcctgggaaaggcaggaaattttatggacatgatccagtgacatttctatgagacgggatatggagggagggaccatataagcaaatgcacagatatatcgacagtgttatatagtgcagcagtaagcctgttttgactgggagggagggagacatttaaaatacgatctggttactccctatcatagtcccagtctttataagttttatagtctagcagggcaaaggagaccaacaaataagtcgtcgtaataaagtatctgaagggggaagtgtaggttgctgtggtagagcatggcaattgtatctaaaatagtctgcagagtgtcagggaaagctttttggagaaagcaacttatgaactgaaatctaaacaatgagtaggagtaacccagatgaagaaaggttttgaagaatatcttaggcagagagaggaaacatgtaaagacattaccttgctgggttatagggccagttctggagaggagttcatgagaccagttctggagaggagctgtgactttaacagaagagtggcatggtcatgccattgtttcaggggaagaaacctgacccaaatttcgtttttgcctagggaccaaggtaataataatgttcaaggttattaagaatggaggaatccttttccataggctttttattttatttttattttattttttgagacagaatcatgctctgttacacaggctgtagtgccgtggcgctgtctcggctccctgcagcctccacctcctgggttcaagcagttctcctgcctcagcctcctgagtagctgggactacatgctcatgccaccacacctggctcaatttgtatttttagtagagacgggatttcactatgttggccaggctggtctcgaactcctgacctcgtgatccacccgcctcagcctcccaaagtgctgggattacaggcgtgctctgtatgctttttctttcagctttattttctttgctctgaagtaccttgcttgctatcattttaagtcttttactgtcctttaaggtttccttgggaattttatttctaagttaattatttggcatcaagttaaagctcatgttcattttaaaaagtagaaagagataaacaaataacagatattgggagtacgttggtgtaggatcatagttatttacctctgaacctatttatcagacaattaaaacataaagttttttttattataaacctgttgtttcctgaaaactagtcagaaaatcttaacatctcctttatatgtggtataacattgctctcagtttcctaataaattattaatataatttttggtttagtagagacattattctcttctaaaacctttttataattatgaggaaaccaagatatctagaagcttcaattactgaactatgaaaccgttttttttgtttttttttttttgagacagagtcttgctctgttgcccaggctagagtgcagtggcaggatctcggctcactgcaacctctgcctccttggttcaagcaattctcctgcctcagcctcccgagtagctgggattatgggcgcctgccaccatcaccatgcctggctaatttttgtgtttttagtagagacggggtttcaccatgttggccaggctggtctccatcagctgacctcaggtgatctgcccaccttggcctcccaaattgctgggattacaggcgtgagacaccgtgcccagccctgtgaaactgttttaagacttaaaagttgtgctgtattgcttattcatttttttcggtttaatttacatgtctataatgtatgtaactcagaattagcttccttttttttttcgaattagcttttcaaaaaataaatttagtagtaaactagatagaaataaatcatcactgtggtttatttttgagtgcaaaggagacagtgccattattataagacaataataagattatatagacgttccctgtgagaatcagttagtcctgaaatcattgcttttcctgtgtgagagtagccttttaacagctattttgtgttgagttttgtccnnnnnnnnnnnnnnnnnnnnnnnnnnnnnnnnnnnnnnnnnnnnnnnnnnnnnnnnnnnnnnnnnnnnnnnnnnnnnnnnnnnnnnnnnnnnnnnnnnnnnnnnnnnnnnnnnnnnnnnnnnnnnnnnnnnnnnnnnnnnnnnnnnnnnnnnnnnnnnnnnnnnnnnnnnnnnnnnnnnnnnagagttaaacccattagatttgtagtattttatatatataaatattatataatatattatacattattatacattatatatatattatatatataatgtataatatattatacattattatacattatacattatatatatataatatgttatataataatatattatatattatatattatgaatattatatatttatatattatatatattaagaatattatatatattatatataaatataaaatattaagtaatatatatatatagtaatgatgttttctaatcgatatctaatcttttgcccccttagcgctggctgacagagcagagagctcaatgtcctcattgccggtaagtgtttccttacgattatttgtgaattttgaaaatagtaagatcagaatgtgccttgggattcataaaggcagttttcctgcagtctgcccatttctcttcttcgtgaagatagttgagtagaaataagcaatttgactagaaaaagaaatgcagggactaattcatgtgacttaaaattacgtttactatgttgtactctgcctctcagaaaatcattgtataacttcttaatttaccttttataattaagcaacaaatttttaatgtttctggttaaaaaatccagatagttagggcataatttatcttttataattaagcaaaaaattttaatgttttctggttaaaaaaatccagatagcttggccgggcacagtggctcgctcatacctgtaatcccagcactttgggaggccaaggcggctggatcacctgaggtcgggaattcgacaccagcctggccaacatagtgaaaccttgtctctactaaaaatacaaaaattagctgggcgtggtggcgcgcgactatagtcccagctactcaggaggctgaagcatgagaattgcttgaacctaggaggtggaggttggagtgagctgagatcgtactgctgcacttgagccaaggtcacgccactgcactccagcctgggccacagagcgagagtctgtctcaaaaaaataaaaacaaaaaacaaacaaaaaaatccagatggtagagataaatataaaataaaataaaaagccttctgattctgatactccctaccctgtcttctcacttaataatactttcagaagaaattgttgggtttggtatctattcttctagactgttttttgtgcatgtattttgtaatgccctaatccagtatgattgtgcctatatttatatatatatatgcgtatgtgattcccatatgctttttcttaaaatgtaccaatgatataatattgttttgcagtttgctttttcatgtaaaatatggtagatatcttttcttgattgtatgtatacataagtcattttttaaaaaagtgactgataatcagttttatgactataccttgatttatttatgcccatattgagagacatttaggttatctctacttttggtttcaaaaaataatgctggagtgccatctgttaaccatttttctttttgtattcacttttctttttatttttttgagacagagtctcgctctgtcgtccaggccggagtgcaatggcgtgatttcagctcactgcagcctcgacctcctgggctcaggtgatcctcctacctcaacctccttcctaactgggaccactggtgtgtgctaccatgccagctaattttgtttattttttgtagagatgagatgtcactgtgttggccaaactggtctcgacttcctgggctcaagggatcctaccaccttgacctcccgaagtgctaggattgcagcgtgaaccactgtgcctcgtcccacctttcttacattatcttataagaccagcattatcaagtagaactttttataatgatgaaagtgttctatgtctacactgtccagtatggtagccactagttgtgtgtggctgtcgatcacttgaaatgtgtctagtgtggctatatgatgaaattttacttatttatttatttttgagatggagtctcactctttcgccaggctggggtgcagtggcgcaatcttggctcactgcaacctctgactccctggttcaagtgattctcctgcctcatcctcccaagtagctgggattacaggcacgtgccaccacgcccagctaatttttgtatttttagtagagacagcgtttcaccatgttggccaggatggtcttgatctcctgaccttgtgatccacccgctgtggcctcccaaactgctgggattacaggtgtgagccactgcacctggccaaaattttatttttatttaattttaacttaaaagagtcacatgtggctagtggctatcgttttggacagcacagctgtggatttgtgttttgttttgttttgtttttgagacaggctctcactctgttccccaggctggagtgcagaggcatgatcttggctcactgcagcctcaatctccctggctcatgtggtcctcctacctcagcttcatgggtagctgggactgtaggcacatgccattgcacttggctaattttttatagagacagggtttcatcatgttgcccaggctggtctcgaacacctgggctcaagcaatctacctgcctcagcctcccaaagtgctgggattacaggcgcgagccactacgccaacagtacagctttagactcagaagttgagaattcagtccatattctgaatcatatgtttttgtttagctttttgtttcttttcataaatgacgtgttaatgtggtgaaaataagtcacagataatatttttcattgtctttttttttattttttatttttttagttttaatagtattatggggccaggtagtggctcatacctgtaatcctagtactttgggaggatcactggaggccaggagttcaagaccagcctgggaaatatagcaagattcccgtctctacaaaaaattttaaaattagctgggtttgatggtgtgctgctgtagtcccagccactcaggaggctgaggcaggaggatcgcttgagcctaggaggtcaaggctacagtgaaccatgatcatgcatgccgctgcattccaccctgggtcatagagtgagactcatctcttaaaaaaaaaaaatagtgttatggtatgagtattattgtgctctctattttgagaaacgtatttattttataaaataatctcaaattcctgaattagtgtatgtgtatggattttctccccagtgctccactccagctacgagaactagtaaattgtcgttgggcagaagaagtaacacaacagcttgatactcttcaactctgcagtctcaccaaacatgaagaaaatgaaaaggacaagtatgtcctcaatttctttgttcaatattgaatggattttgcctttgtattgtttaatgacactatattggtagttgccttttagttatttatgaataagtagtgttatatttcttgtttttaattctttcagtcatgcgctgttactgttaagtaacatattcttattgtgtttatttaacaacagttatttcatgccatgtatacacagatacctctcgccctcccctccccccacacagaaagtactttgctagatgataggcatacaaaggtaaatgagacatgatttctgttaactgtttaatggggacacagtgataatacagtgttaagtcatttaagggacaagaatgaataaatggtcttatgttccatgattgaagaattttgaacatatctggagagttgttatggggagcaggtaaagaaaggaaagagtgatgtggcagtgattggtttttatagatgaagaagctacaacatggttaattgtaaggcttcactgtccagcaataataaaataacttgaattaggtgagattccaggacccttgaatgtttagaaataaagccttgtcactttctgtagagtcacaacatggtaaagcaagaggttgaaacctcacaggtcattagaaaaaaatttatctgtttcttcattatactgaggaaatagaaccatagaaataagagaacagggtgtggtggtgtgcatctgtagtcccagatacttgggaggctcaggcaggaggatctcttgagcccagaggatggcttaggtaacatagcaagaacccatctcttaaaaaaagaaaaaaaaaaaaaaaaagaaagaggcttaattatggtagtataacacattaatgcataatcagaattaaaacctactattcgggcgggtgtggtggctcatgcctataatctcagcactttgggaagccgaggtgggtggattacctgaggtcaggagttcaagaccagcctggccaacatggagaaccctgtctctactaaaaatacaaaaattagctgggcgtcgtggtggacgcctataatcccagctacttggggggctgaggcaggagaatcgcttgagcccaggaggcgtaagttgcagtgagccgagatcgtgccattgcattccagcctgggtaacgagcgagactccatctcccaaaaaaacaaaaacaaaaccaaaaacctgctattcaagtttaactggacttttaaggaattctgtcacttgtagcattgtagaggtctcaccaaaaataattatttaatttcttttctatacaatggcacatttctttggtgaacacttaggtgtttttcctctgaagtggtgggtattactgtttggaaagaccttttacctctttttgggcctcttctattagagcctctcaaaaggaatagactgctacaatttgctaacctgctagtctttctttcttgctgtttgatgcctactggcctccccttgctgcaagtgaatacaggctgttaattaagaggagttttggcaaattttctatattgtaaaagctatattataaatttggtcttttggaagtcttgctaaatgagcttccaaacagtacctgatgtattctaactcttattcatttcccattttatattctgattacttatgaattagaaatataaaatataaacttatgtaagtattttctctaagctcagtgtccttcatcaatgaaatgctttttgaaaaatgcaagagtgggccaggcacagtggctcatgcttgtaatcccagcactttgggaggccggggtgggtggatcacctaaggtcaggagttcgagaccagcctggccaacatggtgaaaccctgtctgtattaaaaatacaaaaattagctgggcgtggtggcatgtgcctgtaatcccagctacttgggaggctgaggcagcaagaattgcttgaacctagaaggtggaggttgtagtgggccaagatcgcgccacttcattccagcctggatgacagagctagactccgtctcaaaaaaaaaaaaaaaaattgcaagagtatgtctactttataaacaagagaatacttaaaacattttaattatggtaaaatatacataaaatttaccatcttaatcattttttaatgtacagttcagttatgttaagcatgttcacatgttcagccaatctccagaactttttaaacttgcaaatctgaaactgtacccattaaacaactccccattccttcttcgcaccagcccctggcagccaccattgtactttctgtttctatctgtttgagtactctagatactgcatataagtggaaccatacagtacctctctttttgtaactggtttattttacttagcataatgtcctcaaggttcatccatgtgtcagaatttcccacctttttaagggttaataatattatattgtatgtatatgtcacattttttttgtccattcatctctcagtgaaaattggtgtcgcttccaccttttggctgtagtgaataatgctgctatgactatggatgttcatgtctttgagactctgctttcagttcttttggttatgtaatcagaagtagaattgctagatcatgtggtaattctatttttaatttaagtttttgaggaatctccatactgttttccatagtgactgtaccattttacagtcccaccagtagtgcacaagggttccagtttctccacatcctggccaacacttgctcttttttgtttttttgatagcaaccatcctaatatggtatgaggttaggattcacatttctctagtgattagtagtaatgagcatcttttcatatgcttactggagatcttttgctcatttttaaattagagtttttaaagtttatttgttgagttacaggtgttatttatatattctggatgttaaaccttcattcttttcttttttttttgaggcagagtcttgctctgttgcacaggctggagtgcagtggtgtgattatcagctcactgcaacctctgcctcccgggttcaagcgattctcatgcctcagccttctgagtagctggggttgtaggagtgcaccaccacgcccagctaattttttgtatttctagtagagaaggagtttcactatattggccaggccagtctcaaactcctggcttcaagtgatccacccgccttggcctcctaaagtgctgggattgcgggcatgagccaccgctgcacccggcctgtagtttatttgtgtatatggtataaagtgagggtctgtattagtctgctaggtctttcataacaatactgctaactgagtagcttaaacaatagaaatttattttctcacagttctgataggtgttaagtccaagattaaatgctagcagtgttggtttctagtgaggcctccctttctccttgacttacagatggccaccacctagctctgtcctcacatgatctttgctatgtgcacgtgcatgcctggtgtctcctcctctttatagaggacaccagtcctgttggatttgggtcctgcccttgtgatccttacttaaccttaattacctccttaaaggctctgtctgcaaatacattcacactgggggttaaggctttaacctatgaatttgaggggggacatagttaatccataacagagtctaactttattgtttttcatgtgaatatccagtttaaaagaacatttaaaattgagttgttcattttccatgagggtctagtattaaatcgtgcagttaatcatgtgtcttgattattgttatcgttgaccacatgtaggaaaagtacttgtgcatgctcatgtaggtatagatgcataatcaatatgattattaagcacatgcccaaaatgtagtagtacaatagaatatatcatctgtagtgctgtgtggaaatgatgcaatatgtgttatgtttttaagaagcaaatctgtatttcgcatgtgattataaagtccagatcaatgaaaacagtactttacaaaaaattgtccgcataaacttctttagcttccttttcagaagccatggagtacattttatactgtgtttcttgagatataatcatttaaaactgacctgtttgcccaagcttaagaatttgtggaggtgattatgttccaatttaatttataacttcattttcttttcataatgtatagatgtgaaaatcaccatgaaaaacttagtgtattttgctggacttgtaagaagtgtatctgccatcagtgtgcactttggggaggaatggtgagcagaacaaattcagtattttttttaagttagaggctagaaggcactgaaatacttattcagatagaaaatagtgtcattatgctctcgtagaatgaaagttaaaatgcatctgctttctatacgctttattaaaggtattgtacttttattccagaagaatcttgtttgtgtggtttgatggaccccttatgtaaatattttaatctgtaacacctataaaacatatcctctattcatttgcagatcttttcgttgtaggatctaggtcacttttttcattaaaggtcagttgatcagatgtactggccaacatttccaattttagttcctttaaaatggagcacgaacttagacacttgtgaaacaacatgagtacgcctatctagatcttataattattttttattttttagattattttttccaattgaattcaagagcagtttttaaagacagtctaccattattgagcctgaagcattgaagttagctttcttagaagcagcttttttattttaaagtcgtgttctgttgtttactgaatactttttttttttttttgagaatttcgctcttgttgcccaggctggagtgcaatggtgggatctcggctcactgcaacctccgcctcccgggttcaagtgattctcctgcctcagcctccctagtagctaggattacaggcatgtgccaccaccacgcctggctaattttgtatttttagtagagacggggtttctccatgttggtcaggctggtcttgaactgctgacctcaggtgatccacctgacttggcctcccaaagtgctgggattacaggggtaagccaccgcgcccagcctctgaatacttaattaaatgatctccttacaataataagtacaattggcataaataggttgagaataaacacaatagattcttaggaaaaataagttatgggtgaaatggaagtgggtaggtatctagagttgctataagaattgatcattctgtgggcatcagtcagtatgttttacggagagagtggcaggccagattggttgagtagagctcaattcagagctttctgctagaatttgaatattaatgtgctaactagaaaaaattaagttctcacatttaatactttaaatacataggttttgtaagagacagtagaaatgtttttttctatacttaaagtgaacatgtaaaaatctacatcttttttggagacaataatgggatactttggctaaataagacaattctagtaagaacttataggaggtttcttatattaaaatttaataattctggttacaaatcaaaattatttttaggtagttagctataaaaattgttctttgagctgaatgcaactggatttgtgaggctaacttgtatcagtcttctgtctctgtagtaactctgtgggatggaaaatgggttcattgcttttgttaattttgtatcctgggctttttcttcaagtgtctttctaattcattcagctgtggtaaagactagggatttggtgatgaacatatcaaacaattacatactcaattggcttgataaattataggaataaatacagagagctgatgaggatgcataactatagcagctgatcctgtaaatctgagctaagtgcaaaggatgagtaggattaagacaaaccaagatgggagagggaagatggagaattattattattatttgttttgttttgtttttttgagacagagtctcactctgtcacccaggctggagtgcagtggggtgatctcagctcactccaacctccgcctcccggcttcaagtggttctccagcctcagcctcctgagtagctgggattacaggcgcatgccaccacgcccagctaatttttgtgttttttagtagagatggggtttcaccatgttggccaggctggtctcgaactcctgacctcaggtgatccacccgcctcagcctcccacagtgctaggattacaggcgtgagccaccatgcccagcattattattattattattattattattttttttttatttttttttttttttggtttttattattaaaaaattattattttttgggggggacagagtctctgtcacccaggctggagtacagtggcccgatcacagctcactgtaagctctgcctcccgggttcaagcaattctcatgtctcagcctcttgagtagctgggattacaggtgtgcgccaacatgcgtggctacattttgtattttagtagagacgtgtttttgccgtgttggccaggccagtcatgaattcctcagttcaagtgatctgccctcctcagcgtcccaaagtactgggattagaggcatgagccaccacccctggctaataattattttttaataagagggagtaatttttgtaaagtcctggtggaaagaagtttgaggacatggaagaagactagtttgccttagagaagagtgactgactgataaggttgtggcagatgatttgggctgtggttaaagatyttggttctttttaataagttaatttctagttaaatgaatattttgctaaagccctttatttataatcttgaaagarttcctacttggaccaagtgattttaagcgggcactggcctgcttcaacaaaattaaattagctaataaggtaaagttcatttgagagatttaccagtttattagtgtccatagagtgttacaaaggaatgtaaatgcagatgagatatgtgaaagtgttctaaagctactctaatttaaatagcatggcggacatacctttaaacctttggcagaaatttatgagcaacacgtcactaaagtgaatgaagaggtagccaaacttcgtcggcgtctcatggaactgatcagcttagttcaagaagtggtaagactactactaaaatataattattttgtttttaatctgtaatatataataatatatttatataatrtaagttaatcagatgttgaaatcaaggttttcaagatttgcaratttgataggctgtacctatagtcaaattccataaatttcagagtatctgagaaatttgcatacaaagcccctggcttgtaaggaagcagttggagtcagagaattaccacttatgcagaattagaaaatcagtgaatttaaaaagtctgtttgttacagagtcaataattaacttattttttcttttttttgagatggagtttcactcttgtcgcccaggctggagtgtaatggcgcgatctcagctcactacaacctccacctcccgggctcaagtgattcttttgcctcaccctcccaagtagctgggattacaggtgcccaccaccacgcccagctaatttttgtatttttagtagagacagggtttcaccatattggccaggctggtttcaaactcctgacgtcgtgatccacctgccttggcctcccaaagtgctaagattacaggtgtaagccactgtgcctggccccaataatttacttctaaacagaatcagtattgacttttacagtcattcattaagttatacactctttggatccccagcttttgggtgagtttcttttactaagcaatgaactatttgtgatgtcctgatttagaactccacagacttgaaagtgcaatatttaacattactgtttagatattgtttaggtcaaacagctttagtgagctatttataatgttatttctgtgaaaaaatgtgataagcccccaagaatgaaatactaagcatgtttttagaatacattttgtttcaagttgttagaatgacagtcataaatgaggtttatggaccatttcctaacttaaaatgaagtttgtggaccatatcctaaattaaaagcagatgtcttctttgttttacctctttaggaatcaagaaccaagtgatcatttataacattctttatgcagaaaatttgtgtttttgattgcatgtctgccattttgaaatataagcaagttgggtcatttccatttgaccttcctctaactacctttttcatattatctattcttggcaatattataatgtggtgcttctgtttttaaaatttacccaattaaaattattcttacctctttatcttctaggaaaggaatgtagaagctgtaagaaatgcaaaagatgagcgtgttcgggaaattaggaatgcagtggagatgatgattgcacggttagacacacagctgaagaataagcttataacactgatgggtaagtgtttatgtatgctgctggggtacctggtgctttcagcttctttgagattcagtctttgaagaataagggtgatcatcctaggaaggaatcttgagattttaggcaactccatgttgttacaatttagacagataaatgttagacttgtatttagaaatgataggagagaaaaattttcatagccatttggatgaaaatccaagttttcatagccatttggatgaaaatcctaatggccagtgggcatcattgttaggtagctttttctccaaatctaacagaattccttctactaatgttccatatcctttccatccattttcattggggatgaagaaactgacatttgtaaacatcggcgtcatcccctgccagcattttcttagagatttaaagtctcagcttttgatttctagtagggttcattttacatatgcttaattatatttattgctgacctttttgcttttcgaagattccttcattcttctttgattgtggagcctggtattgaacttaaattttaagtaagaatttaatccaatgctatggtttgttttgtttgatttgttttggtgatcttagtccttccagtgttttgctgactaaaaaccagctttgcattttttatcatagtccaaagtgaaatatatatactttaaataaggtgtgaacaaagaattttttttttttttttggctatcttgattctccaagattttagccatgtctttgtgtcatccaaaataatgattttatccattttatttttaactttttaaaaatgagatgcaaatatctttgagtttgtatatttgtatatcatttcatgaattgcttttctattataatcctatactatttaatatctgatttttagtttttttcccacagaccaagtagcaaatagtcttaaacaatcattcttctagtagttagattggaaagcacagttcatccacccagtggagcaattagacaaaacctgtaggtattgattgtactggtcacaatgccacttatatatttcatgtaaatgaaaatcgtaattgttcttagatcctcagttgcagtcatacatataggtgatcttagtttttcagaactctagataatatttgagatctctttaagttcattaagccatgtagagtactggatgttgatacgtattaggactttaaaattgaggggatcttgactgttgatgtgatcttcagtcgtagccaaataaacatttgcatgtggtcttgtttttcttgagtgagtttgttcattgcttcatttatttaattgaatcaactaaaagtcaaataataccacagtacagatctcttaagtttattaattttactacctgtataactgtgaaataacttccctttctaataactgaacttgccctgcttttgtggctttcaaattatttttcattatgaaaaattataatttgtgatttccaaggtagcttttatgattaaataggattctttctaaggataagaggtggggaaaaggatattttcagggttagtttatctttagaatagtcttataagcctcagatttttaattcataccataatatctgccactaatttattattattattattattatttgagatggagtctcgctctgtcattcaggctggagtgcagtggcactatctcggctcattgcaccctccgcctcctgggttcaagcaattctcctgcctcagcctcctgagtagctgggactacaggcacgtgccaccacccccagctaattttttgtatttttagtagagatggggtttcgccatgttggccaggctagtcttgagctcctgacctcaggtgatccacccacctccgcctcccgaagtgctgggataacaggcgtgagccaccacacctgacctctgccactaattttttttttttttttttttttgagatggagtctcgttctgttgcccaggctggagtgcagtggcgtgatcttggctcactgcaacctctgcttcccaggttcaagagattcttctatctcagcctcccaagtagctgggactacaggcacgtgccaccacgccctgctaatttttgtatttttagtagagacagggttttaccatattggccagnnnnnnnnnnnnnnnnnnnnnnnnnnnnnnnnnnnnnnnnnnnnnnnntgtattgtaatgttgtccataggctaatgttttaggattgtgggatgtggttatagtagaaattatgtctgataatattagattctagctaatactttattttaactctttttgcaacctagaaattctgagttttgtttcaaaaataaaagttctaggctgaggcaggtggatctcttaagcccagcctgggcaatgtggtgaaaccccatctctaccaaaaaaaaaaaaaaaagaaaaattagccaggtgtgatagtgtgttcctgtagtcccagctactcaggaggctgaggtgggaggatcgcttgagcctgagaggtggaggttgcagtgagccgagatcacgccactatactccagcctgggcaacagaatgagaccctgtctcaaaaaaataaataaaaataaataaaggccgggcgccttggctcatgcctgtaatcccagcactttgggaggccgaggcgggtggatcatctgaggttgggagtttgagaccagcctgaccaacatggagaaaccccatctctactaaaaatacaaaattaaccgggcatggtggcacatgcctgtaatctcagctactcaggagactgaggcaggagaatcacttgaacccaagaggcaaaggttgyggtgagctgagttcgtgccattgcattctagcctgggcaacaagagtgaaaccccatctcaaaaaataaataaataaaataaataaaagttctacctattaaatgtttttccttatcaaataacactacagattgataaaacttttgctgtcctcatggatgtacttccagtttttcaaattttgggtttacaaagaaaatggcctgatttggtaagcatacctatcttctttttgtttcaaaacatataaagcactttcttccttttctataaggataatttctgtaattataatttttttgtttgtaatttgagacagggtctcactctgttgcccaggaaggactgcagtggtgcaatcaaggctcattgcatgactgcatgcagccttgaccgcttgggctgaagtgatcctcatgcctcagcctcttgagtaaattgggctgcaggcatgcaccaccactcctggctaattttttacttttttgtagagactgggtctcaccatgttgcctaggctggtctcaaatacctaggctcaagttatcctcttgctttggcctcccaaagtgctgggattacaggcatgagccatggccccggccagtaataatttgtttatccttttctgtctccaactttttgagactgttcacctctgtgggcatttttttttttaaacaggtccttgtatattcacaggacagaccttttgctgacatttaacctaaaaatctggcccactttgtattctcttttaagccacagttaaatttggtgaaaaatgatttcagaatagctgattgaatgaaattcatgttattgcttcttcccaagggaatatgaaaatctagaaaagtaaattttttgcttaaagtatattgtcattgcacatttcgtttcttagatgaatttgatctcagtggtatcttgtctaaaactaattagaattggttctgaagttccattttcaaggctactataatattcagcctcttaaagttgaatgagaatttttagggtagctgtaatgaagaatttttgcttacttgaagtgtatttcttgttattaaatatgttcattggaagttaatttcattcttaaaccaataatgaacccaagtgttgatgattcactatttttcatcaggtcagaagacatctctaacccaagaaacagagcttttggaatccttacttcaggaggtggagcaccaggtgatgaaatattaaatgtaatgaaatagtctttatccttttttctctgtatactgtagttgtttttttttttttttttttttgagayggagtctctctctgtcgcccaggctggagtgcagtggcgcgatctcggctcactgtaaactccgcctcctgggttcacaccattctcctgcctcagcctcctgagtagctgggactacaggcgcccaccactacgcccggctaatttttttgtattttcagtagagacggggtttcaccatgttagctgggatggtctcgatctcctgacctggtgatctgcccgcctcagcctcccaagctgctgggattacaggcgtgagccaccgtgcccggccttctctgtatattataaacgttttttttttgacagagattatctgtatgagatcaaaagatctgttgatcttttgtgttataatggagatttttatgaaattaggaatcagctgattcttgccaagttttttcttcatgtttgggaactgcattagaactacattctgctttgtaagaacagaactatttccatagaaatctgaatgtataagaggttaaaatctccccacactgtgacttaagtggtggctttgagatattattgccagttactttacatgtagcgattattactctaaaatttagcatttttatttattgaggaaatattaagtcctaaatagatagcaggcatcattgtagatattggtgatacagcagtgaacaaaatggtaaaattctgtcctcatagagtttatattttagattagggtgggtgaatatgaagcatatagtaaatgagtaaataaaatatgtagtgttgcataaatatctgatacattcacttgtctggaatttgctttttgtaatttctctctatgccttatacacagctgtctcctgagatttttatcttaatcattctgggaattcccttcacatctttcttgtattgaatctcatgtttcctgattcctatggtttccactttcttggtttacttgttttgttttaacatcacacttccctcagtagctttccaggaagggtagtcagaacacatttttcttgactgcattgtctgaaaatatttttattttatctttgtacttgattgacaatttggcttgtaggattcagcacataaatatttactaaatactcttatttttcttcattatccccattcttttttccttttctttttacatacacacatatatatctgtagggcattggccccaggaccttaatggataccaaaatccgcagatactcaagtcccttatataaaatggcatagtattctcatataacctatacacatctcccatatacaaacatgtgtcaaattatgaccttttggtcaatgacagactgcatatgtgacagtggtcccacragattaaaatggagctgaaatacttctgttgcctagtagtgatgtctaatgacatcatagccattgtaatgtagtagcacaaagcattaatcatgtgtttattgtgatgctagtgtaaacacacatactgcactgctagttgtataaaaatataacacattattatgtatggtatataatacttgataagcataataaacaactgtgttactggtttatgtatttactataccataccattcattattctagaatatattctagagtttactcctactttttaaaaaaacgttgactatattccagaagaaggcattgttagcattgtagatccatatgtgctagtacccgtgaagacctttcaatgggacaagatgtggaggtggaaggtggtgatattgatgatcctgaccatgtgtaggcctaggccattgtcttagtttttaacaaaacagtattgagatggggtgtacacctgtagtcccagctactcaggaagctgaggtggaaggattgcctcagcccaggaattcaaggcttcagtgtgctatgattgtacctgtgaatagccacggcgctcgcctgggaagtatagcaagacccatctgtttaaaaaagtaaagaaataggccgggcgtggtggctcatgcctgtgatctcagtactttcagaggccaaggtgggcagatcacttgagtgagttcaagaccagcctgggcaacatggtgaaaccccgtctctactaaaaatacaaaacttagctgggcgaggtggcacatgcttggagtcccagccactcgggaggctaaggcatgaaaattgcttgaacccgggaggcagaggctgcggtgagccgagatcgtgccactgcactccagcctgggcgacagagcgagaccctgtctcaaaaaaaaaaaaagtaaataatattaactgaaaaatgtaggctacatggtgatatagcctgatagtgtttatgtaaagtttgaaaacattcagaacattgtttatggatgtatgtacacacatagtaattgtggaaacacatgtatagtgataataaacttctgttgaagggagcaagttgcttttggaagaaatggtgtcaaggaaggatatacacagtaagcattcaattaatataagttaaatttttttgtattatgtgtgtatgtatgtacatatacacagtgatttttagcataccttaaaaatcttaagcaaacagttcaaataactttagatcattttatataaattgttcaaaaaaccgtaatgccttgggcaatgcctgacacataataatatgaatgacaaaatatgcagctgtttgttgttttctgctgttaccacttaccattatgtcattggttgatgcagtagctcaaacatgatatcattattcttggtaacccaagactataaactttgatatatatcatatgatatatgatactttttttttttttttgagacagagtcttgccttgtcgcccacgctggagtgcagtggcgtgatcttggctcactgtaacctccgcctcctgggttcaagcaattcttgtgcctcagcctcctgagtagctgggactacaggcacgtgccaccacgcccagctaattgttatatttttagtagagatggggtttcaccatgttggccaggccttgaactagccaggtcatgaggtcttgaactcctcaccctaagtgatccacccgcctcagcctcccaaagtcctgggattacaggtgtgagctattgtgcccagccatatgatatgttatttttggtgagccttaagcaactgttatttaaaagatataaactcacctgtaggtgggtttatgaatatcattcatatggcatttgatagtatattagcttgctaggcctgtcataacaaaataccaatgactgtgagacttaaaccatagaaatttgtttccccagattcctaggggctggaagccaaaattcaggtgtgggcagttccttcctccgagggcccccccttggcctgaaataacggcctcttactgggccccccctgacttttgggggggttggccccctaagctcttcccttaaaagggcccccccctgtataattaaggccccccccggggccccttttaaannnnnnnnnnnnnnnnnnnnatagaaatttgttttctcagtattctaggggctggaagtctaagattcaggtgttggcaggtttcgtttcttctgagtctctctccttggcctgtagatgactgccttcttactgtgtcctcacatggacttttctgtgtggttgtgcagccctagagtctcttcctcttaataaggacaccagtcatgttagattaaggccctaccccagtggcctcattttaacataatcacctctttaaagattatctccagatagactgaggtactggaggttgagcctgcagtatataaattatggaggaaaggggcacaaaattcagcacataacagatagtttacaaagctttttcactatagcttcataatccttataacaaacttcacgaagtaagcagtggtggatattactattttagttttgtatgtaaacagactcagagttatgtaattagtcagtggcagaattgggagttacttcaaactggtttttttgaagaaaaaattagtagtcttatcttttatctaccatggttatgttactgaagttagatttgttactttttcccaaaatagtgtttcccaaattagtatcagatagtgcgtgtgtgtgtgtgtacacacgggtgtatgtgtgtacgttttgtattctgttacctagaatacaatctgagaaattgcttttaaaagctttcaccttggtcgggcacggtggctcacgcatgtaatcccagcacttggggaggccgaggcaggtggatcatgaggtcaggagttcaagaccagtgtgaccaacatggagaaaccctgtctctactaaaaaatacaaaaattacctgggtatggtggcacccacctgtaatcccagctattcaggaggctgaggcaggagaatcgcttgaacccaggaggcggaggttgcagtgagccgagatcgcgccattgcactccagcctgggcaacagagcaagactctgtctcaaaaaaaaaaaaaaaaaaaagctttcaacttaccggtttgttcattaatacattcataagaacttcactgtaccagcctgaaagtatatttgtacttgcttaaaacctcatttatcctaaaatgtaaggagagaaaaatgcattagtattaagtatacttattcattgactttactgttagaatattatagaaataaacctagattctttgtacattcttaattctcaagctcactttgagttatttttatcatttttttcagtttataatcagaataatttgtaatttcttaagaattttgaggtggcagtgaatagtaattttgtttgttcagataatttttttcctcacacagttgcggtcttgtagtaagagtgagttgatatctaagagctcagagatccttatgatgtttcagcaagttcatcggaagcccatggcatcttttgttaccactcctgttccaccagactttaccaggtatgacacagtttttaatttcattttcatttgaaatttatgtggaaatgcatatacttgtttcaaaagaatgtttttttttttaatgccatctctctctctcttttcttttatagatagggtctcacttgttgcccaggctggtctcaaactcctggactcaagtgattttcccaccttgaccccccaaattactagggatcatagacatgagccaccacacttggccactccatagctttttaaggtcttgtttataatggagtggtctggcaagctctgttgtatacatacaaatctagttctcctgaaaagtctcacagactgatacttttgactcttaagagaaaatgacaatgaactagaaatcatttttttttccaagagctccatcttccgtagtatagaaaaaaataattgattacattagcttcatcagtgtaccttttgaattgaactatatctcctaacacaaaactcagaaactgatgaaatgccaaaagaatttgaaggtgacgccatgttatctccggatactaaaagatagagagaggaaataattatggcaaaaagtatcctagttttcatcttgggctaaaccttagaatttttctgaacagcatattccttcaagcatgtttgtaatcattctgtggtgttagactggtggtttctgactagatgttggaatcacttgggatttggctgaaaattaatcagtgctgggtcataccataccccaggccatttgaaagaaaatctttgggtgtgtattagtctacttgggctgctataacaaaataccatatactgggtgcctttaaacaacagaaatgtattttctcacagttcgagaaacaagaattccaagatcagggtgtcagaaaattcacttttttgcctcagcttgcagacagctgccttctttctgtgtcttcacctgaccttttctctgttcttgcttggagagagatcagtctctggtgtctctttctctttttatgaggacacaagccttattgtattagacccaccattatcaactcatttagccttaattatcttcctaaaggccctggctatagatacagtcacattgggggttagggctttaacatgggaatttggggagacacaattcagcctgtgacatagggttcagatggacattttcagtttnnnnnnnnnnnnnnnnnnnnttcagtttgttcttttaaaatctccttagcttattctatgatgaggggtgaagccactgcttcagataaacattttggtgtgacagactttatcttagagagatgacttatggaatactatcaagttttcctaccatggtgagggctgtggcacatttagaaaacagtctttgttataaaaatgtttatatgttgagctgccttttctttttcctctaatatgtgatgcctctgatgaccacagagcattcattgtactattttattttttatttttttaatttattattttatttatttattattatactccatctcactctgtcacccaggctggaatgcagtggcgtgatctcggctcactgcaacctccacctcccggattcaagcaattctcacacctcagcctcctgggtagctgggaatataggcatgcaccaccacgcccagctaagttttgtatttttagtagagacggggtttctccatgttggccaggctggtctcaaactcctcacctcaagtgatttgcctgcctcgacctcccaaagtgctgggattataggtgtgagccaccatgcctggccgcattcattgtactagagtatatcatataagccagggcttttcaatcttggcattgttgacattttaagcagaataattatttgtggggtggggtgagctttcctgtgttttataagatgtttagcagtatcccagtagcactccccaccccaccaccttgcagttgtgacaaaaatatttccagacattgccaaatgtccttggggacaaaatcacccctgactgagaatcactgttataagcccttcttactcgttatagatgccacagtcctataaacagaagggcaaagtttttctgacagctagaactccagtggttctcattgaccagtagaagtcttcctttctttttgattaacaacctcataaaatattcatatctttttaaagcactgacttttttgtttaaatctcatttctgaatgacagcactgaatattattaaaaggactatgtatttgctgtcattaagtagatttggttgaagaatgttcaccaaaatccctaggctgcttcattgatactgtggtcagctatttcagttttgaagatttgttttctgaaccatttcatcccctgtggaatgaaacagattttgacctaagggtcatatataaaaattagtatttttcaattcaaagtgtggtgcatggatgacctaagtcagggctatgtgtggcatttgtctgaaatgcaaattcccaggccaatgtccccagaatctttagaggtggtattcagaaatgcgtcttgagcactctaagtaataatactgcactaaagtttgggaaccattgatgtatgtaaattcccattcttataccactttcagcagctcatcaggcaggcaacaatgctcgctagtctgttaattaatcactttcagggccttctctctttctccagtaatgctcactaccttattggaaactttggcttttaatttaattcttattagaaacctgttttattagttgcaacatacaggaaaagagggccaaataagaaagatcagcattcgtgacattaagttacacatgaaactttagatatgcaaagcagtggtgtttctattgcctttagttctatcagttagtaattggtgatggagccacaatggagaagaaaaggtcactaaatcagtgaagtgttatttattaaagactatgtgcccagtattgttgtaggtgctgcatgggagaagaggaactaaatattttactgtgggctgggcgcggtggctcatgcctgtaaccccagcaccttgggaggccgaggcgggcggatcacctgaagtcaggagttccagagcagtctgaccaacatggagaaaccccatctctactaaaaatacaaaattagccgggtgtggtggtgcatgcctataatcccagctactccggaggctgaggcagaaaagaaaaaataaaagatacaatagtatagctgtcagttcatagagagttttatgtttcagggagaaatagtcaagttgataaggagaaccagtttttatatagctcagcagtttatttccttaagaaacaaatggatacttgtggttctcccttttttccctttgttgatgaagttatgatgaggttactggtctgaagatttgcagatcagtgacttccagattcctgggctagagatggtttgagggtagtttcccatattctgtgaagacaaagattcactgacaccatcatgagatgaatccagtcatcataaccagagcagtctacacttctaagagaggaggagaaaattttaaaactatgaaaagataaagcagtgcctcatctgcagacacagaatgataacatcagtatgattgaagataatctctaaatgaatgagcataatatggagatgtggtggtggaattagatggcctagcagtagcaatagctttgtatatacatataaagaatgcaaaatcagtgagccgagatcgcgccactgcactccagcctgtgtgacagagcgagactgcgtctcaaaaaaataaataaataaataaataaataaaatttaaatttaaaaagcaaaataatttctttcgcaaaagaaatttttgagcaaatatttccaactctacgaatctgccagcaagtatttataaacattcattcagtgaatatatgccagctatattttaggcatgtgttaagtgctagcattaagcataatacagagctctttgggtttataattatgatttagaaaaacaggttattggaacagtaataaaattaatgtggtaactggtgataggggaagtaagtatcctgtttaatgctgccccataccactaatttgtcattatactatttgtgtccaaaaaattttccctaggagaatgtacatatgtaaaagtatatcacagtacctgttttctgtgctctgaatgtggtcattttctcctagcaagtgagactagggtaaactggactgtactctcttggttcatgagtgttagtaacctatgctctttagcctggaagctttctacttcaccattctgagttgaaaatggcatctcttgttgtttaatttgggttctgctgaagtcttttgacccttaatggccaataaaatatgataatgatagtctggacttagagcagaaataacagtaacaacaacacaggaaataaattacactggacatggcagaagaaataatatgcagattagcaggcaactggggattgattaaagtctttgcatgttgtggaggatattctgtacttgatgagagacctgattgaaagttgcacaaaatttcaaaaacatgtcaaatttgaaggctatactgggaagactcccttagagctcttactaggtttatggttccagaaaggcttcctaggcactaattgcattggtcctgctaattggagtttgtgtatgttgagtgctaggagatcatataatgggaagaccttagagcaaacctccaagagtatgtgacttctaatctgttatctgaagaaatagtaagggttaaccaggcaaaaggatatggggatgaggaatgtgagtcttctaagaaggataacaactgactagggatatcataggaattcttgacatagtcaatttggatagtagctatacagttaatcacagggcaaagtacatctgcttactgtgtaaaagacgtgacctatttagctatacgtacttacattgaaataaagaattatttgtctatattgtattgcaagccactaatttctttagacactatcatagtgtggcagtgctatagatgtatattttatcttgttttgataataaccaaaattatgatgaattgaactttagaaaatatatctgaagatgtggtgaaatggtttgcagtttattgttttgggaaatttgtaattttatatatcaaatttataacactattaaaacatcgtatgatagtctttttcatagtatagtgttttaatgagttttgaggtgttctaatgaaagtgtacaaaccatccacatgattaaaggtagttagcagcaaagtgacttttagtccattctgtgattataatacagttctctctgaagaagattggatgggactaaagttgcttgaagtagttttgacttgccaagaaagtgtgagtgtgctagtccatcacagttgccccttaggtgatgaggtattcatcctataaaaatgtgtagatttatttgctagtaaatagtttcaaagtatttgaggtctgttaatatttcccataatccattccaaagtaggaagtttggggattaattgtgttatcactgactgttgtttcattttttaaaggatgttttatatctgtttcataattcagattcacaccctaagcgtcagtttctttttcccatttccatgagtactttttaaagtgtatttcttgtacttagtttaataattatataatgtgttgcctttttttcttttaggaaaaaaagcttttataaagtatttatttattgatttattggttgactgagacagagtctggctctgtcgccctcgctggagtgtggtagtgcaatcttgattcaccgcaacctccgcatctggggttcaagcgattctcgtgcctcagcctcccaagtagctgggatggcaggcgcacaccaccacatttgggtaatttttgcgtatttttaatagagatgtgtggtagtgcaatctcgaatcaccgcaacctccacctctagggttcaagtgattctcgtgcctcagcctcccaagtagctgggattgcaggtgcacaccaccacatctgggtaatttttgtgtatttttaacagagatggggttttaccatgttggccatgctggtcttgagctcccgacctcagatgatccacccaccttggcctcccagagtgctgggattataggggtgagccacctcacccagccaaaaaacttttataaagtatttgtatctccaatttaattgcaaacttgatggttttatgaattcatttgatttaatgttatgttcaataaagatttaaaaatatttcttagattttagtttaataaagtttttaagatactagtgagggacttggcttttttaggcaaatggaattttaaacatgtaagctaaataattttttttgcctttttttttttagtgaattagtgccatcttacgattcagctacttttgttttagagaatttcaggtaagagtttttgacaattctggtttttttgtatgtgtatataaggaagagccagaaaggtattctttggtaagacagtaatctagtgaactgtgtcactcactttagaagtcttagaagaataagtttcctattagaaatgtagagataatttgtgctggattatattgtatctttagactgactgcttctctagtctgggaaaaggaaccttttctttttattttgagactgggttttgctctgtcacccaggctggagtgcagtggcgtgatcattgctcactgcagcctcaacctcctgggctgcagcaatcctcccacctcagcctcccaagtaactgggactacaagcgtgtgccaccacacagatggggtctcactgtgtttcctaggctggtctcaaactcctgggctccagtaattctcccacctcagcctcccaaagtgctggaattataggcattagccacggtgccctgcccaaagtgaggaaccattttaaataagagagatcacttagctttgactaaggtggggggctggacagttagaggttgatgagccccctcttacctatcctcagaaataaaagtgctgggaagaaatccattgagatccatttatctcagctcaaagtgaagaattgtggataaggggccattattgtaagaaatgtgtaggctttgtcagttgtatgttaattttgttagcttttactactttttctcttaagatcagaagtgaagatcgtaacatgcaaaggttcttagcaatttgtctttgagggcagcatggaagtggaaacaaggactataaggtcttcaggagagaaactccaaataataggcaaaggccatcaaaataaggccacactgggcagggcatggtggcttaagcttgtaatcccagcactttgggaggccaaggcgggtggatcatcgaggtcaggagttcaagaccagcctggccaacatggtaaaccccgtctctactaaaaatacaaaaattagctgggcgtggtggtgggcgcctgtaatcccagctacttgggaggctgaggcaggagaattgcctgaaaccgggaggtggaggttgcagtgagctgagatcgtgccactgcgctccagcctgggcaacaagagtaaaactctgtctgaaaaaactctatctcaaaaaaaaaaaaagccacacagaatttatccctcttcccatttaatttgtcttttcttagggttacttttgtggctaaaacatagtctctttgaggtttttcccacacgtattaaggtttagtgtactcttgttcttcaatattaaaagatgattatactgcagagaagcgaggaagaaacattctgggttttgttttatttttaatggtgaagactgcttgttgaagcattaattaawtttgggagacttggtgatacattccttttcccttaaatgtcacaattttgagggttttttttcccctgaaacttaaaagatattgctgaatatttcagtatctttaaattttctttatttcaggatgtaagcatatctaaacttttacagtggaattttgacctgttcagtcaccttgttatttgtctaggatttcaagtatgtaacaaagaaactggttggtctttctttttgcctgttgccatttcacaacagttttgatcttgggatttggttggttttctttttcgttagcactttgcgtcagagagcagatcctgtttacagtccacctcttcaagtttcaggactttgctggaggttaaaagtttacccagtaagtttttcatatttctaataaattttgaaaccaaggtctttctttcagagttctgtagtatactaatttgattactgagaactgttaactcttcttttttttgttacataygctgtccgcattccctgttccccttcttcccccatattagacaactgtttgtttgtccacaccttgttctctaatacattctgctggaaggcctattggaaacaatgttccctgagttctcatatgttgaaaacagtttttgccttttatattctaaggctagtattgctggatataaaatccttggctcatattttctttcattgggtatcttcaatatgcaattccattttctttaggaaaagtctgataataaactaattttctttacctttaaagatgtttggtgatattgcctagatgctaaataatctttttgagtccagtaatttactattacacattttagccctcctgggttagtattctcagttacacattgaagtctttcaatatgtagtttcagattatttttttttttttagaaaagttttgtataatggcattacacaataatatatcatcttttatgtctggctttattcacctagctgatgagtcatttattcattgatatctaytgagtgattatcatgtcgaacctcaaaagttgcctcaggtcctttcaagcaaagtagactaaaaatgaaggggttaatagtacttgtacctctctgtagtcatatcccagtagacactggagatgtataaggatctctgttgtcagccttcattgtctygttgggggaacagatgtttaaacaagtagttataataaatgtgattcttttaaaacatagacacctgaagtactagggaaatacataggaagtaattctctttttttaaaagagtcttgccaaattaaacaaaaagggagggagtaattatctttataaaaataaaatctatagtagagatttaaacaacttctcaatctctagacagaatcttatatggaattctaatattaaaatcatatagaaattatatttaattactttcagcatagggtattacctttttgtatgttggtcttaaaaattaatttttggtttaaaatttttttttgcttcactcatttctaatgaaattatttttcccattagggtcttgtttttttattaaggttgatttgtaagagttctatatatgttaaaactcttaacctttgttgtggttgttgatatttcccttcatttttgtgccttaatagtttcactttttttttaatgcacaaaagtttaaagttgttaagaactcaaatctattggtgtttttaattatttcttccattgctttgaggcttagaagtacttctcaatctagatatcagatattatctgcattttgttttattgtggcttaatttttttacactcaaactgattattcttcttttaggatggaaatggagttgtgcgaggttactacttatctgtgtttctggagctctcagctggcttgcctgaaacttctaagtaagaagtgtaattaaataacaaccttaatgtgcatttacataccttccccctagcaatttttgttaatttttatttttgttaattactgtattggtatgtctgttaagatgtagaataatatgttcttggcatcataggatggtatttttctaaaaacaaaatatttttaagaaaacttgtattgctttgcgtttttagaaatctctttactatctggcttagaagaagactactggattctcatgtctgcttttatattcaatttttttaaaatatcattttgattgaaatacatgtatgaaatctgtctgcagagttctacaaccatcaccaacatctaattttataacattctatttactccacaaggaatccctgtactccttagcagtcacttcccattccccgtttccctcagtccctgagaaccacaaatgtactttttgacaaggaggaatattttttaaagtggttttagataattgtggatcttctttgatattacatccaaactgaacaagtggtaggttgttaaatgttatttacaatgtgggatctggaatcatattaatgatttttttttttaactctgttacatgaaatctgttagtttagtatggaatgtctgctttcagctaacatgaagcaagagggatgagatctacccattttcctgcaacaaccaaaaaaaaaaaaagacctcatgaaacaacattttctagacactggacatggtggtaacaaatgaaagtagtccctgagagatgagaaacacaaactaactctacaatttctccagcttacagccttgagagagttttcaggctgcaacacagggaggagctgggactgagggagaatctggcagacttagttgaggggatagtgctgagagtctagaaaggacaatacagctagagcgcattggacaaaataccagagaggagaaagctgcagagactgaagtctagagatccgtaatgggttccccttgagtattcagcagagtacttatcagggcatatgtctgaggaaactacctgagattggggaaagaactccttgacaggattagagggaatagtgagtgactggtgttcacacggggccaggaactgtgtctattgcaacctgccacggtggagaaatttataattcatgggtcactgattgggtataacactaaggaagtttttgtctcgatagcagaaattagccctagactgaacactgctctggacccacctaacaaaagtgagayctgaaaggatcaaattgttttcaagtaacttaactgcatcccagaaggaagctcaagaaaatttataaggttgctgaagtatctaacatccaacagagtaaaatttacagtgtcttgtgttcagtcaaaggttaatatgccagactggctggcccatacctgtaatcccagcactttgggaggccaaggcgggaggattgcttgagaccaggaatttgagaccagcctgggcaatatggtgagaccctgcatacgtctcagctactcaggaggctgaggcaggaggattgcttgagcccaggaagtcgaggctgcaatgagctgtgtccgcaccactgcactccagcctgaatgacagagtgagaccctgtctcaatttatttatttacttaatgtattttgagtctcactttatcacccagcttggagtacagtggcatgatctcagctcactgcaacctctgcctcccaggttcaagcaattctcctgcctcagcctcccaaaatagctgggattacaggcatgcaccaccacgcccagccaatttttgtatttttagtagaaacggggtttcaccatattggccaggctggtcttgaactcgtatcctcaggtgatccgcccacctcagcctcccaaaatgctgggattacaggtgtgtgccactgtgcccggtcaagaattctttatatattttggatactaaacctttatcagacatatgatttgcaaatagtttctcccatttggtaggttttcttttcattttcttgataatgtgcattaatgcacaaaagtttataggctatcttctttgtctttttgtaaacctgaaaattttacaagattggatatataaattagaatatattggctttcccaatgtatacttcttttctttttgagacagggtcttgctgtgtcactgaggctggagcacagtggcacaattatggctcactgcagcctcaacctcctgggcccaggtgatcctcctgcctcagtctcccaagtagctgggactacaggaatgcactaccgtacccagctaatttttttgttttttgtttttatggagacggggtttcgccatgttgcccaggctggtctcagactcctgggctcaggcgatctgcccacctcggtctcttaaagtgctgggattacaggtgttagccactgtgtccagcttacttattttctttttcctttttcttttctttttaacttttattttaggtttggtgttacgtatgaaggtttgttacataggtaaactcatgtcatgggggttcattgtacagattatttcatcacccaggaattaagcccagtacccaatagttatcttttctgctcctctcctttttcccaccctctgccctcaagcataccccagtgtctgttgtttccttctttgtgttcataagttctcatcatttagctcccacaatataagtgagaacacgtggtatttggttttctgttcctgtgttagtttgctgaggataatagcctccagctccatccatccatgttgcacaaaaaacataatctcgttcttttttatggctgcatacttattttctattaggaaattttatagcctttgattttctgaatacacaataatttgctttcttatcacttgtactggcaaaatacagtagagtatttcaaaatttatattttaaaattgcaaggtgataaacctcaaaggataatagaaataacaatatttatgaggaaacatatgtagtgaatatatggaaaaaatattgcattagtaaaacaaaagcaactttgaattacttgtttattcaaaatttatttattttttgaggtgttgttttatacctgatatatcggtaaacatctttacgaggaaaaaaggacctattgccattcatgttttggtggttcgttcaaaatactgctgttttggctgggcgcagtggctcacacccgtaatcccagccctttgggaggtcaaggagggtggatcatctgaggtcaagagtttgatactagcctgtccaacattatgaaaccctgtctctactaaaaatacaaaaaattagctgggcatggtggtgtgcacttgtaatctcagctacttgggaggctgaggcagcagaatcacttgaactggggggcagaggttgcagtgagctgagaccccgccactgccctctagcctgggctacagagtgagactctatctcaaaaaagcaaacaaaaaaatactgctctttttctggccgggtgtggtggctcacgcctgcaatcccagcacactgggaggccaaggtgggtggatcacctgaggtcaggagttcaagaccagcctggccaacatgaacccccgtctccactaaaaatacaaaattagctaagcatggtacacgcctgtaatctcagctactctgtaggccgaggcaggagaatcacttgaacctggagtcagaggatgcagtgagctgaaattgcaccattgcactccagcctgggcaacaagagtgaaactccatcttaaataaataaaaaaaccccaaaatactgctgtttttataaatgataaaagaaatgtaactgcgtatatcaataaggtttcttctcaggtaattacttagtgaccttaatgtttagatgagtttgttttttattcttactttactaactgtatagtaatggtctgtttttcaattttagatatgaatatcgtgtagagatggttcaccagtcctgtaatgatcctacaaaaaatatcattcgagaatttgcatctgactttgaagttggagaatgctggggctataatagatttttccgtttggacttactcgcaaatgaaggatacttgaatccacaaaatgatacagtgattttaaggtaacaggaaaaatttgatgttgtggtttttattgtggggaaataatatcatcagaactatatttcaaagatcatttggttaacaaagatgaatattgaaattcatactaactataaccttatcacctttttttttttttttttttttttttttttttggagacatagtctcgctctgtcgccctggcgcgatctcggctcactacaagctccgcctcccgggttcacgccattctcctgcctcagcctcccgagtagctgggactacaggcgcccgccaccacgcccggctaattttttactatttttagtagagacggggtttcactgttttagccaggatggtctcgatctcctgacctcgtgatccgcccgcctcggcctcccaaagtgctgggattacaggcgtgagccaccgtgcccggccccttatcactttcttaactgttttatttaagtggataataatcaaaaatttgtagtcaaaaagtcaaactttttttgacatctagttagcaattccattaaagataagctgggtgcagtggtgcgccggtgtttccatctactatggaggctaagatgggaggacggcttgggcccaggagtttgagaccagcttaggaaacattatgagaccccccatctttttaaaaagaaaaaaaaaagggggtgggtgggaaactacaacttccagtaagtatagtaatgttccatttgtctgttgaacttctagtgacctcaccatttggaaatctaagaatagtgagggataaagtgctgatttttttcacttcacagtgcatattatatttgagtgactggttttacaacttaattttataaagcaactatcagttctttgtcaataacagcaaattaaaagtagaagagtcaagatgaaagttgacgaaaaccagcaattttctacttttttcttaaacttttattttaggttcaggggtacatgtgtaggtttgttatacaggtaaactcacatcatggtgatttggtgtacggattatttcatcacccagatactaagcctagtacccaatagttattttttcttatcctctccctcctcccaccctccaccctcaagtaggccccagtgtctgttgttgttacccctcgttatatccttgagttctcatcatttagcttttttttttttttttttttttttgagatggagtctccctctgtcgcccagaggcgacatatcggctcactgcaagctctgcctcccgggttcacaccattctcctgcctcagcctcccaagtagctgggactacaggtgcctgccactgcatctggctaattttgtttttgtatttttagtagagatggggttccaccgtgttagccaggatggtctcgatctcctgacctcttgagcctcctgcctcagcctccaaagtgctgggattacaggcctgagccactgcgcccggcccatttagctcttaaataataagtgagaacatgtggtatttgcgaaaaccatcaatttttttttttttttttttttttttgagacagagtttctagttgcccaggctggagcgcaatggcgcgatcttggctccctgcaacctttgcctcccaggttcaagcgattctcctgcctcagcctcccgagtagatgggattgcaggcacgcgccaccatgcctggctaattttgtacttttagtagagatggggtttctccgtgttgatcaggctggtttctaactcccgacctcaggtgatccacccacttcggcctcccatagtgctgggattataggcatgagccaccacgtctggccaaaaccatcaatttttattgttgattgttggtgtagtatttacaagaaaggatagaacgtaaatactgactcaaacaacagccctatttagccaggtgtnnnnnnnnnnnnnnnnnnnncaggtgcggtggctcacgcctgtaatcccagcactttgggaggctgaggcaggcagatcacttgggctcaggagtttgagagcagcctggccaatatggtgaaatcctatctctactaaaaatacaaaaattagccgggctgtggtggcacgcgcctgtaatcccagctactcaggaggccaaggcaggagaatcgcttgaatccggcaggtggaggttgcagtgaaccgagattatgccactgcaccccagcctgggcgacatagcaagaccctatctcaaaaataataataaagtaaataaaaacaacagccctgtttaacgtggggtagtctttacaggtcagaagtttttgggcattggctgggtgccgtggctcacgcctgtaatcccagcactttgggaggctgaggtgggtggatcacctgaggtcaggagttcaagatcagcctgggcaacatggtgaaaccctgtctctactaaaaatacaaaaattagctgggcatggtggcaggcacttgtaatcccagctacttgggaagctgaggcagttgaatcgcttgagtccgggaggcagatgttgcagtgagccgagatttcaccagtgcactccagcctgggcgacaagagtgaaactccatcttaaaaaaacaaaaaacaaacaaaaaaaggtttttgggtatcattacatgatgttataatttgatgatcaaaataagaacttgaatatttaaaaaagattaaaatatgttctgaactgagaagtttcagagtatttaacagtttaaaaagttctcatcacaacaattttaaacatttttttcttgagagtgatttaatgtactcctgaatttcccttattcggagctctttgttcttgagcatactggacagatgagttgctatcatatcagcatttactcttatgtgttttccgtagcttttctggaagtataaagaagtttaacaagggatatgattttcagtgtagggaaaaagatatgtttttgttattgttttgttttgtttagagtcagtgtcttgctatattgcccagtctagtctagaattctcgggctcaagtgatcctcctgtctcaacttcccaagtaggtaggattacaggtgcatgccacggtgcctggaatcatgttttttgaggggagggattattttagttttcttcgtatagcttttcagacttttggggtttaactattcaccaagagaaataatttattgctatttcatgcttcagccatagagagaattacaaaattattcaaacatcaattttaccaacctataaaagacccattttcttatagccttgatttcatccttattagcgttacttattagtacagaaacaaattcctgttatgacatcattttttttaagcaacattgagtctataccatatgcctgacactgagttgctaataagaaaaatatagacatggtttttgtccacagggaactcaagatgaaattggcagataaaaacagaatttactactctcttattataaaataatrctatagtagcaccgtaagtaaattgctatgaagtttgtggatagggggcttcacattatcctattaatgagacattgctcaaactttaaaccttttatttcaagattctggtggaattttgtatgtatttattagaaagttatttaaggcttttctataactatgaatgtatgtttcattctttcattaaaacagaaagttaagaaattttacctgctgcttggttttgttttaatggcaaaatattagaactaatgtgcagagttaaccagtggtttaaatcattcaaagaaaataatagtgtttagacggtcttactttaatgtcttaccagtgggtacttcctagactgtgaatcgtctctgctcagttgagtgaatcatctctactcagttccgttcagaacgtaatttaatctctttgatttgatttgatttgatttgatttgatttgatttgatttgattttttgagacagagtttcgctctgttgcccaggctggagtgcagtggtgcgatctcggctcactgccacctttgcctcccagattcaagcgattctcctgcctcagcctcctgagtagctgggattacaggcgcccgccaccatacccggctaatttttgtacttttagtagagacggggtttcaccatgttggccacgctggtctcgaactcctgaccttaggtgatctgcccacctcggcctcccaaagtgctaagattacaggtgtgagccactgtgcccggccaatctctctctttttttaatactcaagttctcattttgatcatccagttataacatataatgatgcccaaaaacttctgacctataaagactatcccaacattaaataggactgttgttttatagtcagtgtttatgttctgtcctttcttgcattagtattcttcactaaaactagatatctactgccagataactgttaaatggtcagtaggttcttacaataaggtgtaaaatcctagaaaaaaatgaacagctaacattgtgtagccgggtaaaagggctggaaggaatgagagagatgtagatgtccaaattagtcttgccttgtggtttttcctttcttcaaaaacaccttcacacatgcactgcaattttttcaccttaaatatagtcacgttaggctatgtaacaaaggtagaggtttgtttgctttagtaatagttttttttttttttttaattaaaacaactctggatagattaagattctgtcatttatatattaatacgattttatgtaggtgcagtactttttttcctaacctaagctgaaataatgccatattgtaataagggcagttttgattgctatcttgaagggttcaggatatagtttatttagagcatgtaactccttgggggatagtaaagcaatcctgggtggttgagccaggaagtgattttttttctgaggggcaggaaatacgggaacgtgagatggaatagagaaatataaagagcagcacttaaaactttgtattttgctacaaaaaattagccgggcgtagtggcgggcgcctgtagtcccagctacttgggaggctgaggcaggagaatggcgtgaacccgggaggtggagcttgcagtgagccgagatcccgccactgcactccagcctgggcgacagagcgagactccgtctcaaaaaaaaaaaaaactttgtattttgctggggcctcatttagggaagaaagggataagagttatcttcctccttataggaggaaactgcatagtatatggctctcttcttcccaactcatgatcatcattgtattttagttacattattataataaatatgcctgagtaggttagtttgggaagcttaactacaatgtacaatgttatttctttagaaaggtagtttgaggacaactggcttttcagaaccttgtgtcataatctgtggactacatctataaacaacaaatactagcagctctaagtttatgtgaattttggccttataatcaagttaacccaaattgcagaattcagtgctagactgataatgttttactatttgaattttttttttaatgtggcacaattcttttaaggtttcaggtacgttcaccaactttctttcaaaaatcccgggaccagcattggtacattactcagttggaagctgcacagactagttatatccaacaaataaacaaccttaaagaggtaagaaaatatctatttctgttttggtgtttcctattgtccttttggcttgttatatttgtaattagattttatatattttattgctatttgtaattttgtaatttgtaattagaaaaaaaatctagttatcttgttccccatccttaccagttctgcagtgtccagtttagtagacactagccacatacggccatgtaaatttttattttactttatttatttattttttttgagaaggagtctcgctctgttgcccaggctggagtgcagtggtgcaatctcggctcactgcaagctccgcctcctgggttcacgccattctcctgcctcagcctcctgagtagctgggactacaggcgcctgccaccacaccgggctaatttttttgtatttttagtagagacagggtttcacagtgttagccaggatggtctcgatgtcctgacctcgtgatctgcccacctcggcctcccaaagtgctgggattacaggcatgagccaccacgccctgccactttatttttatttttttttattttggagacaggtcggactcactcttgttgccaggcacaatttccactaactgcagcttcaacttcccaagctcgggtgatcttcccaccttagcctcccaggtagctgggactacgagcatgtgtcatggctagtttttgtttttgtggagatgggtttctccatgttgcccaagctggtcttgaactcctgggctcaagcagtctgcctgccttggcctcccaaagtgctgggattacaggtgtgagccactgtgcctggtctgtaaatttagcttaattaaaattaaaaatttagttccttagttgcagtagccacatttcaagtgcttgcattggttactgcaaatctagagcatttccatcattgcataaagttgttttgaacagtgtggctgtagtttgaggtaagctgtttgtgtttctgtcagtgacttagtttctcttccacaagttatcttggatttagaggattctaggctatagcacaattaaaagttgtcccatcttgaactcttactattgttgaatgagcactggggaagattaattgatgaatttttattttacagtggtaaactaaggaatgtttcatttcccttaggaagttagggtgtggcaggaggtttggagtgctgagagtcgttaataggtcagggaggaaaatgtgaataaatacatgctttcagagattttcatgttaaatgtgctatttaaaactgcctgtattcactatactgtttgctaattgtatgtttagcttaggctggatatgaaagaaggaggatgagcataaatggggcagtttatctttgtcatcaatttttttttataaataaaaggcagtagggattcagagaaatggtttaagaaatggtgccaagtgaggtggctcattcctgtaatcccagcatgttgggaggccgaggccagaggaacatttgagcccaggggttcaaaaccagcttgagcaacatagcaagataccgtctctaaaaataaataaaaatgaaattagccaagcatggtggcacacacctccagtcccagccacttgagaggctgaggcagtaggatcgtttgagcccagtagttcaaggcttgcagtgagctatgatggcaccactgcacttcagcctgggcaacagagtgagaccattctcaaaaaataaataaagcaatggttttagaaacatctggatgcatttttttttcacttgagacatcttttactgtgccagtgagctgtggctaatatttgtgcttttcttgttttaaaagagacttactattgagctgtctcgaactcagaagtcaagagatttgtcaccaccagataaccatcttagcccccaaaatgatgatgctctggagacacgagctaagaagtctgcatgctctgacatgcttctcgaaggtggtcctactacagcttctgtaagagaggccaaagaggatgaagaagatgaggagaagattcakaatgaagattatcatgtaataatgaggccagttttagatttttgtgtttgattaaaaaaaaacagyagcatcatggcttttaacatattatgtgctaaaacagtaggctaaaaatattgtccattgatttccattagtaatgtatgtatgcccttatgtaaatgttaataagtcagaagttgttgaatcaaagcatttcaaggttgtgaaaaaaacaatacattgtataaaacaaaccgtgatacacattttaaaacctaaactaccatacattgtggattttaaaaatgtgttctggccgggtgcggtggctcacacctgtaatcccagcactttgggaggccaaggtgggtggatcacatgaggtcaggagttcgagactatcctggccaacatggccaaaccctgtctctacgaaaaatacaaaaattagctgggtgtggtggtgcttgcctgtaatcccagctacttgggaggctgaggtaggagaatcacttgaacctaggaggcggaggttgcagtgagccaagattgtgccactgcactccagcctgggagacagagcaagactctgtctcaaagaaaaagaaaaaaaaaaggtgttctattttcattcactgaaactagtacatgccttatcattacttacgtaggtagactgatttaggattcggtagctagccaggttctatcccagctaaacaacagtcagaatccagaataagagttcaagaagtagttgatatttttacataagaagggatgcatagacagttggtttttttgtagtaatttttaagatgagagacttcagttttaagttaaaatgaaggacccagtgggtcgagagaatgcacagattaagtgctttgataaactagagataatagggtttggaatggagcagtcaggtgaagcagttaacctttgataaactgagttaaaggaagggtggagtttgcaggtaaggcagctgaaaagttggggaagtttttgcttaatagtgggtattttttttctgtgcagataggtgacagtgttaattaatgaccttgataatggtaaaattaggtagaattgaggagtgatggtttgaaacgttactctgtgaggaagctgatgtggaatatgtgaaggattccagtcacactgagggcccagctgaaggcggcacgcrtaagttagyaaaatgatatcagtcagtgtggttgtgtgatttttctctacagggctcagcagctgaggcacaggagcagaaaatagatttttgaaaactgtattattctttggtgcttggtttatgggctggatggggtgatcaactgagtagaaacatttggaatagacgtcttgttttcttggcattgatctagcacgagctttcagatggagatctggatctggatcttgtttatgaggatgaagtaaatcagctcgatggcagcagttcctctgctagttccacagcaacaagtaatacagaagaaaatgatattgatgaagaaactatgtgagtttcccactttactaytgtaaagcatttaagtggtaattattagaagcatattaactaactcacacttaaatgtagggatattcagcacttttttgaaagattgaatcaatagtcagttttctctctctaatctctgggctcttagccaataatttttgtttgtgttttaacttttaaatttgaattttgaaattattttatacttaagaaaagttcagaatttcatgtttccttcacacagattcattccctatgaatattttgctttatatttctctgtatataattttttctgaaacacttgagatcgaatatacttctcattgtgtacttttctaaaaacaaggatattcttacataactatagaatagttatcaaaatctggaaattaacattgatgtaatactgtaaccttctaaaaatttgccagtaatgtcctttgtcaggatcatgttgcatttaattgttaaatcgatttagttatcttcaatctgggttacttttttttttttcctttttttttgagacggagtctcgctctgtcgcccaggctggagtgcagtggcatgatctcagctcactgcaagctccaccttccggattacgccattctcctgcctcagcctcccgagcagctagaactacaggcgcccgccacctcgcccagctaattttttgtatttttagtagagacggggtttcaccgtgttagccaggttggtcttgatctcctgacctcatgatccgtccacctcggcctcccaaagtgttgggattacaggcgtgagccaccgcacctggccaatctgggttacttttttaaaaatttgtttttcggctgggcacggtggctcacgcctgtaatcccagcactctgggaggctgaggcgggtggatcacgaggtcaggagatccagaccatcctggctaacacggtgaaaccccgtctctactaaaaatacaaaaaagaaattagccaggtgtggtggcaggcgcctgtagtcccagctacttggtaggctgaggcaggagaatggggtgaacccgggaggcggagcttgcagtgagctaagatcacgccacggcactccagcctgggcgacagttgagactctgtctcaaaaaaaaaaaaaaactgtttttcatgactaatactttctgagaaatacagaatagtttattttgtagaaagtccctcagtttggattagtctgaagtttcctcatgattagatagaggttacacacttttggcagggatactacggaaatgataatgtatccttttcactgcgtcatacagagtggagcatgatgtcagtatgtcccattacttgtggttaattttgatcacttagttgaggtagcatccgccaggtttcttcactccaaaatttgtactttttcctttataattaataagtatcttatgtatgggactgtaaatatcctatttttcatcctrctttttcctatgaattttgacaccctttgatgagtgttgcctgaaaaaggttactgtgttgattgccaagtggtgtttttctaattccattatttcttactcattcattagttgcaatttaaggaagagcttttccttctgccctgttaattgatgaactaatgaatttcattaatgtggataattttttttttttgagatggagtcttgctctgtcacccaggctggcatgcagtgtcacgatcttggctcactgcaacctccatctcctgggttcaagtgatccttccacctcagcctcccgagtagcaaggattacaggcgtgcaccaccacgcctggctatttttttgtatttttagtggagacggggtttcaccatgttggccaggctggtcttgaactcctgacttcaggtgatctgcccacttcagcctcccaaagtgctaggattacaggtgtgagccactgtgcctggcgatttttggatttttaaaccaagcttgcattcctgggacacatcccacttggtcatagtgtgtaattttttttcttttttcttttttttttttttgtgacggagtttcgcactgtcacccgggcttaagtgcagtggcatgatctcggctcactgcaacctccgcctcccgggttcaggcgattctcctgcctcagcctcccaagtagctgggattacaggcacccaccaccacacccagctaattttttgtatttttagtagagacgaggtttcactgcgttggccaggctggtctcaaacacctgacctcgtgatccacccgtcttggcctcccaaagtgctggaattacaggtgtgatccacttcgcccagccgtaattttttttttcttttttttttatttgaaacggagtctcgctctgtcccccaggctggagtgcagtggcgcaatatccgctcactgcaagctccgccttctggattcacaccattctcctgcctcagtctcccaagtagctgggactacaggtgcccaccaccttgcccggctaattttgttttgtatttttaatagagatggggtttcaccgtgttagccaggatgatctcaatctcctgaccttgtgatctgcctgcctcggcctcccaaagtgctgggattacaggcatgagccacggcacccagcaattttttttttttcctaagagaatctggctttgtggccaggctggagtatggtggcatgattatagctccctgtaaccttcaactctggcctcaagtgatccacctgcctcagcctccatagtagctaggactactggtgtgcatcatcacactcggctcatgattctttttatatgttactgcattctgtttgctagtacagttgtccctcagtatccttgcggtattggttctaggaccccgcccttggatactaaaatctgaggatgctcaagtatcttatataaaatggcagagtagttgcatataacctatgcacatcctcccctatacttttaaatcatctctagattacttataatacctaatacaatgcaaatgctatgtaagtagttgttatactctattgtatacagaataatgacaaggggaaaatgtctgcgcatgactttattttgttttgttttatttatttttttttgagacggagtttcgctcttgtcgcccaggctggagtgcagtggcacaatctcagctcactgcagcctccgtctcctgggttcaagcagttcccctgcctcagcctcctgagtagctgggattatacacgcctgccactacgcccgactaattttttgtagttttagtagagacagggttttgcaatgttgaccaggctggttttgaactcctggcctcaggtgagccacagcacccggccggctttattttttgagacggggtcttgccctgtcacccaagctggagtgcagtggtcgcgtgatcacagctcactgcaacctcgacctcctgggctcaagtgatcctcccacctcagttttccaagtagctaggactacaggtgcatgccaacacacctggctaattttttaatattttgtagagacagggtctcactatgttgccttactatgttctaggctggcccggagctcctaggctcaagaagtccctccagcctcggcttcccaaagtgctgggattacaggcatgaaccaccacaccagggcttaaaaaatatttttgatccacagttggttgaatgcacagatgcagagcccacagataaagaaggccaactatatttcgttgatgctcttaatagtgttgtatgtttctctgagtgttgtatgtgtctctgcttctccccataggcaaaatctctgagccaaagctttgaagttggagtaaggataaaggtgtacctctcttactttagaagctgagctaactggatgttggggacagtagccttagttctttccttttcaggcttgggacctccaccttatgaataagctggggcagggatgatctgggccccagtattctcatcatgctgcatccaggtagagcatctagtccacaagtgggtctcagcagaagggagtctccacctcttggccgtgtgtgcctgtactatagcatcagcaataggtagctgggggcagaatgagagatgctgataccttgccactcccaggaatatagccctcctcttggaagttcgggaagtgggaggcctgtgttcttcactgcaccagtctggagtggaatttctgtaacaccaagttaggaagtggagtgatcttggttcaaatactgcagatgcccacttgtcttacccagtttttatagrtttttttgagtagatgtttcttcatttgctgtatgcccttgggaccatttccagagtcgttaagtggttgtttttaaaataattgtcaccagtttgactaaagagcagacctacagagctccttacattgtcaagctgggtgcttatcttgagatttccttaaatacccaagactgtcattgactggtactgtttcaagtagtatgttgtttaaaataaagtaatagtgattgttttttaacatgagagactttgtatggccgagtaggaagtaataccctctttgctgaaatattatttttgaaaaatggtatttagtcatatacagtaatttgggctttttttggatgttaaaatgtagtgttttaagcctaacactacatgtagtgttttaagcttattgccattaagctaccagttctctgaagctgtaatttcttctaacagtggttcttgtatttattagtgtttctaacactaattaaataggagagattaatctcttctaatagtggttcttagattttttagtgtttcatttatttctatttttttgcctgacacagttctttttttttaatcttcctttcctttcctttcctgtcctgtcctgtcctccttgagacagagtctcgctctgtcgtccaggctgaagtgcagtagtgcaatcttggctcactacaacctccacctcccgggttcaaccgattctgctgcctcagcctcccgaggagctgggattacaggtccccaccacaacgcccagctaatttttgtatttttaggagagacagggttttgccatgttggccaggctggtctcgaaatcctgacctcaggtgatcctcccaccttagcctcccaaagttctgggatttcaggcgtgagtcactgcgcccggccttgagatatatatatatatatatatwtatatttttttttttttttttttaaattcctttttttcttagctttctaagaagaactggctgattttttttttttttttgagatggagtctcgctctgtcgcccaggctggagtgcagttgtgcaatcttggctcactgcaagcttgcctcctgggttcacgccattctcctgattcagcctcctgagtagctgggactacaggtgcctgccaccacacccagctaattttttgtatttttagtagagacagggtttcaccgtgttagccaggatggtctcgatctcctgacctcgtgatccgcctgcctcagcctcccaaagtgctgggattacaggcatgagccaccgcgcccggccgatattttttaaaggttgtttaaacaataacattaacgctacttaaatttggaaaatgacaaaaatctttctcctttttgtatttagaaatatcttatttcacagaaaaatctgcatatcataaaatttattgaggtgtgaaaaacaacgtttattgtatcactctatataaatgatggattttgtatattcttaggtctggagaaaatgatgtggaatataacaacatggaattagaagagggagaactcatggaagatgcagctgctgcaggacccgcaggtaatgaggtcactccactgcctccaagccattctgttttctctctgctcttctctgactgtattatattttaaataggtggtagccactgcttgtacatggttcatggtgttggaagtggtatatcttataatatggattttttagagtttattactaaagatatttaaaacaatagctaacatttgaaaaatgttttatgtaccaggcactgtgagaagcactttaagtaccttatattaataaaattctgtgtgatacattcactgatgcatagagaaattaaagcaacttgccaacttttaacaatttagtaaatgagagtaattgaatccccagatttgtttgtatcccatgctcatattttatactattctttctgatataaagtcttatttgtatatcttgctagactatagaatgatctcagtggaatcattgactcttagacttacgaaggatcttaaagagctcattttatagttttcagttacctggtcatatagctggttgttagtacaaccagactagaaccccagattgtcctgggtttgtggacccagcatttttctcccaaactaaaacactgcttctcctgggaagaactgacttatataatgagtacttttttgtgtgttctcggatctatttaattaagtagtgaatcttggttagagtaattaaaagttagctttctactgtttctgttttacccatgttctcctcagtatgaacactggcatattctttttttttttttgagacggagtctcgctctgtcgcccaggtcggactgcggactgcagtggcgcaatctcggctcactgcaagctccgcttcccgggttcacgccattctcctgcctcagcctcccgagtagctgggactacaggcgcccgccaccgcgcccggctaattttttgtatttttagtagagacggggtttcaccttgttagccaggatggtcttgatctcctgacctcatgatccacccgcctcggcctcccaaagtgctgggattacaggcgtgagccaccgcgcccggcctggcatattcttaatatgctgggataactaaagatttcttaaatactagtcctcaccatttcaactccaacctaagctctatattctttctactcctgactttaatcctgggtaatcttatccacacctgtatttcagttactgtctatatgctgattacttttcaagttctttctttagcctttgtctttccatagtttccaaacccatgtcttggtgtgtgattcagcacttcccaaacacaaattactgtcttttcatctgccagcctgcctgtcagcagtagccaccgtgactgataatgctatacattctttacttcttcctctccctaaaactttacctttagtgtattaccaagatctgttggttctgtgtcctaaatcgtgcataaattcatttggtactcccactcctttgccatttctagtctaggcctctgtctttcacctgggttccttgtatttattattgttcccctccattgtatttttacagcatggattcagaatgagggtgtttttttctttctgattaatatctaatcatgttacttctctaccagtcttggtgactcacgcctgtaatctcagcactttgggaggctgatgtgggtgcatcgcttgagtccaggagtttgagaccagcctgggcaacgtggtgaaaccttgtctctacaaaaaaatacaaaaaaattagccagatgtggtggctaaattgctgcctgtggtcccagctatttgggaagctgaggtgggaggatcacctgagcccaggaagcggagcctgcagtaagctgagatagcaccactgtactccagcctgggcaacagagtgagaccctgtgtcaaaaatagaaataaaaataatgaaaaataatatctaatcatgttatttctctacttaaaaactctttaaggattatatttattataggataaagtccaaacttgttaacatggcacataaattcctttgtgtctggattcctgtttgtttccttagccttatttctgtcattcctctgtatcattctttagtcaggaggaacttcaaagaatcacaagatctaccaatttggagagaagagctttaattcttataaagactggccatcctgggccgggtgtggtggctcacacctgtaatcccagcacgttgggaggccgaggtgggtggatcacgatgtcagcagattgagaccatcctggctaacatgatggaaccccctctctactaaaaatacaaaaattagccaggtgtgatggcaggcgcctgtagtcccagctactcgggaggctgaggcaggagaatgtcgtgaacctgggaggcggagcttgcagtgagctgagattgcgccaccgcactccaacctgggtgacagagcgagactccatctcaaaaaaaaaaaaaagactggccatcctgacaggctgggaagtgtggcctctggcaaagactaaaagcaggcactttgcaggagggaagggtaacataggaattgatgctgaataagttggccaagtacaactaaatcgattcagcaggctataggaggagctgtgaacatcatgaaaagggaaacacacgcatgcatagtagacaaacatgcatgttacatgcatttcatgtttactttggagtggggactgaacaatttaaatgcattacaattaggccctgttgtcaaaaggtaaagccaaggacacgaaggcactcaatgctcagcctctgtatacgggccagaaccagtccatggttggcgactcctatcaggagaaagttactgaaatcagtctcttgtccagtcaaagctgtagttacggctgtggaacagggagtgagtcagtcagcatctggcagtcagtaagctgcaattgtttcaatattgcttatcttgaggccagtgcttgcttagcttctagaaaaaagaagaaattctgttgcagttagaatgtagtttattctttaagtatagggagcgtgtgacttaatccttgtctggtatggcattaggtcttactgactgactaacttttcagccttgtgtgttttcttttagttaggtccattctttcctctcttaaactgtgtggtagagagattcttgtatataacatttatatacacttagggtaaagaagagtttacatttttgaattatatattcatcaaatatttactgagcacttgagctgtgtacagttttactatctagagatacaatattgaataacaagatatccctgttcttatggagcctatgttataattctgaatattctgtaataatccaggcactgtattctagatgttgaagacataataatgaaccagtttatttttattatatgctttgggaaatttatgtatttggcagaaatttgttaaatatcatgcctacctggaacatacaacactaagtaatttataacctaagggtgagtatatttatgaacaattagctagaatatgacaatgtacatacaaaagaattccaaatcatttaaatactcccttctcaaggagatgaaatataacttctaccccttaaatgtaggctgtgcttagttacttgcttctgaatagtacagtttcaaaagggggaaacaactttgaagtagagaaacttggcaaacattacctacccaggtgattaaatttagtattgtaagtgataggtcatgttgatagcatgttgacagtattgtaagtgataagtcatgttgatatgttgacaatggtactttatatctgtagtatcttccccctaaaaacccacaaacacaatctaatcatgagggaaaaaatcatacccttaattgaggaacattctacaaaatatttgacatactttcagacataaggaaagtctgagagactgtcatagaccagaagagtctaaaaagacaggagcaactaaatgtatttcagtactctaggtgagactctggaacagaaaaagaacattaggggaaaactactaaaatctcaataaagtataggatttagttaataatatatcagtattggttcattagttgtgacaaatataccatagtaatgaaaggtattaacattggggaaattggatctgggttgtacaggaactctctgtatttttacctttcctgtaaacctaaaactatactaaaataaaaaaattaaaaaagccttttttttttttttttttttttttttttttttgagacagagtcttgctctgttgcccgggctggagtgcagtggcatgatcttggctcactgcaagctccgcctcccaggttcaccccattctcctgcttcagcctcccgaatagctgggactacaggcgcccgccaccacgcccggctgattttttgtatttttagtagagatggggtttcaccgtgttagccaggatggtctcgatctcctgatcttgtgatctgccctccttggcctcccaaagtactgggattacaggtgtgatccactgcacctggccaataaaaagctttttaaaccaaggcaatgaaaaagctagatcggggtgacactgggcagagtgtggaaatgcttttttttaatatgcttattatgaaggtccatttcaagcctcgaatggtttatgtgttttttgtttttsttttgttttgttttgttttttgagatggagccttgctgtattgcccaggctggagtgcaatggcacgatctcggctcactgcaacctctgcctcccgggttcaagccattctcttacctcagcctcccaggtagttgggactacaggcatgcaccaccattccaagctaacttttttgtatttttagtagagatggggtttcaccatgctggccaggctgctctcaaactcctgacctcaagtgatccacccgcctcagcctcccaaagtgctgggattacagatgtgagctaccacacctggcctggttaatgttttagaactacacaattgtctaaagagttatgtsatctaaagaattacgatgttaagttatgcgttaaaaaggggatgattgggcttatataaaagctaggtataaagttaaatgtttacttaataatcttattttatagaccatattaaataaggagatagcttgaaacaagaaatatttattgactcaactggctgtagtcctggctacttgggagactgtggccgtaggatcacttgagcctaggagttcgagggtacagtgagccatgattctgccaccgtactccagcctgggtgacagagcaagaccctgtctcttaaaacacacgcgtgcacacacacacacacacacacacacacacacacacacacccccagcaaatacaaactagatttttcctactcactggattcaatgagccaataatctggattagaatgatacttaaaacctttttagcacaaattttttttaacataaattgtctttcatttaacttcaaataactgaataaactaaaagcagttctcataagaagacgtctgcagatgctaccacgcccaactaattttttatagagacggagtcttgctctcttgccctggctggtctccaactcctggcctcaattagtcctcctgcctcagcctcccaaagtgttgggattataggcgtgagctattgcacctggaccacagatgttagaagaatgaatgagcataatttttaaatgaaaatccagcactgatcattacaagattttgtgatggtaaatatcggtatgtaatttgtaacaaagtgaaggatgtgaaaatgtagaatattctggaaaggtagtttgagactagactataatagggccttgagtgtcatgataatgcatacaggcagtatgctgtaatgaactcaagtatataagtgtgacattttagcaagatccatatggcttggcacaaatggagaagaacctgtcaccgatccgtctgtctttttatgaggttttttttctatgtgaacttcagaagcatggtttttgttgtttttttgtttttttgkttttttgtttttttgtttttttgaatctcgctctgttgcccaagctggaatgcagtggcacgatctcagctcactgcaacctctgcctcctgggttcaagcaattctgcctcagcctcccgagtagctgggattacaggtgccctccaccacggccagctaatttttgtatttttagtagagacggtttcaccattgtggccaggctggtcttgaactcctgacctcgtaatccacctgcctcggcctctgaaagtgctgggattacaggcgtgaaccaccgcgcctggctgtatagctttattcttaatagccaaaagctagaagcaacccaaattgttttccaatagaataaagaaataaattggatatattcataaatggatgctgcacaataataatgaaaatgaggcagtggctcatgtctctaatcccagcactttgggaggctgaggcatgtggatcacttgaggccaggagttcaagaccagcctggccaacatggcgaaacctcatttctactgaaagtagaaaaaattagcttggtgcaatggcgcacgcttgtaaccccagctactcgggaggctgaggcacaagaatcatttgaaactgggaggtggaagttgcggtgagccaagattgtgccactgtactccagcctgggtgacaaagcaagactttgtctcaaagaaaaaaagaaaaatatttaaaaagaaaatgaataagatacttctatatacagccatatagatgaatctcatgaataatgttgaccaaagaagaagagcataagagcatactctgttactacttttatacaaatacaaaacaggcaaaacccatctgtaatttaagttaggatgaaggttatttttgtagagtaggagtagtgagcaattttaggaggcataggagggggttctggggtactgataatatatttcttcatctgggtgtgatcactttgtgagcattcattgggatgtacatttatatatgagacacacagaatagcttggaaagagagaaactgaaatcagtgccaacccaaagtctttgatgcctgtggggaaatgtgatagtgggtagaaaggtgggaacataggccgggcaccatggctcctgcctgtaatcccagcactttcggaggctgaggcgggccaatcacctgaggtcgggagttctaaggccagcctaaccaacatggagaaaccccgtctctactaaaaatacaaaattagccaggcatggtgcygcatgcctgtaatcccagctactagggaggctgaggcaggagaattgcttgaacctgggaggcaagactccgtctcaaaaaaacaaaaaagaaaagaaagctgggaacatttgaaaggggagtagccaaaggtcatacccacattaaaaaaaaaagcagtttttgttcagtagtgagaataatggcctgaaaaagcagtgagaaacaggagacactgctttctctactgtaagtgcctttaacatggaagaatgagcaacttacatttttaaaggagaatcagatattagggcaatagattccattcactgggctactggacttaactatacataagaacgatctgagtagctttttgggaaaaagtcctggatctcacctccgtatcctttttttttttttgagatggagtctcactctgtcaaccagactagagtgcagtggtgtgatcttggctcactgtaacctctgcctcccaggttcaagcaattctcctgcctcagcctcccgagtagctgggattacaggtgcctgccaccacacctggctattcttttgtattttggtttcaccatgttggcaaggctggtctctaactcttgacctcaggtgatctgcacaccttggcctcccaaagtgctgggataacaggcgtgagccactgcacccagcttctcaccccagtattcttgttcagtgtatctaggatgtaattttaaaaactccttcagctgactgacatacaacccaatttgggaattccttagtaaaagaaaagaggtaaaaacagttttcagctgggtgcggtggctcacacctgtaatcccagcactttgggaggctgaggcgggcggatcactaggttaggagatccagaccatcctaacacggtgaaaccccgtatctactgaaaatacaggtgtggtggtgcatgcctgtagtccccactacgggaggctgaggcaggagaatcgcttgaacccaggaggcggaggttgccgtgagtggagatcgggccgctgcactccagcctgggcaacagtgagactgtgtctcaaaacacaacaaagaacagttttcaatgtgaaggggaaatcgttttctgttatttaataggaattgcagtaatacagaggctgggaagaaaaactgtcagtgagataataatccttagaagaggaggcagaagtgggagacagtgagaacatgaggatgtgaaaagcataaattattaattggcttgaagcttctgaacaatggaactttcctcctaagttatatcctgctggatctctctgaaatactcatgggtagttggaacctgactttttaatattttatattatctactttcctgcgtgtagcattgttttaaaatgttctatctctttaaaatatatttaaacagctttattgaagaaggtcagttttaagcaacatttccatatctggtatttgttatgcattatactaggtgctagagaaaagtcagatgcttttcttggcttaaagagcatagtccaatataggggtataggcatartatctgcctacagatgtctgtaatgtgcatcagtcattaacatgacagtccaaaaacttcaaattgtaccccattatttaatcaaagtagaaaaagtctaccaaactgtcatgacctatacattttactgtccagagacttgggggagatttctattttggtgtctaattctttgtaatctgttatactatgggaatttgtcttcttttatctaaaaccaggtggtcatgggatataatctccttctccttacccttacctctcatccccccaattgtgcacatcgtacacattgtcatctgtttttttctagggctcaggatggggttgaggcttgcttctgaattctaagtactaatgaggccaccactcaatcactgtgctaatgtacaactgtctggttccttctttcttttttttttttttttttttttgagacggagtctcgctctgtcgcccaggccggactgcggactgcagtggcgcaatctcggctcactgcaagctccgcttcccgggttcacgccattctcctgcctcagcctcccgagtagctgggactacaggcgcccgccaccgcgcccggctaattttttgtatttttagtagagacggggtttcaccttgttagccaggatggtctcgatctcctgacctcatgatccacccgcctcggcctcccaaagtgctgggattacaggcgtgagccaccgcgcccggccctggttccttctttctgcttcttatcatgaacctgaactcctaagagataggtccatagacaagtattcatataatgttaaccagttcattttttcatttaagtatagctaagtttgtgcatatatatatcattttctacgcctcttttgcaggtagtagccatggttatgtgggttccagtagtagaatatcaagaagaacacatttatgctccgctgctaccagtagtttactagacattgatccattaattttaatacatttgttggaccttaaggaccggagcagtatagaaaatttgtggggcttacagcctcgcccacctgcttcacttctgcagcccacaggtaaaataataacaatgataatttcctttttttctgtggttctctaaaagaactcttggattttcatttaagtatttcagctatgtgtggaacatggtgtatttctgtgtttttcattgtataccataaaaatgacatttatgtcaaccaaattagtttttaaattaccgttcaaaggtgatttgtgcaaaaacaaagtaaaaatgcctgcaagaaggttttttgtgacttgctactcagattttgcctgacagtttgatccatatgaaatacggttatcttctttatgaatggactttttttggtcaggcttcatgaattcccttacttccaagtggaactatatctaaattgaacgtagaaaaaggtgacttactcattctttgatgttcagtagcttaaaaatgtatgccagttggcagcactgttttctgtgcaaaggttatttgttaaatagaaattacatttgtgttactataataaaatggagatttgtatagtcaaatatgggcttttttaaactctcggggatagagtcattttggacaactaagtatttgcctttaaaagctacattttaaaaaccatttttgttggaatgctttctaaagtatagtcagtatattcaaaaatatatgccaaatatttttctaccttcttaaacaatagtattatatacatcaaatcaatgatttagaactctgattttgatgtagttttaaggcaagataactcatttttcaatcaaagtccaaggcagaacctctgtgtaaataacagagaaatagagctcttctactggtgtagggacatggagcccagattatttaggcttcttctttcctaagagccagatatacttcctgaaagtctggatcctcagcttaaaagactatcttcaggttatgaaacagttgccttttatgtgtgcgccaagtatgctttatataaagttttacttaaatgttaagtgttgtttgcaaaggcccagtgaaacagacaggttctgattctgtaggtagatatgtaagttggtttaacctttttgaaggacaattttgtagtagtttaaaaatatctatatcctttaaacttgtaatttcactttgaggagtatattccaaagagaaaacaagcagatgtttaaaaatattcaacaatacagttatagctgaataaattacagtgtaaccatgcaatggtatattttatagacaagtaaaatcgtgtttttgaaaataatcagtatcattgggaaaaatgcaaactaaatagtaagatttctgtgtaaaactagttttctgtgtaaaaacaatacaaatgagatgatctgaatttcaaatttaggtgataaaatgctggcaataatgagggcggggaaaatagtagaaagaaaaagcaagttttggatttaaacatcttgagttgggcataacagtgtgacatcaaattagaaaggaccagtagacagctaaaaattaagaactggggctgggcgcagtggctcacgcctgtaatctcaacacttrgggaggctgaggcgggtggatcacctgaggtcaggagttcgagaccagcctagccaacatggtgaaaccctgtctctactaaaaatacaaaaaattagccggccattgtggcaggtgcctgtaatcccagctacctgggaagctgaggcaggagaatggcttaaacctgggagtcggaggttgcagtgagccgagatcgtgccattgcactccagcctgggcaacgagtgaaactccatgaaaaaaaaaaatgaactggaatacagacagttatttttctggaggtgatactggataattaaaaccaagggtgtgagattgcaaaggagttttaagaatattttaaaagaagagagccaggaacataatcctgatgaatatctgtttttactgagtgtcaggaagatgagccagataaagagcttttagaaaggagaaaaaatactcatggaagccaaatgaaaatacctttcagtgaagggatgttaataaaagctagtgtgcagaaatatatgactttctttttattgaaaaggcttgcttgggtcattttttgtttgattgattgtttgtttgtttttgagacagagtctcactctgttgcccaggctggagtgctctacaattttttgtagagacaggtttcaccatgttggccaggtttgtctcaaaactcctgagctcaagtgatccacctgcctcggcctcccaaagtgtgctgggattataggcgtgagccactgcacgtggcctgcttgggctttgatgtttatttttttctgtgtatttatttaacacatatttagtgaacatttgtcagattaacttcatgttcttaaccatgtaaaggagtactgtaaaaggtatcaggtaatctagttgaaccagattttaaggtacatatagtggtaagtagaactagagtcatgttgggtccattctatgaaaggacttgcatgctagccggaggaatttattcatactaggcatggagagctattgttttattttagaagtggttagattcaaaccgtatttcagaaagctgacagttctgagaaaattatcagaaatggaagttctaataaaaaaatttttttttgtacagatagggtgtcactatgctcccctggctgatcttgaacttctggcctcaagcgattctctcacctcagcctcctgaagtgctgggattacaggcataagccactgcacctggccagaaatatgtatttttaatataatgttatatatggcagatttgacaaagtatttggtttctagatttttctttgtcttttttttcaattataaacataataaaagctctgtagaaagtttcagaaaagtggagaagtttaaagaagaaagcacaaggcagtagggcagcttttaaacttttagaattaaatgtgtaattcgaacttgagtatgatgtgactcagattctaactctgaaggtgtgaataaggtaggattctttatctttattttcattaatggaatttagtgcatgttttattgttgataccacgtaaagcacgctagcttattttacacatcaaatttgcatatattcatggtacaaatgatttcattaatattaacgtttatgttaacatgacttgtcaatttctctgaagcatcatattctcgaaaagataaagaccaaaggaagcaacaggcaatgtggcgagtgccctctgatttaaagatgctaaaaagactcaaaactcaaatggcygaagttcgatgtatgaaaactgatgtaaagaatacactttcagaaataaaaagcagcagtgctgcttctggagacatgcagacaagccttttttctgctgaccaggcagctctggctgcatgtggaactgaaaactctggcagattgcaggatttgggaatggaactcctggcaaagtcatcagttgccaattgttacatacgaaactgtaagtaatatgttcccagtgtcatttctccacacgttatttgggaaactagatgactggttttttcaaaagaataatatttaaataccactcttccagtgagttaagactacaaattacatgtgacttttttcttcatccaaaattgattccgtatatttttactatataatagaactaacatttcttgattgcttactctgtatttggcaataaacaagacaaaattcttaacatcatagatcttgtattctagtagtgggaatcagacattaaaaagtgtagacaagtaagtaaagatcatttcagtgggtaaaaggtgctgtgaaggaaacaaccgaggagtgggatgggaggagcagatgagacatgttctattggggtagtcagagaaagtctctgtgaggaggcagcacttgacctgagacctgaagtttaggaaggtggcagctatttatagatctagggcaagcagtgttctgggtaaacagaacagaaactgcaaagtcactgacacaggatttattttgcgtatttgaaggattgaaggaaraccagtatggcaaagaaagcagagagaggagactagcaggagacgaagtcagagagaggtaggcagaatttagatcagggagagtcttgcaaaacctcaaaaaggagttcgagttttattatgatgtaaggaggaagcctctagagaataaaaataaggggtgtttataatctgatttacactttacaaagatgactttgcttgttgtgtggagaagggtctgaaaagggttgaggacaggaattgtgagaccagtaacagcctattacattatcttgtgtgaaatatgatggcattttctggagttacaataatggatagaggggcttgttcacagtctagcagcctttcttgactgaggttcccatctttcttagttctcttaaggatgtgctattctattctagatgcataggagggaagttaatccagtcttagatcagcagggctgagttctttctcagaaccatagttgaaaaagcctaaatagaattttaggaaagttctatttagaaagaaactaagaattatgattaagttttggcctaagcaacttaataggcagtggtatcatttattgagaagcaaatcagataagaagcaggttatggggcttgggaggaggtaagggcagaaagttgggtattcttttttaaacatgtttaatttgagacacctgctagatatcctagtaaaatgtcatagacacgtgaatggtacacaactttgaaactcagagagaggtcaatgctggatataaacagttgggagtcaatagtattttatattatttaaatccagaagactgaatagggtcaagtttggagggagtttcaatggagaagcaaaatttttgactctgtggcacttaaacatttaaagatctgataaataggagaggccagcaaaggaaattgaaagagcaatcattaaggtaggagaaaaactagaagggataatatctcaaaaatcaaaaataatgcatctcaagaagtagagtggttacccctgtgttaagtgtgttaagtatcactgagaagtgtcaaggcaagaggccaagtggcctttttaagaactattcccatggagtagtgtagcagaagagtgaatgaggtcagggaccagagcacaaatgcacaacttctttaaaagaagtttcacaatgaagtgggtagaagctggaggaggtgcggggtcaatagtttcttgttggcaggggtgtccttttttgtgtcctctccaatgtctttcatctgtgaattaaatccattttaaaattgggttgggttgtttatttgtagttgacttttaggagttctgtatatattttaaatatttatcttttatcacatatatgatttgcagatgttttctcccagtgtgtgggttgccttttccctctgtggattgtgtcatttaacatttgaagtttttaatttgaagaagcccattttatgtgtttttccttttgttccctgtgcttttggtgtcatagccaagaaaacattgcctaatccagtgtcatgaagctttctcctgttttcttccaagagttttagttcttgcttttagtcttacttttagtctttcatccattaagaattaaattttgtttatggtgtcagggaagggtctgacttgcttgcccatggatatccagttttcccagcactatttgttgaaaagacttttctttcctcattgaatggttttagcaccattgttgaaatcatttgaccatatagacgagggtttgtttctgggttctctttgtgtgtgttgtttattaaaattggctgtattaatgtttgatagtgatgtgaataatccaataaagatgggttggtgaggagataatagcaaaatatatagaattctcttaatataaggaagacaatttagtagaatgaataaaggttatgaataggccattaacataagaaatacagatgtacaataaaaatatgaaaagatattcggcctcacctgctattcaaggaaatggtatattaaaccaaatggtatattaaaaccaaaagtacagctttttgggtggactttctcaaaaagcctttgttacatrttttgcagatacagttgacccttgaacagcacaggcttgttgtactgtacaggtccacttaatattcgaatttttttcaaccagagaaagattgaaaatacagtattcgggtgatgccaaacctgcatataggagggccaactttcgtataggtgggttctgcaggtcttacggtgggacttcagtcgaggattttagtatacgcaggggtcctggaaccaacccccacatataccaagggacaactgtctcttccccattgccacctttttttcctgctaatcacagagttttaaaattttatcttagacaactgtattaataatattcatccatgaatattaataatataattaacattcatgacatgaatattaataatattataattaataatmatattcatggcaataatattcatgggtcttatttttatttggaaggctttttaactcccaggttaataaaaataacccttaatttcttctggtactttttgttttctaacttttttacatataggtcattaattcatataaagttaattttatatgatgctgtgtgaggtaaatggaatgatgtttttccccaaatgaatgaaacatgttttttgaaatatgatgcaatatgaaatccatcctttattatagaccagattcccaaacatggttctgtttttgaactcatagaggtcgaaacaactgaaattgccagtactcaagttttggacatacaaaaacgcaatttggtattgtttaacccagtatttgtcatgtcctctaccagactaacactttttttaactactgtagttttatagtttgtaatactatgataggatatgtttattctgttcttggttttcaaaatgttattggtggttcttgcacttttaatcctcctccaaagtattttgactggaattgctttacatttaaagactagtttaggggtgctgggcaccatggctcctgcctgttaatcccagcattttgggatgctgatgrgggaggatggcttcttgagcccaggagttcaacatcatatggcaagaccttaatctctacaaaaataaatttttttgataagccagtcatggtggtatgtacctgtaaccccagctacttgggaggctgaggtgggaggattacttgaggtcaggaatttgaggtgcagtgagccgtgatcgtgccactgcactccaatctgggcaacagtctctctctctctcttaaaaaaagagagactaatttgggcaattgagatcttttcagcatcaaacattcatgtctaggaatgtggtacttctctccatttattcaggtcatctgttatattcatatccttttttagaactctcagttttttccatataagttctatatatgtcttgttaaattcatttctcaatgtattatatcttaggtagctgttgtgagtggaatctctttttctctgatagtattttctaattgttactgacataaaagacaaaaatattgatttttatgtttattctgtattcaaccaatgtggcaatttttttttttttttttttttttttgatacggaatttcactcttgttgcccagcctggagtgcgatggggcgatctcggctcactgcaacctccccctcctgggttcaagtgattcttctttgtcagcctcccaagtagctgggattagaggcacatgccaccacgcccggctagtttttgtatttttagtagagacggggtttcatcatattcgtcaggctggtcttgaactcctgacctcaggtgatccacccacctcggcctcccaaagtgctgggattacaagcgtgagccaccacacctggcctggtgaatttgttttattaacagtttttcaattagttattttgattttctaagtatttatatcatcagcagataatcataatttgtttattcattttctgcttactttttgtattgcattgtctaggcaggtacctcaacagtttcttagtaacagtggtaggatttttataatttttcaactttatttaggaattcctttagtttttttctcattaaatttgaggtttgctgtatgtttcaataggtacttttttgtttttgtgtttcttttttttgagacagagtcttgctctgtcacccaggctagggtacagtagctctatctcggcttactgcaagctccgcctcctgggttcatgctattctccagcctcagcctcccgagtagctgggactacaggtgcctgccaccacgcctggctaatttttttgtattttttagtagagacggggtttcaccatgttagccaggatggtcttgatctcctgacctcgtgatctgcctgtcttggcctcccaaagattacaggcctgtttctatcaagttaaaaaagctgtgtgcaatggctcacgcctgtaatcccagcactttgggaggccaagtcgtgcagattacttgaggccaggagttcgagaccagcctggccaacatggagaaaccccatgtctactaaaaatacaaaaaaattacctgggcatgatggcatatgcctgtaatcccagctactcaggaggccaagccactagaatcgcttgaacccaggaggtggaggttgcagtgagccaagattgcgccaccacactccagcctaggtgacaagtgagactgtctcaaaaataaataaataaataaataaaaaagttaaaaggtacatccttctatttatagtaatagattctatagtatagtatagtaatatattcaatctttctctggttgaaaaaaattcgaatattaagtggacctgtacagtacaacaagcctgtgctgttcaagcgtcaactgtatctgcaaaatatgtaacaaaggctttttgagaaagttcacccaaaaagctgtacttttggttttaatataccatttggtttaatataccatttccttgaatagcaggtgaggccgaatatcttttcatatttttattgtacatctgtatttcttactaaagaaatttagtaactaaaggttactaaacctgtttagtaacaacaataccaataatggctaacatttactaagtgttaactgtgtgccagacattattctaactattctaagtcacatgcattgactcacttaatcttaacaagaagtctaagaggtaaggtaagtcaatttcattccagatttacagatgaggaaaccaaggcagcaggcattgaataatgttgctagtttcacattggtaattggcaaagccaaaaacttgaacttcagagcctatgcccttcaccctaataccaaactgcctcttttcttactacgagaatttcttttctttttaaactgaagctgtgtagaattatatcaaatgatgttttgacatttgtcaaaatgatttactattttgttccattactttgttatcataaagtaaattatattatttttctaatgttgaccattctggaaatactggaatgcatcctatttagtttgggcctatactttttttaaaaaaacactgctgtattcagtttgctaatattttacttaggatccttgactacatagtcataagtgaaatcgatctatttcattacactatccttaacccactttagttctaattctgtgcttgttttacagattaaattcagatgtttttgtccttttctatgctataaaattattttaactatatgttatttgctcctatgctgtattaaactttatgtctaataaaaagcattcataaaactagtatagtaactcagagttagaactttaacagcctttttaatttctgttggatttgttggtttcctcatatttttaatttttttaatttttaatttttgtgggtacattgtaggtatatatatttataggatatatgagatattttgatacacgcttacaatgcataataatcacatcagggtaaatggagtatccatcatctcaagcatttatcctttgtgttaaaacaatccaattgtactcttttagttattttcagaagtacaataaattattgtagactgtagtcactgttgtactaacgaatactagatcttattcattctatctaactatatttttgtacccattaaccatccccccagccacccactacactccctagcctctggtaaccattgctgtattatcttgagttcagttgttttaatttttagcccccacaaataagtgagaatgtgtgaagtttgtctttctgtgcctgatgtatttcacttaacataacgatctccagttccacccatgttgttgcaaatgacaggatctcattccttttttatggctgaatagtattccatgtgtatatgtaccacattttttttttgttttttgagatagagtctcactctgttgcccaggctggagtgcagtggtgcaatctcggctcactgcaacctctgcctcctggattcaagtcattctcctgcctcggcctcccagctagctgcgactacaggcatgcgccaccacgcccagctaatttttttgtattttttagtagagatggggtttcaccttgttggtcaggctggtctcaaactcctgacctcaaatgatccacttgagtcgggcttacaaagtgctgagattacgggcgtgagctaccacgcccaacctaacattttctttatccatttgtctgtggatcttaggttgcttccaaaccatggttattgtgaataatgctgtagtaaacatgggaatgcagatacctctttgacatactaatttgctttcttttgggtatataaccagcagtgggattgctggatcatatggtagatctatttttagtttttctgaggaacctccaaactgttttccgtagtggttttactaacttacattcccaccaatggtgtatgagagttgccttttctctacatcttcaccagcatttgttattgcctgtgttttggataaaagccattttaactgggatgagatggtatcttattgtagttttgatttgcatttctctgatgatcagtgatgttgagcactttttcatatgcctgtttgctatttgtgtgtcgtcttttaagaaatatctattcagatttttacccatttttaatcagattattgaattttttcctatagagttgtttgagatcctggtcattaatctcttgtcagatgtagttttctcatacttctgctgctacttaagtcagttactatagttttccaagaaaaactaattatatttgggtctttaaatttattgatatacagtcatttattctattttcttaaatttttaaaacttcttgtgcatatgggttgttaacttctttttcacttattttattgcttacttctgtttttttttctcctttgatttgacctgctcaagggatttgctaattttgttcatctcctcaaagaccaagttyttagatttatttcatccattgtcttttaccatttcattatatttctgcttttgtctttgttaatgcttttttttttttttttttttttttttttttgagacagagtctcgctctgtccaccaggctggagtgcagtggcgtgatcttggctcactgcaacctccgtctcttgggctcaagcacttctcctacctcagcctcctgagtagctgggattacaggtgtgtgccaccacaccgggctaatttttgtatttttagtagagatggggtttcaccatgctggccaggctggtctygaactcctgacctcaggtaatccacccactttggcctcctgaagtgctgggattactggcatgagccaccgcacccagactgttaatgcattcttttttccttaaccaataattcatttatccttttagtggagaaattggtcatcatttttcgtaagtctagaacatttatctaagtctaagaacattttcattaaccctctccctagaactccaaacccattaaaagtcgttccccatcttccccttctactatcttctggtaaccactaatctactttttccctatggatttttcttcttctggacttttttttttttgagayggagtctctccctgttrcccaggctggagcgtagtggcacaatctcggctcactgcaagctccgcttcccgggttcacgccattctcctgcctcagcctcccaagtagctgggactacaggtgtgcgccaccatgcccagctaacttttgtatttttagtagagacgaggtttcaccatgttggccaggttggtctcaatctcttgacctcatgcgccacccacctcagcctcccaaagtgctgggattacagatgtgagccactgcgcccagcctggactttttatatagactcataccatatgaggtcttctatgtctggcttatttcacttaacacagccctttcaaggttcattcatgttgtggcatatattcctttttatgtctgcatgatattttattgtatggctgtactacatactgtttatccactcattagttgatggatatttgggttgtttttactttttggctattatcagtagtgctgctatgaacgttcatgtacaagtttttgtttggacatatggttttgtttgagtatatgcttagaagtggaattaatgggttacatggcaactgtgtttaactttttgaggaactaccagtgccagactattttccaaagtagctgcatcattttatattcccagcagcagtatatgagggctccaggttttccataccgttggcaacacttattgtccctctttttttccttgcccattgcattgtcttggcatccttgtcaaaaatcagtggaccataaatataagggtttgtttctagactctcaattctgttttgatgatatatatgtgtatatggcagtaccacatagtcttgattacttagttatagtaacttttgaaatcagaagtgagtgttccatttaagattgttttgggtattgtgggtctcttacattttcaaatggattttaggattagcttgtcaatttctgcaaaaaaaaaaaaacacagctactattattttagaaattgtgttgaatcggtagatcaattttaagaatattgctttgttaacagtattaagtattctaatcagtgatgaacacaggatgtctttgctgttgtctctattttctttcaagaatgtgtggtagttttcagtggacaagtctcacatttcttttgttaaataaattcctaagtattttaattgtattttatgctattaaaaatgaaattgttttcttaacttcattctcacattgtctgctagtgcagagaaatacaataagttattttgtcttatatcctgcaaccatgctaaacctgtttattacctattaatgaattttttatttttattgttttttacaattttatttttattctttttttaaaatgtatttttaaaagagatttatttaactcacagttctgcaggctgaattcaagggcagggccctgccttctggcaatagcattcttgcttgcttatttttattgtcttcctagcttttgaatctatgcatattaggtcatatagtcccttttttccctaattaattcattttaaggccgtacattttcttttcactactggtttggccacagacattttgatttcaagtaccataattgtaatttgtttctaactcagcattgatttttctttttaatccaataatactttataatttccaaatgtttgacgggttatatatttgttaatagtttaactgcattgaaatttgtatgatttttcttaaggagctcacagataatcttttaagttaagattttacgggcggtgtgcggtggcccatgcctgtaatcccagcattttgggaggccgcggcaggtggatcacctgagttcaggtgttcgagacccagcctggccaacatgacaaaaccccgtctctactaaaaatacaaaaattagctgggcatggtggcgagtgcctgtaatctgagctactcgggaggctgaggcaggagaattgcttgaacccaggaggtggaggttgtagtgagccaagatcgctccattgcactccagcctgggcaacaagagcaagactccatctgggggaaaaaaaaaaaagattctgctctacaagcaacaagatgggaatgttttatgacaaaagtctaaaccaattggggctacagaatgttgtttatttttagacagtagagagaacagcttccatgcaaggtaagattaaaactttttctgacagactaaatagtgagttttgtgctgtagtagcctattcagaggtgttcttaaatgtctttgcagccacaaataagaagagtaattcgcccaagccagctcgatccagtgtagcaggtagtctatcacttcgaagagcagtggaccctggagaaaatagtcgttcaaagggagactgtcagactctgtctgaaggtaaatttgagggattcagaatgtacttttagtggggtaaatatttattacctgaaattgatgttatcgtggagctttagatcttgaagggcaccaaaaatgctaaagttggatttgaaagtttctttttttgaaacagggtctcactttgtcacccaggctggagtgcagtggtgcgatcttggctcaccgtggcctcgaccggtggtttaagagatcctcctgcctcagccccaccaagtagctgggactacaggtgtgcaccactacgcctagctaatttttgtattttttgtagagacaggttgcccaggctggtcttaaactcctgagctcaagcaatccgcctgcctcaacctcccaaagtgctcggattacaggaatgagccccaccacacctggctggaaagtttcttgatctcaacagaacagacccttaacaaaatacagccattagactatgtattctaaacaccttaattttatttattctttatttttgttgttttcctgagacagagtcttgctctgttttccaggctagggatgcagtggtgcaatcatagctcactgtagccttgacctcccagacaaaagtgatccttccacctcagcctcccaagtagctgggaccacagacacagacacatgcagccatacctggcttkttttttttttttttttttttttttttgccgagacagggttttgctacattgtccaggctggtcttgaacttttgggctcaaacaatcttcctgtctcagcctcccaaagtgtaaaattacaggtgtgagccacaacacttggcctggactccttaattttaaatgcttggcataaaaaacaagggatatgtttcaaaattatttttgaagtttttttttttttttttttgagatggagttttttcctctagttgcccaggctggagtgcaatggtgcgatctcggctcaccgcaacctccgcccgccgtgttcaagtgattctcctgcctcagtctcctgagtaactgggactacaagtgcacgccaccacgcctggctaatttttgtatttgtagtagagatggggtttcaccacattggccaggctggtcttgaactcctgacctcaggtgatccatccgccttagcctcccagagtgccaggattacaggcatgagccaccacacctggcctatttttgaagtttttatgtagttttaaaatgatatatatagtgagattttctaatgtaactgagagagacctttcatgtttatttgccttttttctgattatccctccttttattttattttattttattttttggagacagagtcttgctctgttgtccaggctggagtgtagcacaatctcagctcactgcaacctccgcctcccaggttcaagtgatccttgtgtttcaacctcccaagtagctgggattacaggcgcacaccaccatgcccagctaatttttgtattccatcttcctttttttgaaggctccccaggaagctctcagtctgggagcaggcacagttctccccgagccttgatacatggcagtatcggtgatattctgccaaaaactgaagaccggcagtgtaaagctttggattcagatgctgttgtggttgcagttttcagtggcttgcctgcggttgagaaaaggaggaaaatggtcaccttggggtaaattaagttgttttgtatatgtaatggtataatagctaatagctttgtttggaactttaagtatgcatcatgatgaacaaattaatttctaccttgttaattttttagtggacagaaaatacatttattgcactaaattttaacttttttaattttttttattttttttaacagagcctygctctgtcacccaggctggagtgcagtggcgtgatctcagctctctgcaacctctgcctcccsggtttaagtgattctcctgcctcagcctcccaagtagctgggattacaggtgcccgccaccacaccctgctaatttttgtatttttagtagagacgaggttttgccatgttggccaggctggtcttgaactcctgagacctcaagtgatacgcccacctcagcctcccagagtgttgggattacaggcgtgagccactgcacctggcctaaattttaacttttttaaagtatcagagattttacttttttttttttaatgggatgagatagtactttttttttttttgagatggagtctcgctctgttgcccaggctggagtgcagtggcatgatctcagctcactgcacgctccgcctcccaggttcatgccattctcctacctcagcctctccaagtagccaggactacaggcgcccaccaccacgcccagctgatttttttttttttttggtatttttagtagagatggggtttcaccatggtctcaagagatagtactttttttaatgggatgaaatagtaccggaagtttagtttaaatatgttagagctcattttcacaatgatacgtaaccttatctgaactctgccttgtaaatttgtatgtgttggcggtaggggggcggtcagccttttttttttttttcagtctatcctacacttgtcaaagatgttagtgttgggctatattatgtgtcacaggcatttatatatattttgtatgaaacaaagcacttacagcaactttaacactgcttttctgcttttatctcatctttcttctctcctgttatcaaagtatcctcaaaacttatagttggaatttcccaaaaagatatatagtagttaacacgtttatctctcccctaggagacataaactcaaatccccggcatggcaattaaacttccatctattcaaaagatagagtgattatggatattggctatggatgtggcagatgattagccattaatatccatctgcttatctattttatggatattaaacctatttctaaatttaaacaatgaaatagttctattttggagaccctgaaaagaattttacctaaattggagaaagattaacaccctttaagtttacttaattttatatagtcaaggtctggctcattaccaaaactacaagatcagctggtggtttagctttctggctcaagtttcagtagtagaaaggtgttaaaatcactggagattatcttgtcttccctacgtactacctaacctgatgttttatacatttcttcaaattaaagtgcaactagctcttatattttatttgctatggagatatttttatctgcctttagtcaccacaattaaatatacatgaacttagtttttttttttctagagtgtaaaatcctgtgcaagtgtgtgcagcttgatcctcattttgcagttgattttatctgccagcctggttcatgtaggtgctgtccagctcatgtctttttttttcctgcctgatttaaagtagtgtaagcaaaaagtttaaatactaatgaaaggctgggcacagtggcacacacctgtaatcccagcacttttggaggctgaggtgggaagatggcctgagcccaggagtttgagaacaccctaggcaacatagcaagaccttgcctctgtttattttttaaataaaaataaatattaaatactaatgataagtgtttcaaaatgaaaggagaaaagaataagtgaaaaatttcccatccttaactcccatgacctagttttccaaccccctgcccacacatattcatgctgttattaatttttcatgtgtgctgtgtcttctcagtttttgtgtatatttaaggaactgtgactatgtagcttttttaatacagaagatgtactttattttctcattcaataatatctctcaggccaggcacggtggctcacacctgtaaccccagcactttgggaagctgaggtgggcagatcacttgagatcaggagttcgagccagcctggccatcatggtgaaacactgtctctactaaaaacaaagtacaaaaattgccgggcgtggtgctggacacctgtaatcccagctacttgggaggctgaggcaggagaatcgcttgagcccaggaggcagcggttgcagtgagctgagatcacatcactgcactctagcctgggtgacagagtgagactctatctcaaataatagcaataataatatatctcaaaagtctttccctattagaacatattatttaaaacttctattggtatttataagttaaaattttattgagctaattataggttcacattcagttgtaagaaataatgcagagagatcctgtgtatttttctcccctaatgataacattttgcaaaactgtagtacaatatcacaaccaggataccaacattgatgtaatccaccatttcataacatttttttgtgaatatttagtgaaaaaaaaattttttttttttttgagacagagtctcactctgttgcccaggctggagtgcaatggtgcaacctcggctcactgcaacctccacgtcccgggttcaagaaattctctgcctcagcctcccgagtagctgggattacaggcgcccaccaccatatctggctaatttttgtatttttagtggagatggggtttcaccatcttggccaggctggtcttgaactcctacctcaggtgatccacccaccttggcctcccaaagtgctgggattacaggcataagccactgtgccaggaccttagtgaaatattttcagataaaatttgaaatttagtattaagcaccagagcacgtaccctacttagtttggtgctcagttcaaaaagaaaatatagattattgtgtcactagttatagagaaatatcaagttgttttcttctttgagggctaatgctaaaggaggtcatctggaaggactgcagatgactgatttggaaaataattctgaaactggagagttacagcctgtactacctgaaggagcttcagctgcccctgaagaaggtaaggaatgataaacttataagtaagcaggaaatgagaattctgtcccttttttggtggtgggtggtgggtggtgkgtggtggtggtggtggtggtgstgstgstgctgctgctgctggtggtrgtgatagggatagggagtggttggtttaatggaaatgttactgagatctgctattcgacatgcttgatctgaacacaacattccttgtgccactgaatttgatttgctaagataccaaatacagaggaaggcaaaatgggtaagttactatataaaaggacaggccttactagaacaggcatttgtatggggaaaaaatctgcatatagttcatctgttcggtcaataaatatgttaaggcacctacataccaggcatcgaatttttgctagatttattaatacaaagttgaattagatatgttcacaatctaatggggaagatatgccctagaacaactaattagaatagtaaatgttaagtattttttaaagtcagtcttaattagtgtctgtagattgctttattcttcttaaagaagcattccaagttttgaccattttttaaatcctgtatgatgactgacttcagcttgttctcagctgtactttctagtgtttcttttgcatgttcttccaagttcattattgtttatctaaaagcatagaagacattttgcaatttggggcaacagaggtgcttagaacaaggctatgtgtattgcccttgctgtgtcctttataaattggtagaaaagaatgtcaactctcttaatgatatttggccttgtaattttttcatttcttagtgaaactccaccaccttccacctctgcactcatttgaatttcaatgattgatgaattgtagctcaaagcatacatacaggtgccagcatctactcagctgccctaagaagagggtgtgtaggtggtggcattttcaggtttctcagttaaagaacactaaatattttggttttcttaattggtgcttctgtgatgggcagcattatttcagtagaagagattaaatagaaaagatttttgtaaatgatgtgtttattgttaaaacatcaagaaagaaatattatgattgaagatctttatagaatgggcctgtggggaatactttctttttctgttgttttttttttttccccgagacggagtctagctctgttgcccagtctggagtgcagtggcacagtcttggctcactgcagcctccaactcccgggttcaagcgattctcctgcctcagcctctgcatagctgggattacaggcgcttgccaacacacctggctaatttttgtatttttagtaagagacgggatttcactgtgttggccaggctggtcttgaactcctgacctcgtgaaccactcgcctcagcctcccaaagtgctaggattacaggcgtgagccaccaaggccggccggggaatagttactttctatgtgtctccatacatactggattgtagtagcttaaattactacagaatatgctggaattacaagctcatttttcttccaccaagcgcagtggctcatgcctgtaatcccagtactttgggaggctgaggcaggcggatcacttgaagtcaggagttcgagaccagcctggcaaacatagtgacacctcatctctactaaatatagaaatattagccagatgtggtagcagacacctgtaatcccagctacttgggaggctgaggcaggagaattgcttgaactgggaggcagaggttgcagtgagctgagatcacgccactgcactccagcctggacgacagagtgagactctatctcaaatgacagtaataacaagctcatttttttcatgcaacatttatgaaatgcttctaatttaccggatgttgcatttgatgccagtgataaaattcctgaacttactatctagttcagactttctccacctttgcaccattgccatttaggccacataattctttattttacagggactgttctctgcactgtggaatgtttagcagcatcctcagctgttaaccactagataccagtagtgtttccctccggttacaacaaccaaaaatgtctctagtcattgccacatgtttcctgggaggcaaaatcatccccagtcaagaaccaatagttgaactaaataattctcaaccagaggtgaccactccttgagaatcacttgccagagtgggccacagttattaatagaaataagttgtagctctcaggtatgctaggtatgtgtggtggtattggtaggagggcggcaaggagagcagttgaaaaccaattgttaggtgtcaggggagactaatagccagttgtaatataggacgatgagtgctgtgataaggtttataggcagctcaaaaatgagatacgtaataaaaataatagtaatactaagttcttactgtgttaaagactttaccagtattctgttattctcagaataactctacatggtagttgcttttgttaacctagttttacaggtgagtaagctgaggcctggagatgtaatttaccttacccaaagtcacagggttagaaattggaaggccagggccgggcgcagtggctcatgcctgtagtcccaacactttgggaggccaaggagggtggatcacctgagttcagaagttcaagaccagcctggtcaacatggtgaaaccccatctttactaaatatacaaaaattagcygagtgtggtggcgggcacctgtaatcccatctacttgggaggctgaggcaggagaatcgcttgaacccgggaggcggaggttacagtgagctgagatcgcaccattgcgctccagcctgggcaacaagagtgaaacttcgtctcaaaaaaaaaaaaaaaaaaagaaaagaaattggaaggttgggcatgttggctaatgcctgtaatcccagcactttgggaaggccgaggtgggcagatcacctgaggtcaggagtttgagaccagcctggccaacatggtgaaaccccatctctactaaaaatagaaaaatcagccaggcatggtggcacactcctataatcccagctactcgagaggctgaggcaggagaatcacttgaaccaaggaggcagaggttgcaatgagctgagattgtggccattgcactccagcctgggtgacagagcgagactctgtctcaaaaaaaagaagaaaagaaaaaaaagaacttgraagagctagaatttgaacctagagccagtgctcttaactgtcgcctctctctgctaacctagtccctaatccacccttggaaagatcatcctaagggatgagtaggagttagccagatgaagactggtgaaaggccagaagggagacagaccagaggccagatcatgaagagttacgtggaatgtcccagctagaatttgaactttgtcatttgaataggatctaagttagaagtgacactttaacatttctactctagctgcattctggagaatggatttgggggtgggaatagcatatgtggaactagaggcaggaaaattggtaagaagcatggttaggtgaaatgatttggacttctttatttttaattttttatagagacttggtcttgctgtatgctcagactggtcttaaactcctgggctcaaatgatccttctgcctcagcttcccaaagtgctgggttacagacatgagccaccacacccggccgcccgatttggacttaatttcagcctccaatttatcaatttacattatctcagcactaatttttatatataaaatggctggtcagcacagaaaacactggaactttttgacaccagtttcatttcttatttaaagctaattgacagcttgtcctaaactgaagaaaggcatttgcttggccatagtgaagatcggtacattttccaagtctttgaaagaatggagttattcatgtaggatttagagttaaatggtcagtgttattcagtaacacattttatctttatatgtggggtgttgtgctataaatagcacctagaactcaataagaaaaattgctgtgaatgtgcaaatcaacagggacacagaagtacacccttgtaatttgttggtatctgaacagcttgtttacctccagagtcccaggatagactgtgagaaggagactaactgatgaggctgagagaaggtagtacaggagacaaaggaagccctgtgcctcctgtaatcagctttgtttctcgaggagagtgcggccttgctcactgttgccagtattattctatcatcagcaagagcaagttctcaggaaacccttatatacctataagccttagtagacagttgaatggatttgtcttgtatccatgcttaggaaaaacaagactctttattttagctgaatacaaaaagaagacattcggtgtcatatcactgtggggttctctctctttctcaaagagaaggttgtctggaggactttaaggcgttgtttgtggtactggctgggaatttgggactactaaagtgtctcttaattgctcttaagcatcagtttaaaaataacttttttcttagatatgaacataaataggccttttcctttttactggaaccatatgggacaacctttggttgtattagtcgctggtttaatgatctgatgctgaaaaggttgacttattttttctttcaattgatgacctgcacaactgtaggtaggccagtttatttcttgttctttgtaaaactaaaggctttgctctctgacttcttgctgaagtagcacatacccccttcagttaaatcaggggtactcaaaacaccatctggggaaaagccttggcatgcctgttaaaaaccttgctggtggcctctttaagaggaatacaaagcctgatggcctgccattgctgatcatttagggtaattattaagatgcctttaacaaaattcatcgaaaaattaactgacttgaacaaaaaggaaaattaactcttttacattaacaaatctctcaataagaaggtacacctgtggtagagcagttttcaggattagaaaattcagctgctcagtgtcatcaggaacgtgtgtgtgtgtgtgggtgggtgggggtggggtggttttagtgtgtgtgtgtgtgtgtgtgtgtgtgtgtgtgtgtgtgtgtgtgtgttggagggtgggggtggggttgttttatcttttgccctgctattctgagtgagaggcttagctcttctcagggcggtaagatgtttgctgcagttctagacatcagagtcagaacagcattctgggagtggaagaggattgatttattctatatatctccagcaacaacctttctctaagcacctcaacaacttcctcttctatctcgtcagccactgtcaaggaaagtggccaagtccagttatttatttatttatttatttattttttggagacagagtgttgctctgtcgcccaggctggagtgcagtggtgcaatcttgactcactgttacctccacctcccaggttcaagcgattctcctgcctcagcctcccaagtagctgggattacaggcatctgctgccatgcccggctaatttttgtatttttagtagagacggggttttgccatgttagccaggctggtctcgaactcctgacctcgggcaatctgcctgccttggccacccaaagtgctgggattataggcatgagccaccgcgcacccagccagccaagtccagttagttggtctccctcaccaactcgttccacatggatatgtggtaagggaaaatacctgaacaatatcagggtcctcttcgaaaggagaaaggcagataaattgttggtgactagaatataaagtgtcatctgtaccaggtggttaatgtattttccatagcatctgaaattcgagcaacttgatttaagggagttataactcaagttagctttactgagcacatacatagtaggtgctcaaaaaatatggtagatgattgacagagtaataagatgcagatttcttttgcgttaacaatctctgaagctccttacaattaatagtatcttgtaattgctatcattgacgtccagccatttgtctttttctttacattcacaaaggtaggaaacttccagatcttagtgcttgataaaagaccaggcgttttcatgcaggaatttcttcctagcatttcttgggaaatgtgtgttttttttgaattctgaaaaaaattagtcaagaagtttaataaatggaaaacattattctaattgtcttattagaattaattttaacaacacagaaacattactgatttgaaggaatctacttagggcaagttgaaagtaaaaactggaaatactgatacctggaatcaaaggttaaggtcaacaggagctccttggaaagaagtgattacaaatcagtcctcattataaatatcgccgttttatgtgtgttcatggccctgtctgctgctaagtaaataataatgagtttacacatggtatacttaataaaaattgattggtgttccaagaaagattttgaagcaaaatccttatattggcatttttattaacatgtgattctgcatagtactgtaaaccttgctgagttctaaacgtgacattattcacatactacccagtaatacccacatgcagtctagcatttgaatattcactataggcctcagctcttacaaatactaattaaatgatttgttttaaagatacacatgtaggctggatgcggtggctcacacctataatcccagcactttgggaggccgaagcgggtagatcacaaggtcaggagttcgagaccagcttggccagtatggtgaaacacatctctactaaaaatacaaaaaaattagctgggtgtggtggcacatgcctgtaatcccagctacttgggaggctgagacaggagaattgcttgaacctgggaggtggaggttgcagtaggctgagatcacgcagtggcacgccaacctgggtgacagagtgagacgccgtctcaaaaaaaaaagatacacatgtaatgaatagagtttgaaaaatgtatttaataacttttttaaaagaataatgtagatttggggaattccagagaattccaattcattgtttttgaatcctgaaggttggtatttgtcgggaattcagaaacactactaataagaggtcaaatttgtgccttgaagttcaactcagtgtgttttagtgttttcagcaacagttccatgaagggccacaaggtggaggtggtgcttcacagaactagctagttttggcctctttaaccgtctctgctctttttctttttcccctacttcataaaattgttgtaaactcttcactcttttagaacaggaaagtttgtttttttgtttttttgttttgctgaagatggagacgatttctaaatatttaaggctgaaataatgctaaccaaactcttcttaaaaagagaaaaggaagagtgtaccactgaagccatgtggggccacagttgcctttgttggaagctttttaaactagagcagattttatttctttaagagttaaaatacccatcgatttttccttgagtaacctttggtagtttgtacctaggaaagaatttgctcatttcatctgtttttggtttcatgagcatacagttactkatagcattttattatattttactgtttatagaacctgtagttgatgtcctctttcattcctgatattggaaattttgtttgctctctttttgttagtgaatctacctagaggcttttttaactttatcgatcttttcaaagaaacaccattttgtttcattgtggtttttttgtttttctgctgattttattatgttttttattatttccttccttttacttgctttgagtttaatttcctttttctagtttcttaaagtagtagtttagattattgatttgagatattttctcttctaatataaatacttaatgtcatacctttccttttaagcactgctatagtcacatcccacaaattttgatatgttttatttgtatttaattcagaatgttttttataattctacaaaattttcaacttttttccttttatctattgtctctcctttgttatttttgctatctctatggcattctatttgacacaatttagaccagtccctttatccccttcattcttaattcttccttccttcctctgtccctcagggtcttgtgttctgttacctaggctggagtacagtggtacaatcatagctcactgcaggcttgaactcctgggctcaagtgggcctccctcctcagcctccctagtagctaggacaattacaggtgcacaccaatgtgtgcctggctaatttttaaatttttttttttttttttttttttttatagagatggggctttgctaagttgcccaggctagtcccaaactcctgggctcaagcgatcctcctgcctcagcctttcaagtagctgggactacaggcatgtgccaccaggcctggctgatgagcattttatctagctttaaagcccttaaataattccagacatctgtgtcatctcatcattgatgtttgttggttgtctttcctggtttttcatatgctgaataatttggggttgtatcctgaacattttcattaggtttttttttttttttttaataagactctgggtcttgttttaatctgccagttttgctgtcattcaaattcagtcttcatcagtatgcctgtttctatttacttttcaaagtaaataactatgaatatccttaaataactacactacccatctctccaggttttattgctactttcagtggaaaagatagagtggaatgtgcttgctccattgtacctaraaccttccttccagagaggattttacttttgctttattcaaataacactagctcctgaacaatttttatgttaatttcttaaaatttgaacctcaaccttaaatcccaaaccgaaattaggcacataaatcttactttgaattttgaggtaagacttttttccccctcttcagagcccagtaraaacagacaaaattccttgctgttttcctatgccagtaggcagacatttttctagtctgttctttcaataggaattttagcattggccaggcatggtggctcatgcctgtaatgccaccactttaggaggccaaagcgggtgaatcacttyagctcaggagttgaagaccagtctgggcaacatggcgaaatcccatgtctactaacaaattacaaaaattagccaggtgtgatggcacaggcctgttgggaggctgaggtgggaggatcatctgagccctgggaggtcaaggctgtggtaagccatgattgcaccactgtactccagcctgggtaacagagtgagaccctgtctcaagaaaacaaacaaaaattttaacattatgcagggggtggagttttagtctcacttttaattccctttctgtggggggttcatttttctatcccaaggcagtgtttaaaaatcctcacaggaagctctccagggcaactgtggtccctgacccactaatgaaagttccttatctttctttgtttctgacactgtggatttcctttctgccttttaatgtgcttgttcattaaaataatgttttacatttatattttatcttgctatttgtaaggatttgtagcagaaagattttcaggttttcttgattgctatcttgctgaaacaaatactttttatagaattattcttttaaaaatcaactgatgtggccaggcacagtgacctgtaatcccagcactgtaagaggctaaagtgggaggatctcttctcaagcccaggatttcaagaccagcctgggcaacatattatagcaagaccctgtccctccaaaaaatttttaaattagcagggcatggtgtcatrtacctgtggacctatctacttgggaggctaaggcggaagtatcccttgagcttaggagtttgaggctgcagtgagctatgatcaggccactgcagcccagcctagggtgacagagcgagaccctgtctctcaaaaaataaaaataaatacaaatcaaccgacatacacaaaaaaattagatgcccaattagaatacaaactattattagaattgccagaatttctaatattcatacaccatgtggatttgtataacacatttatatttatgttttaggctagggaatataattatgtctataatgaatcaggattaaaagagttcctgttatctcttgtgactgaaaaaaaaacagtgtttgatttggaaaaaagtattatcagtataataaaattaatgctggtttcaaataataactttcaggtactatggaaagggcaattttaaactttgagaacagaaataaaaccactctaaatagctaaagagaatcgaggtttgtgcggttacttttgtctttgttttgttagtgtttagtttgttgaattcttggcattccatgtaaaattcaataggaatctcagtttagcagatacggagatttctgtttccttttacttacagtggtttcttttcagaaacatgttctccttccttcctgccaggaatgagtagcgacagtgacattgaatgtgacactgagaatgaggagcaggaagagcataccagtgtgggcgggtttcacgactccttcatggtcatgacacagcccccggatgaaggtgcagcacatgatgtcattttacacagattactaaaaccaccgctgccgcttctctttcttcttctkctgctgctgctacttctactttttccgctctactgcttttgcttcttctgcttctacttctttttttttttttttaattattgtcatttgtgagacaacattctttggttaactattatggtgagtactaaaaaaacacagccagtaatatttggcttggttgcacctaatgagtgctacttactgggcagagacggggtccacaacctgcttttgtatagtctgtgacctgagaatggtttttactttgtaaagagtctttaaaaaccaagcaaaagaaacaaagaagaattttctttgtgggttttttttttctttttttttttttttgccccgagatggagtcttgttctgtcacccaggatggagtgctgtggcgtgatcttggctcactgcaacctccgcctcctgggttcaagcgattctcctgcctcagcctcctgagtagctgggattacaggtatacaccaccacgcctggctaatgtttttgtatttttagtagagatggagtttcaccatgttggccaggctggtctcgaactcttgacctcgtgatccacctgccttggcctcccaaagtcctggtattacaggcgtgagccaccgtgcccagcccaaagaagaattttcaagagagtccatttgtggcctacaatgcctaaatatttacccttcataggaaatgattgccaatccctggggagatttcagatgtttgggttttttttccttttctagcctactgtaagataactttaaccttttaaaataaaaataacttagaaatacatgcagattatgaaataatttttattccctcctacccccaaaaaagttattaggaaaaaaacaagagaaacctactattaatattttcccttgttttcttctgtcttatttgcattgcatttcttcttcttttttttttagacagagtcttgctctgtctcccaagctgaagtgcagtggcacaatctcagctcactgcaacttctgcctcctgggttcaagcaattctcccacctcagcctcctgaatagctgggactacaggcatgtgccaccacatccagctagtttttgtaatttttagtagagacagggtttcaccatgttggccagcctggtctcgaactcctgacctcaggtgatctgcccaccttggcctcccaaagtactggggttacaggtgtgagctaccatgccagccctacctaaatattttataaatagttttttattctgcttttttcacttaaatatatttgtatgttatttaaaatttcataaacttcattttttatggcaacctaatattctatcatgtggatataccataagtattctgctgtcaagcagttttctggaatacagattaatcagtaaaaggatatactgtcaagttagagaaatacacatttaaagttacccagaggccttaataatcaatctgaacattcctctgcaagatatcctggagtgacaacattgttaagcctatgccattttctgctttatattttgcatattttcctggtgctctggtatctttttcaatacagaaccaagcatttgatgatttgtaagtattaaggcatctttagtaacttcctctgcttctaaaataagcatccaaattttgtgcaagttatttggagtgctggtgggtttttgtagtgatacttgaatgcgtagtttaattggctttgaaatatgttttatgtttataaggtcttgaatcttgagaatatacaccattgcttcttgttccctttttaagctgtccccagattgtccccaggaggacaaaatgagacaattcctgtcatcttttaattgtgggtgtctattacacattttgtttttttctcctttatttttcctttgtgtttgcttatacctgactcagatcacaaattctctgaagacagagatttgttcacaacccagcacatctttatcacttaaataacacatttggtaagattatttaaagwcttgggaaggaaaatactgcccttgttatatgcttttaaattttaaattttttatttattttttaatcatagatacacattccagttttcctgatggtgaacaaataggccctgaagatctcagcttcaatacagatgaaaatagtggaaggtaattgccaaatcaagagaactgacttgcaagctaccttgaccctgaattttgctgtagttggtgctcaaatttgtcatcagtcagataatcagatttggtcttatttcttcattatctcgacctgaaatagtaatttggaaactgttggaaggtggcacagtttagtctaagacagcagtagtacatgggaaaaacagtatgggaagagttctttgtaatgtaaggaaataacaatgtagttctctattaatttagcaaatttgtacattcacaaaaggcagtttgtctactacagcagaaggctggttaactgccagaaaatgtacctccaggccctgcatgccgtcagtaacccgcccggcattggtgctctactgtctttggctagagcttagttgtgtttaaataatcatctttatatttggggttttaattacagttccattagtgcctgtagattagtgaacagaaaattgctttggaagagattctgccctgtagacactatgtgaataactgaagtaacactagactgaatctcctttttggagtatgtatcttctctcacttgttcaagtacaggcacactgttcaaccgcatggtatctttctgttgtgtgacttctacaaatgttattttaaatgaaattaagttaacatggattcattacgttcctggccctgtagacacgtgtaagattatttaaaattctttcatttttttctgcctcttactatacgactgtagtgcaacaaatattttaaagcccccttttcttctttattttcattagttgtacattgatttcagtgtcaacacatttaaagattcattcatgttgcacagtggcttacatgaacgtgaaactgtgatataaggttttctttcatactcataattagcccaaaacagttgccaaactttgccattgtgctcctgcatttgtgtttgagctgctatrtatttgtggaaattacactgaaagttgactaagagactattgaaaaagcatgaataattaaatrtacatgtgagagacatctcatctgctgtattttacttagtgaatattgttcactcttcygtgtctgatgtcttgctgaatgctgtgactcatagtttacttttgttcaaaatagtttgcactttttgttaataaaatcaacttgagaaaatatgcctctgctgtttattaaattgggaccagaaaccccttcttttctactcattgcctcattagtagtgtagagaagatccaaacatttgattagtttgtgtttagtctaatggcgaggagtgatgcctagcatcgatcccagtcattctaaaattagaataaacctgaaaggccaaaagatttcttcagagatgatagcttttagttcagacctgtttgcttttaggacaggaaagtagtttccccctcgtttccaagccaycttatatactaaagctgctctgagttccttggtgatgtcgggaacaccgctgttttccctcttccttgatgtagtctgctatgctaaattttaggtagcagagagggaaggaagaggcacaggagaagaaccagttgctccactctctgcttgtcctactttcttgctctttctgtaccctgatagagccctcagcatgtttttttatttttatttttgtaacctttccttttttgctgaagaacagtctgctgttaccttgcttctgtatttagtattttatctcaagttcattcctggaaaatctctcctgaatagagttttcttagggctagagatacattaatgcttgtgttgtctgtgaacgtgtcctttctggacaactttaactacttgtgtcattgatctttaagtaacctttgaggtagatgagttgtgtatcaaacctgtttggccatggagccttaggttcagggaggttgtatgattctcttcaggttcaaaaccactggcagggatggggtgaactgctggtctagtgccttttccactttatctcacttgcagcagacccaacattctgatacctaataatttaaaacctaaagattattctttttttttagcttttaattttgagataatttcaggtttgcaaaagagttgaaaaaattgtgcaagagtttccgtataccctctgcccagcttctccttttgttaatgccttacataatcacagaacagtgatcaaaactaagaagttaatcctggttgcaatattgtttaccaaactacagaatttgttcagatcgcaccagttatttcacaaatgttctttttctgttctaggatccggtctaggatcccacattgtattttgttaccatgtttcctcaggatccttcagtatatgacagctcttccgcctttccttgctttcatgaccttgatatttttgaagaggatgtgttattttattaaatgttcttcttatttgggtttgacagatgctttcctatattaaattgaggttatgcattattgggaaggcccttagtgcatcacatcaggggggatatgatgttgatatataaatatacatatatatacatacatacacacacacacacacacacacacacacatatatatatactttttttttttttttgatggagtctcactctgttgctcaggctagaatgcagtggcaccagcttggctcactgcagcctctgcttcccaggctcaagtgatcctcccacctaagcctcctgagtaggtgtccaccaacacacctggctaatttttctattttttgtggagatggggtttcactccaggctggcctccaactcctgagctcaaagtgatccccctgcctcagcctcccaaagtggtaggttgattgcaggctagattgcaggtgcgatgctggcctgatactgatttttttttttttttttttgagacaggttctcactctgtcggccaggctggagtgcagtggcatgatctcagctgactgcaacctctgcctccctgattcaagccattctcctgcttcagcctcccaaatagctgggattacaggcatgcaccaccacgcccggctaatttttgtattttagtagagatggggtttcaccatgttggctaggctggtctcgaactctgacatcaagtgatccacccgcctcggcctcccaaagtgctggattagaagcatgagccactgtgcccgcccagccctgatgttgatacttttttattggtgaacttaaccttgagattacttggttaagatggtgtctgtgaggatttcctactatagatttacgttttccccctttgtaattactaaatatttggggcagatactttgaaactatgcagataccttgtttctattaattattattattatttttttttggaagacagggtctggctttgttacccatgctgtagtggtgcgatgttggctcatacagcctcaaccccctgggcttaagcgatcctcccacttcagcctcctaagtagctgggactacaggcatgcgcagtcacactgggataatttttgtattttttatagagatggagttcttgagttcttgggttcaagtgaccctcccgtctcagcctccaaaagtgctgcgatagaggcatgtgccactgcgcccagccaaaactcttgcttacgaattttagcacctagtagtcgatcttgcctatgggaattattactgtaatgttttaatggtacttttctaattcactaatttcttctatgttttttgttagaatgctgtgaggaaaagtcccttcttccccatttttgtaatttcagctacttatttatatcagctactttatatatctatatatgatggatatttatttttgagttatgactcaatactgttaatattttgtagcttggcttgttctaattttagccattggaaactcttccagattggctcctgtgcccttttcatatgtctcattcttctttttttttttttttaagcatttctttgctttctgacatcacaagatgcctaccccagccatggaattaaccacttcctgaggaaccatggttctttttattggagaatgctatctagaaacaaagatttggatgccacatatttattattattagactgtcactgcttctagtcccactcaatggatagatagaaaatgtaaattggctgggtgtggtggtgcacacctgtggtcccggctacttgggaggctgaggtgggaggatcacttgagcttgggaggtagaggttgcagtgagccaaaatcgtgctactgcatttcagcctgcgtgacagagtgagacactgtctcaaaaaaaagaaaatgtatggccgggcacagtggctcatgcctgtaatcccagtactttgggaggctgaggcaggtggatcacctgaggtcgggagttcgagaccaacctgaccaacatggagaaaccccatctgtactaaaaatacaaaattagctggctgtgatggcgcatgcctgtaatcccagctactcgggaggctgaggcaggagaatcgcttaaacccgtgaggcggaggttgcagtgagccgagatcgtgccatttgcactccagcctgggcaacaagagcgaaactctgtctcaaaaaaaaaaaaaaagaaagaaagaaaatgtatatagacagctgttccttagcatctgtgagggattggttccaagactccctgtggataccaaagtccacagatgctcaagtcccctatataaaacggtatagtgtttgcatataacctgtgcacatcctcctggatactttgttttgggttttgagacggtctcattctgttgcccaggctagggtgcagctgtgcatagctcactgcagctatgaagtcttaggctcaagcaatcctcccacctcagcctctcaggtagctgggactacaggtgtgagccaccacgcctgatctcccagatactttaaatcatctctggattacctgtaatacctaatacaatgtaaatgctatgtaaattattgtgctattttttttattattttttaaaaataaattctgtctattgttggttgactccatggatgcagaaaccaaagataatagagggctgactgtatagttaactcatgcaaatacacacatttatgtgtatttctgtacatatctgtgtgtgtgtgtcactatgactgtgagtctatattggtaacagttcagctccagaggcctcattctggccttccctcttatttataatgcctttctctgacagaagcctagctctcattagctacaatatatgtatgtacttgttcaaccctaatatacaagtagcttcagaaccgttggcctcctgtggattccaggctatgccctacaaaaaacagatttaccacctaaaatacagtgcttgtatacagttcttttagtctttagcttttcagtattgtgtcataacatttttttcaaagatatttaggttcaaaattacattagttctgttctttcacaaaatcccttcattgtgattttgtgcttcgttggtgtaacaggttcatctgttatggtctacattctgtcctcccccacatatcctggttaatttgtaaatttacatacattaaaattcagtctttctggcatacagttctgtgggtttcaacaaatgtcttgtatccgccaccacaatactatacagaacatttcagtcacccccaagattcccctgtgctggccctttataggtaaccaccccccttccccacagctcctggctaccgctgatctgatctgatctgatctgttctctgcccttttagtttttgcttttccagagtcatgtaaacgggatcacagtttgacctctcgcttcgcaaagtgcagttaagtttcactcatcttgtgtgaatcagcacctccttcttttttattgctgagcagtagtagtccactgtgtggatataccactgttcattcatttgcccatttgggttatttctagtttagggtgattagactcttgtaaacgtttgggtacagatttttgtgtgagtgtaagcttttattctctagagtgttacatgctgtattagtctgttttcatgctgctgataaagatatacccgagactgggcattttacaaaagaaagaggtttattggacttacagttccacgtggctggggaggcctcacaatcatggcaaaaggtaaaaggcacatctcatgtggtggcagacgagagcttgtgcagggaaactcccccttataaaaccatcagatctcatgaggcttattcagtattacaaaaacagcacaggaaagtcttgcccccatgattcaattacctcccactgggtccctcccatgatatgtgggaattcaagatgagatttgggtggggacacagccaaaccatatatgcctagggacaggattgctgggtgtgcaatagagaatttgtctggcctttgtcctagttcctgggaagtgccctctaaatccttggcattcctcaagtgttaggagttatttatggtgggccttgctagtgtatgctaatgagatgactcaggatcggggctggctacaccagaaatgctgtgggtgtcattagacagttggagctctgaaccatgtgatagcccagttcaactcattgccaatgattgttatgcctacataaggaagttccagtaaaaaatctggacacctgccgggcacagtggctcacgcctgtaatcccagcactttgggaggccgaggaaggcagattacctgaggtcgggagttcgagaccagcctgaccaacatggagaaaccctatctttactaaaaatacaaaactagccaggcgtggtggcgcatgcctgtaatcccaactacttgggagactgaggcagaagaatcacttgaacccgggaggtggaggttgccrtgaaccaagattgtgccatcgcactccagcctgggcaaaaagagtgaaactccgtctcaaaactggacactaaagcttgagtgagtttccctggttgacagtactctgtatttatatatatatatatatatttacatatgtatttatatatatataaatatatataaatataaatatatatatatttatatttatatatatatatcagtgtgcctggagagtaagttgtcctgaagtcaaggggccttcacatttgggcctctcccaggcctcaccctatgtatctctccctttagctggctttatttgtaaccttttgtcataatgaaactctgatcataagtgcatttctgagttctgtgagttgttctagtcaattattaaacatgagtaggatagcaaatacgcccaaatttgtaatcagctgatcagaagtgagggtggcctcaggatcccggaacttggagcttgtgtctggaatgagggcagtcttgtggaagactttgcccataacctgtacagtttgacctaactccgggtggttggtgtcagcactcattgcactgagtcatatggtaagtagagtctttactgagacgctgcccaacctccacagtgacataccattctgcattcccatcagtagcacatgagagttccagtggcatctcacaaatatttggcactgccagaagttttttagccattctttttggtttttcttctaaccaactgagctaaccagccattttttagccattctaataggtgtgtaatggtatttgttttgctaatattttgccagaacttttccatctatattcagagcgatcctggtctgaaattttctgtcgtcatctgatttggtgtcagagtaatgctgacctcataaaatgagtgttctattttctggaaaagagggtgtagaattggtggtatttatttattattactttttttttatctcggctcactggaacctccacctcccaggttgaagcgattctcctgtctcagccttccgagtagctgggattacaggcacctgccaccacgcgcagctaatttttgtatttttagtagagacaaggttttaccatgttggccaggctggtctcaaactcctgacctcatgtgatccacccaccttcgcctcccaaattgctgggattacaggcatgagccaccctgcctggccttattctttaactgtttagtagaattcaccagtgtaaccaactaggaggaaacttttttcttttttttttttttttttgagacagagtttcactcttgttgcccaggctggagtgcaatactgcgatctcagctcactgcaacctccgcctcctgggtttaaatgattcttctgcctcagcctcctgagtagctgggattacaggcgtgcgccaccacacctagctcatttttttttatttttagtagaaatggggtttcaccatgttagccaggctggtcttgaactcctgacctggtgatctgcccacctcagcctcccaaagtgctgggattatagccgtgagccaccgtgcctggccaggaaacttctttttcttaggtgtggtgtggttggtatttaccttgcttggtgtgctctgatttttttttttctttttcctttctttcttttttttttttttgagacagagtttcactctgttgcccaggctggagtgcagtggcatgatctcgactcactgcaacctctgcctcccgggttcaagtgattctcctgcctcaccctcctgagtagctgggattacaggtgcgcaccaccacacccagctaatttttgtatttttagtagagacagggtttcaccaggttggtcaggctggtcttgaactcctgaccttgtgatccacctgcctcagcctcccaaagtgctgggattacaggcatgagccactgggcccagccttgatttttttttttcttttgagacagagtcccactctgtcacctgggctggagtgcagtggctcgatctcagctcactacaacctccatctccaaggttcacacgattcttgtgtctcagcctccctagtagctgggattacaggcgtgcaccaccatgcttagctaatttttgtgtttttagtagagatagggtttctccatgttttccaggctggtttcaagctcctggcctcaagtgatctgcttgcctcggcctcctaaagtgctgggattataggtgtgagctaccatgcctagcctttttttttttttttttttttttttttgagacaaggtcttgctttgtcacccaggctggagagcagtggcatgatcacagcttactgcagcctcaaccctcctgggctcaagcaatcctcccacctcagcctcctgagtagctgggactacaagccacacaccatgtccagctaatttttttttttcagagggggtctcactgcattgcccaggctggtcttgaactcctaagtttaagctatcctcccacctcagccaaccaaagtgctggggttacaggtgtgacccacctcacctagctttgcttgatgttctctgagtttcttttatctgtggttttgtgtctgtcattagttttggaaaactctaagccattatctcttcgaatatttcttctgcccattatctttctcttctccttctaggattctagttgtgcatattttacacagatactgtcccacagcttttgtatattaygttctgggttgattttgttttcccttcatttttttctgttgtgtttcagttaaggtaatttttttaacttatcttcaagatgtactgattttcttttcagcagtttagagcctactgattagccaactgaaggcattcatcatctctgttttggcatttttcatgtcttacatttctattaatatttaattataggttccatcgatttgctgtaatcacccatatgatcttgcatagtatccaccatttttcttgacatagtaaacataattttattttttttatttttttgagagagtctcgctctgtcacccaggctggagtgcagtggtgcaatctcagctcactgcaacctccacctccaaggttcaagcgattctcctgcctcagcctcctgagtagctgggactacaggtgtgcaccaccacgcctggctgatttttgtatttttagtagagacggggtttcgccatgttgaccaggctggtctcgaactcatgacctcaggcaatcctcccaccttggcctctcaaaacaataattatttaaaattctctctcatttccaaaatctctgttatctgactctggttctgatgaatgtttcatatcttcagaatgttttcttcttggcttttcatatgactctatatattttgttaatagcaacacatctcacataggacaagatactttggtgaatagtttttacacctgaaagtaaggaggcctttcctgctgctaagacctttgttggcagaggttgaattaatatattatggctggtggaaaagtaattgtggttttcgcattttttaatggcaagaaccaaaattacttttatgccaatctaatagtagttaggagttgtgcttggttcaagattggatttgctatgattatccttagtggtctcgagttcctgtgatgataccttgtatttctgattggtgttggataccagagcactgtgtttctgaccctgagtttccaggctcagaagctttgtgctgggtctccaagagggtctctctctctgcttccgttgctctgctgtcctcctcctggaaatactctgctgtttcttgaagtgtaacgggggctggggaggggctggcgttcttggattaggttgcagttttaggcactgtgtccctaggttkgggagggtctctgtttacttgccccttcccagctaattgtgggcccagtgatatttctgccccctcctctgggatggggcttttcttccatagtcccttctctctgctgcagtgacttttcaccagtgtccagacggcaacagtatttgtgctccttttccctcatagggtgcttttgttctgtgagatgagagaaagggtatggtaagttcctttacccatgcccaaggccgctgtatactcccctgggtgtgtgtcacagccgacacttcttagggctctttacagtattttctgagcccctggtagagattgtaaagaaaaagcctgcaagatagggcgactcccctagtttctgcaggcccccgggtcttaacactcctgcagcccatattctgccttcaccaatcatcacttttagctagcctattctttccagtgtctgtttacaacgaccctacgaaactagtgctaatgtcttctctccccttgcaggcaactgcccctctccatttggtgccatttggttactctgcaacctcagctttccaatggattcgaaaaaatgtcctaatttatagttcatctggctcgtttgcattgtaagagtagaagaaatgctccttctacccctacatcccggagtggaagctggaagtgctgtgatttaaaaatgtatatatgtaaaacacacattttattgaatgtaaaacatgagtgtaattaatcctaaaaccagaattcagaaaatgagccatttttaatttttttatctagttttttaaatgtttgaattataaaggtgataagattagaaaaatttgggaaatagaaaaccccaagagctattttcttttttgcatattcatttgaatttttatgtggtaatatttttagatttctcctcattctacctctcattctcacatctaccaatacatgccttcatagtctagatttatagaagttttagaactctgcttagggatgcttaagagcaaatggtaagattagccacagtgtagtttgggacatcagtagtacgggctgctctctttctaaaatccttttctctggctggcatgttgaccgggagtctcccttccattcctgctctgcagaccctgcgggccagagtccttgcccgagaccttcaggtcagtcagtgtctcctggtgtgcatttgggaaaggctgctgcataggctcacctcccactgggtttcatttgacctagtgaacccgtagcaactcgatttggcttaattggccacccctaatcctgtagctgtcatactactcaatgtaatgactagcagggacaactttttcatcatctttagttaaactccagttactcatttggaaaatggtttccccaaatgtgtatcattcttgacagtttttcacatttgtttccctggtcctaaagcaagattataaaaatcaaatagaacctgtgtgtgagggcccttgtttgcacaatgaggagaggacacacttcatctggaggttgcgtgactggggcagcatcctacagctcagcataagaggcaggctcaaccaactgcccagggaagagcgcttcttactaaacatattcaacagttggggctctcagaaaagaatgtgacttgttttaaatgtaagtaagggatcttccataaggttattcctaggccaagcaaaaggaggttccctaaagcacaatagaaaaagtgttctttactaattgctgttaagatgacagatggggccgggcgtggtgtctcacacctgtaaatcccagcacttggggaggccaaggcaggcagatcacttgaggtcaggtgttcaagaccagtctggccaacatggcaaaaccccgtctctactaaaaacacaaaagccaggcgtggtggccgacgcctgtaatcccagcatcctgggaggctgaggcacaagaattgcttgaacctgggaggcagaggttgcagtgagccgagattgcaccactgcactccagccagggtgacacagcaggactcttgtctcaaaaaagaaaaaaaaaaaaaaaaaaagacagatggaaacttgcaatcaaaaagaaaatgatgcacttagggaggccgaggtgggagggtggatcatctgaggtcaggagttcgagaccagcctggccaacatggtgaaaccccacctccactaataataataaaatgagctgggtgtggtggcgggcgcctgtaatcccagctacttgggagattgaggcaggaaaatcgcttgaacctgggaggcagaggttgtggtgagccaagatcacgtcactgcactccggcctgggtgacagaatgaaactccatctcaaaagaaggaaaggaaatgatgcacactgacagcaacagggggcgggtgtkggggggaatgctcagttatgcagcttgtcagtacagacagttgtttctgataatttggtaacttgggtaaatttctatgatgttcaaatgattttactgtacctagtggttcccttctgtcttgctgtgtgctgctccttcagaaagaggtgttccttttgatctaagtaatactatattttarggaattttttcaagtgtaacacttactaatcaaaatgttccttttctgtcattccctgcttcagtaaaccccttcaaatatgtccttctttcaaaacttcaccttttttttctcaattgttcatttggttctatataaagtcatgccaaggactgaatgaatttagggaattaggagttgaagatttttgaaactatgtaaaattaattgtaaaggccttctttactggtaggcaggagaacagtgcagtgtattgacaaggttgactcgtttggaaggtcagttccctcccttcagatgcaggtgtcgtaagtgacttccctcccccacattgtcctttttgtctctgtctccttttactcacttatcagcagtccttgggaggctttccaccacagctcatctgatgatttccttactttcttctagcttgaaactcaaagaggctaagcgaaaggggaaagcttggttagatgcagagttctaagaatgaagtagttgggagatttgatgaccaccgcttagtccttggcaggtcgggttcctcttttcttttaggattataacaccactccctctcctcgcagttcagctaatgaagagaacatgtataaggctaaatacctctcttctggggtaaaataatgttacagcagcatttagcaaatcttctttttaaatgttccaagcttccaaacttaacgtccatctcaggattttattttccagttctgaagaaatctgcacaaatttaaacagtaaataacttacctttcctttaaataaaaagacaaatgactagtggtttttaaattgccaggttttattaagataattggcaaaatttcaacatacaccttacctgaatgaacacttttaataaaatatgaaggatcactcatgactacaactgaactcaaaagtgagatgtagagcagatttgtaaattgataaatttatttggtaagaaattattcacttcattcgcttcactccatagagaattctttgcagagaaatgttatgaacaagagaacaaagcctgtctctcaccaaagagcacctagagtaagagtttacaatgatgtatctggattatctaattcatcaaagtttatttccttttcaaaaacaactgctgtgtcagtctggagttccctatttcatgttttctaattattacaataaatagtcttcaaaatagaagatmaaatgctgctttaagaagtaacagttatttttcaacaccataccatttgtctggaaaatcattgtgttgtaatactggtggtatcttactttgttttgcaagagacatttaagctatttgcagatcagaatagaagagtgggcatttgtcctttmacatcacgtgattttcaaaggtgaaaaaaatttcttttgctaacttacgattcaaagaaaaatggtctcaaattaaagtgtggacaaaactgtagtattcccttttatagccttgcttaggtaagaatgttcactgagtgaataaattaggtttaaaaattaaaacaataatttagatcattttcccacaaagccttatcaaggatttgatggggaaggaagcacttgaaccacagcagttttatctgtaaacactgaacttggccatgcatcattttcatctgcccactggatgttgcacttctcactggcacagtgtttcaacagtggagtgtggttgtcatgaaaatgcagtattgacactataccactataaatgtggtcaaaattagactcagtgttgacattgacattgttgccattgtccttggaaaaggtgttactttcaaggagcctcctaaatgcaacagtaactttaatcataataattcaaggacaatggatggcacttctaggtaaagaaaaggtatatacatatgtgtttctacccatcctctttagtacagacctaaatgggattaatagccccagtgtgtgttgctgtaatgttgcctaacctcatgtccctcaaaagtacacatctagaaagtgaacaaaggaaacctgtaaattagggactgactccctttgaaactcacagtgaatgtacaaggagtttgtaatgacttcagttggtgacytgaagtttgtttccctaaccaatattacactcttgtttggatttattttactatttcctattctaacttgtttagcaggcaaacagattgatgcagaccatgttaaattgaaaaagggatactgccactctttaaggattgagtgtagaactttcaccaccactaaattacacaatgaataaaaatacaaaacacataattcacagactatacctcagcattaacagtttatagatattatatagatacttttatatctgtctaatatttttacaatcaccaggtacaccatcattaaatacaagttacagaaatatgtagataccattagttagagggttacttattgcttacgtcagcaagcagcaaataagggcacaggatttgaactgaagggaactacttcctatcaccagtggcgttaagagagaacactgcatttcacaaagcactgcttttatctagtttatagaaccaagagcagcatatatcagaccaataaccactattttagtatgtattatagaattttaaaggatttaccttacaaatggtacctaactactctataaatacgcatgttgtgaacaaatgaatagttgctatttttcacaatattggtttataacgaccacactagaactactttgctttattttgtagagagctaatggcatgagaaatgagttaacactgctgtgtagtcggacctacaaaatccagacccctaaagatgggtctgtgtttgtcccagttctatccagccatttttttccccactgagaaagcctagcatgtgtagtaactttttccctttaccctctttattctgatcaaaaacattaccaatagacaacaatagaaattttaaaaagcttttttttttacttcgctaagcactttggactataatgtgtaccaatagtctgctgcctttgttttcttgttttcttagataatttgatttgaaactgacactgcacctgatgggttaacaagatctaggcttcagaaggtgacagatatgagtgaggaccatgtgtggggcaaagcctcagaatgatgaaaaggttccggcactatagttggggccatgttgactccttttcaaccatttgtcacagacgtgagaagaagaaatgacttcaaaatcaagagaaaacaaatactgaaagtctctacttacatccaaattttaaaaaataaaatctgtagattaacaatctgatcattgctaaagtgaagctgtttttgtctatttgatatagctatactggtatccaaaatatgccagtcatctgtgtctttaaaattcagagattttagtcctctgttatgggcctggggaacgtgtactatcctataaacacatgattaggcgggggacacttcttagcgagagcactcacccttgttagtgagcactccagaggggccacccataggcattggccaggctggtctgctgttgactaggggagggtaacactaagacattcgtgactcttagagaatcagaggctgcttcactgaatgaatgaatctgatagtttgttgtctttagttgacaacatgcttctaactaacttgaaactgcagaaatagcaaaaagcagacagtttcaaaatatcaaatataactaaatattgaaatgaaaagcacacgtcctgtctctgcagtctgaagctacatgtaagcaggacactcatgtgtcttccaattacaactaaacagacctggctgtcagtaatctgcattctcagtggcctctgggctcactttagacaatactttcagcctccttcattccaattacttcactaccttgggggaaataattttagagaagataaaagtagcatttttcattctctaaaatcactttgtattttatagtagtacatgcctttgctgtctgaactaaaaaaagacaaaatatagaaatgcttttgattttctttgtaaatggtattttgactctatagtgtatttgtacctgacatcatctccgttaaagcagttttattcctgagatgagggtacagtggaaaacacattagcatcatagattaaaaccagttgacagcggtctcctaaaatgctaaataataaaaattccaccaaaagcaccataacaggttatgaaactcccaaataactacagccctaggaaatattttttaattaaaaaaagttcacaatcttttatgttacaggaaaaaaatccgtaaatctttctgactataaaccgcctcacaagtctgagaatatgacacttttacactgatttaccactttcattgttatcagttaaaatccatatggcttttagtcttttacctacccaaaaaggtgagggggcagggggttccttcatagtgcccaggattttgagggacatttcccaaccaaatgtaattcagcattaaattttccacagataaattaggcacatcagaccagatttcaactgcattgagatttcaacactgtatatcctgactgaaataactaacttgaaagcttccactagtgactgaagggatggtgggaagggggttgtgtatctagtgacatgaaggatggtgggaagggggttgtgtattggtgtcgagacacatcacagggaccagctgtgtaattttgcaagtgaaactgccaatacttctttttagattgaaaacactgtactttgagtttcctagagatctatttacatttaagaattgagccatccatggattcataatgaagcacatatgttttagaaatgtctaccttgtttctactctgatagtggtatttttattgggggagagctagctaacctacttgaaagaaaaattattctattttatagctccaaggaagatctgggcatggaatatcatgagtctttctgagcttcctcatgttttcactgtaccctttccaactattttgcctccatggcagagaacttcttatcctatttctcttcccacttccagtaagtgaggacaggctagtgcctattttgtgggaaggctcttgagcagagagaaatgaataaaactttggattaaacctgaatctgtgccacttctttgagtagtggtggcgtaaatgagacaatctagaaactctgtttcccggggatttgaactgttcattttccaaccctgaacagacaggagacaagctctgcattctgtatatctgctcccctgttgaacccaaattgaaagcagtgggaaactctccagcaccactccattcaggcaatgatgactgaactgattttttctccatcattaactcattaataagatttgctttctttggtgcaccaggaccaaacatctcaactggtagcaaaaactgggcactgtgaggtttgcttgcttctatttgtgtgagatctaggtagcctgggtcttccagcacgttgatttgggaccctgggctcaggctagttctatcagtgaatgaatccacacgcccatcatagcctaggtcggctggtgctgagcactggtgctgaggccaagggcgtttgcactctccatgattctccttatcatccccaccatcttcttgccctccttgaaaagagttctctgtccaatctgattcctcactaacatttacagctttgttcatgtccctcaggaataccacaataaccgtgatgttatcacttgacccagcatcacgagctgatgccactaatttgtgggcaaccatgctgctgtctccattattctctttcaggtggtcggacacaactttcactgcctcatcagggttcacggtgtcatagaagccatcacaggccagaatgaggtagtcttcggtcccatccagaacagtggaggcagaatctgcatccccacagatatatggcttatgttcagcatctcctgcgggaagcagagtgtaggggcatcattagcatttgttttaccttgcatgctaagaacgtttatgaccaatgccatgactctgatcacagcttactggattgtgaactgacttgactggaaagaatttataaaatagtttttgacaaaatacttaaattctctggtaatcagatctgcttactccttactcccagttaaataattgctagttactgggcataagtccttacctagcttagactctgaatctgcacctctggctatgatttaggcttagctgagtgtaacaacaatgtcagatctaaaagtttgttgctgtactgaaaaattcagtacactgtgtaggaagacatggttgattcagtagatctgttcttttgcaggtggttttgatttaattgaaatttgaaaacaagtccacattgaaagaagcaaaccaaagctctgatcattctcttcattaaataatttttgttctattcttgtttagaaatcaataaatagcttcatgctgcgagcacgaaggaaggtttgagttacacgagattttataaatcaagtctaactcccttaagccaggaggagttatgtggctgacccaaggcctcacacatgggagctgaatgcagttttcttgattcccaacccacttggctttctattttttagtggtgctttacctgtaacttctagagaacagacaaaatgtatggccatttttctcttatatttagagactgccatattcttcatatggctctgctcatcgccccacttctgtctttattgttattgtgcatttccccactcattaacaactgtgagaacccaaggtctttctgggcctttctctcttccttttcttgcttagcttcgtcctctcacagaatgacatctgagctggtcctgaagggtaagttagttatcaccaggcagagaagttgcctcaattgagggaacaggataagcaaaggcagaggcaactgttagggagtaatgtacagttggagagtagggtgcttggggtaggagcgagactgcagaccttgggaccacactaaactaggtttctatcaccagactactgagataattgatcatttagggctttcagatccagagcacttccaaatccattcattgtttacattgattacattcctttaggtaccttgtgagagtgcagcaaaagggtccttagcctatgaggtaaccaaatagcttatgactacaacaagggactctcaattcacttttttatttttatttttattttttgtcgcccaggctggagtgcagtggcacaatctcgggtcactgcagcctctgcctcccaggttccagcaattctcctgcctccgcctccggagtagctgggattacaggcgtacgccaccacacctggctaatttttatatttttattagagacggggtttcaccatattggccaggctggcgtcgaactcctgacctctgataatctgcctgtgtcggcctcccaaagtgctgggataacaggcatgagccaccgcatctggcctctcattcacttctttacaaaaaaataaaaacaaaaccacacacagggtactgagcaataattcctagagtagggtatcataaatcatcattacatagtattataaaaacaagaaataaactccagatatttacaaagggctttactgtatagcagtggcatattgcttagtggttaaggacaccagcactagtgtcagactgcctgggtccaaatcctagctcttctacttgtcacctacacaactctcatcaattactatcctttccattgcactaaaaccgaactttttgactcagggaatattaaaatgaagataaactcacttgagtaatctgactatatattcattatttctagtatctgttataggttctctttgacacaagaaagttggccaggcgcatgcctgtaatcccagcactttgggaggccaaggcgggaggatacttgaggtcgggagtacgaagccagcctggccatcatggtgaaaccttgtctctactaaaaatacaaaaattagccgggcctggtggcatgcatgcaaagtcccagctactcaagaggctgaggcaggagaattgtttgaacccaggaggcagaggttgcagtgagcccagattgcgccactgcactccagcctggatgacagagggagactctgtctcaaaaaaaagtttctttccaacatttaacatccctgtttaatcctcaaataggctagaaagctcattaggaaccctatggataactctgctagaaccaatgtgggcacatgccctatctagcaggttgcatgattagatacacagagcaacaaataattaatataattacctgagttagtatatctattaggtaagaaattagtcttcgacattataaatgttcatttcactccttccattcacaaacacaacctctcatcttactcatatctaggctcttctccattcattcattcattatttcttttttttttttttttgagacagagtctcactgtggcccagactggagtgcagtggtgtgatctcagctcattgcaacctccacctcccggattcaagcaattctcctgcctcagcctcccaagtagctgggattacaggcacgcaccacaatacccagctaatttttgtgtttttagtagagacagggtttcaccatgttggtcaggctggtcttgaactcctgaccttgtgatctacccacctgggcttctcaaagtgctgggattctaggtgtgagccaccgcgcccagccctcattcattatttcttacaggagtcaaaaccatctttcccaagcatgcttttgatttaatcaacttcacttatatgctaaggtgcctccatagcctgttagagctcattaaaactcaatctatttaagcagaaaatgcaaaaatttaaaagatatttaaaaataaataataaataaaatccaatatgggattcagtgtccttcaccaatttactaaagttcccatcccctattctacctgactatatgattatcatcattattattttttgaattccgcctctaaaaataaatgtgatctgagtcacactgttcccaaaaatcttgttttagtgcttcaattaaaagactgctgcaactgttagtttggaacagaacatacaaagatttgtacagagaaaatgctgccaaagttctggcttttcacctgctctactgttgggtgtcaaattcatgacatttcgcccccaaatttggtaggagggcatgaatatccatttcatcgtagaaatggcaacatccttttgtcttc

SEQ ID NO: 96805 - DNA, 12205 bp, Homo sapiens
tccgagggtactgcgtcatgctgggctactggggtgagcctcagaagacagaggaagcagtggatcaggacaagtggtattggacagggtgagaaggcagggcggggtggaggctctggccgctgaggggaggctggaggtcttgaggctgagccgggaacattaacctggcaccgtgaggatgtgggtatcaagatgacccctcacatgctggagtcttaatttccaaaatgtatacggtggggatgatcatacatagcacagaagaaagcaactgggtcatcaccctacaccagcagctgcaaaatctgagtccagattcagtcactcatttgttagctcagcaaattcttactagaattccttatgtgctagcaccgttctcgccgctagaggtccagaggaaagtaagatgagaaggatcctgctttttggaggaagacagatgatgcccaacatcgataaataacaccaagaaaataggccaggcgcggtgactcacacctgtaatctcagcagtttgggaggccgaggcgggtggatcacctgaagtcagaagtttgagaccagcctggccaacacagtgaaaccccacctctactaaaaatacaaaaattagccggacgtggtggcggcacgtgcctgtagtcccagctactcggaggctgaggcaggagaatcgctgtaacccaggagatggaggttgcagtgaaccgagatcgcgccactgcactcaagactgggcgacagagcaggactccatctcaaaaacaaacaagcaaatgaacaaacaaaaaacactaagaaaatgaaatagggttataggagagaaagtggctgtggtggggaggggagcttcccttagattgagtggacagagaagatgtctggagacatttgagctgagacctggaaagaagccagtcgtgaaaagctatgtatagatgtgttgagagagacagaatatgttataggtattgttttgtttttgtctacctcccctccccttactggactattaattccagagactgtgtcttgttcctgctatgtctcccagagtctagagcagtggaagacacatagtagctggtcaataaatgtttcacgactgagcaagcaagtgagtgaacaaggcagagatgacaggttgcccctgggctttccttacagagatgtcgccacaatgaatgagcagggcttctgcaagatcgtgggccgctctaaggatatgatcatccggggtggtgagaacatctaccccgcagagctcgaggacttctttcacacacacccgaaggtgcaggaagtgcaggtgaggcacttggctcaggtgagcccccagaaacaagaaacacacatgaacacggtgatgtctgatatttttctttggccctggaaggtggtgggagtgaaggacgatcggatgggggaagagatttgtgcctgcattcggctgaaggacggggaggagaccacggtggaggagataaaagctttctgcaaagggaaggtgggagcctccgctcaacctagctgatgctgctctgttctttgctcacccactcctctgccaaccagcccagggtggggattgctctgcccttgacgaagctgactcctggccaggccagcccctggtcccctacccatacccctgtgagcttgcgcagcctcacgccttacctccctccctctggtctgcagatctctcacttcaagattccgaagtacatcgtgtttgtcacaaactaccccctcaccatttcaggaaaggtgtgtaaggtggaggaggctggggagggcagcctgggctctggggccccatagggccccacctctgtttccttcagcaatgggtgtggagagactggcagtagggtgaccgggtcacctaatcctggtttgcctggggactttccctgttttggcactaagagcctgagaaaccccttattcttgggtgaaccaagacagctggtaaccctaactccattttctttcctctagatccagaaattcaaacttcgagagcagatggaacgacatctaaatctgtgaataaagcagcaggcctgtcctggccggttggcttgactctctcctgtcagaatgcaacctggctttatgcacctagatgtccccagcacccagttctgagccaggcacatcaaatgtcaaggaattgactgaacgaactaagagctcctggatgggtccgggaactcgcctgggcacaaggtgccaaaaggcaggcagcctgcccaggccctccctcctgtccatcccccacattcccctgtctgtccttgtgatttggcataaagagcttctgttttctttggcttcttgctggtgggctctcttggcagctactacaggatggagaagggaagacactgaggggaactagcactttcagacgtcctattccttgtcattgagagtgcagagcaccttgatgtggattatctacttaatttaaccctcacccttggtatccctttgagataccaacccatttttgttgttgttcttgttttttgagacagagtcttgccctgtcacccaggctggagtgtagtcatgcgatctcagctcactgcaacctctgcctccctaattcaagtgattctccttcctcaccctcccaagtaactgggattgcagatacccaccaccacacccaactaacttttgtatttttagtagaggcgaggttttaccatgttggccaggctggtcctcaaactcctgacctcaagcaatccgcctgcctcagcctaccaaagtgctgggattacaggcatgaaccactgcgcctggccccaattttttatttttaagctactctaatttaattctttttcacattgttgccagattagtctagcaagaagtattctttttatatatgtataacagcttgattgagatgtaattcacatactctccagttcactcccacctcccccattttctagagacaggatctcattccgtcacccgtgctggagtgcagtgactcactgtagcgacatgatcatagctcactgcagcctcgaactcctgggctcaagcagtcctcccacctcagcctcctgagtagctgggactgtaggaatgtgccaccatgtcttaactaatttttaaacatagacacaggatcttgctatgttgcctaggctggtctagaactcatgggctcaagcaatcctcctgcctcagtctctcaaagtgctgggacaatctaccatttaaagtatagaattcagtggtctttagtatattcacaaatatgtgtaactatcaccacagtcaattttaaatattgtcatcacctaagaaagaaaccccatactctttaactattatctcccatctcccagcccccttcctccccaaccaacctcatttttagtttttatttgttttgattggtgaacctggggcatccctcgtaggcagggccagataaagcaggttgtaccttgacccaagaaataaaaacagctgggttccaaaaggcacatagattcccagttcacaggaatggaaacttgcctcctgcctgcccccttacctcccagcgcgcctgcccccttacctcccagcgcgcctgcccccttacctcccagcgcgcctgcccccttacctcgcagcgcgcctgcccccttacctcgcagcgctcctgcccccttacctcccagcgcgcctgcccccttacctcgcagcgcgcctgcccccttacctcgcagcgcgcctgcccccttacctcccagcgcgcctgcccccttacctcgcagcgcgcctgcccccttacctcccagcgcgcctgcccccttacctcgcagcgcgcctgcccccttacctcgcagcgtgcctgcccccttacctcccagcgtgcctgcccaaggcagcagcagcctcctcttgactttttaagaaatgaacataggtttaaggtattttcagtaccaggctctgtgctaggtactttcacattattttctctccaaatcttcccaacaatcctttcaagtagccattggtcccacttcaccaatgacccaacagaaactcagggaggttccgtatcttgctcaaggtcacacagctggatcagaacccagctgtctgttaggcaggttcactgcacactagttaccaacttgtcagagtccagtgaggcaaacacccacaagttacataacgctgagtccagcgaggcaaacacaagtgacatgcaacgtgtttattacctataggtaggcactaagggacaacagaaggctgggattcatttggagctggacccctacggctcaggaaagctgctgaggcagctgggggatggaccgttgtctgtgcatgcctgacttttttttttgttgttggtttgttgtgagatggagtctcgctctttcacccgggctggagtgcagtggtgtgaaccctgggattcaagcaattttcctgcctcagcctccctggtagctgggattacaggcgtgcactaccacgtccagctattttttttttttttagtagaaacagtttcgccatgttggccaggctggtcttgaacttctgacctcaggtgatccacccgcctcggcctcccaaagtgttgtgataacaggcatgggccaccacgcccagccagccagacttgtactgaagctgagggaccccagaaaccagcccgccctgtttttcgtttgtttgtttgtttgtttgatacagagtctcactctgtctcccaggctggagtgcagtgtcgccatctgggctcactgcaacttccgcctcccaggttcaagcaattctcctgcctcagcctcccgggtagctgggactactggcacgcaccaccacacctggctagttttttgtatttttagtaaaaacggggtttcaccgtgttagccaggatggtctcaatctcctgaccttatgatccgcccgcatcggcctcccaaagtgctgggattacaggagtaagccaccgcgcccggcttctgccctgggctttataccctggggccatgtgacatgttgggctgaagtgttgaaggacatgctttttctagggggactggaacagagcatggctgtgctggccagtccttccttccctcaggatgttgcattctctgcacactctacagttttatttatttatttattgagacagtcttgctccatcacccaggctggagtgcagtggcactgtctcagctcactgcaacctccgcctcccaggttcgagggattctccctgctcagcctcccgtgtagctgggattacaggtgcccaccaccacgcttggataatttttgtatttttggtaaagacggggtttcagcatgttggctaggctggtcttgaacttctgatctcaagtgatctgcccgcctcggcctcccaaagtgctgggattacaggcgtctacagttattcttgagaactacaagcaagaaaggaggggagaaccaggtcagttcaaggccactgggagaactgtcctgcaccgcctgcctctgaagcccatgatgtttctgctttgtgggacagttgttcaggtgcctgcttccccaggccttcccctgcgccttccccctctctcctacacacaccatctgactgtccttccagcacgtacacctccagatgcttgggttggcctgacccaaaacagtctactctcccggccaagccaattgcccctgggattttctgctcctccaagatcccgtgcatagccctggtggtggctcatgcccttaatccttagttactctagatgctgaggcaggaggatcgcttgaggccgaggagttcaagacctcccctctcccaaatatttgtaaatgaaattaaaagaaagatccagcccaagtgtctcttctgccctactgactcccacactcttaaaacagatgacctcacagcactgaggcggacggctctggtgtccagcaggcacggaattaatacgccttgcctgtcctggccggttggcttgcctctctcctgycagaatgcaacctggctttatgcacctagatgtccccagcgcccagttctgagccaggcacatcaaatgtcaaggaattgactgaacaaactaagagctcctggatgggtccgggaactcgcccgggcacaaggtgccaaaaggcaagcagcccgcctcgcggcctggggaaagaaccgacaggaggccgcagtgagcgcccgggcgcccggcaggtggcgccgcagccccgggcccgggccctcttgtcgcgcggtcacgcagcccctcttccttccgccggctgcgcactcacagtgatccctgcgcgcgtctcctgctcgggtcagtgcgccgcgctgcgctgggcgccatggcgctccccggagcccgggctcgcggctgggcggcagcagccagagcggcccagaggcgccgccgcgtggagaacgcaggagggtccccgagtcctgagcctgcgggccggcgcgcggcgctttacgtacacgtgagtaggggcgggggcggagcccacggtgtgtggccgcagccctggccgtgaccgtggccgtccaaaacccaggtggcggtttgtcactctatgaacccgcctgccgtgtttccgtgcccccgtacgaggtctgggatgggaccctgtgctttggcagggaaatgacttggtccagaaacctgaagtctctgctactcaccggctcggtgactctgaccaaatggttcaaatttcataacaattttcctcttagcaagacaaaattttcttaagagcagtgttctgactcggtagctgggaaaatggctcataggaaaattgtatgaaaattatatgatcccagaaagagcttgggttgaattccttcctgacgtctgctggttggaagaggcagcgtaacaaaggagtgagcctcagttttctcacattgaagtggatgtaataaccccagtgcgacctgccttggggagttgtgtggcttagatgtcctagctactgtggaaagacctcgggataggggtgggggtggggttgggggtgtgtgcgactgaaccctggaagtggccagggcagctctcaccgcgcacgtgcactcactgcccccagtggccttactgcgagaagcgctgcagttactgcaacttcaacaagtacatccctcgccgcctggaggaggctgccatgcagaagtgtctggtgaccgaagctcagacgctgctgcggctcagcggggtgcaacggtgggtagtgggggctgtaggcagcgttttgggaaatatttggaggagtggtgggggataggtgcaggcatcccagagggctcccccaggtctcatttctccattctctttccccagggtggagtctgtgttctttggtggggggacccccagtctagccagtccccacacggtggctgctgtcctggaggctgtggcacagacagcccacctgcctgcagactcggaagtcacattggaggctaatcctacttcagctccgggctccagactggcagagttcggggcagcaggggttaacaggttgtctataggcctccaggtaacccatggcactcaccccatcccagtgcaccccgcccttcagtgccatctcctctttggtcacattcattcattgggcaaacattgattgagcaccttctgggtgccagggacacagtagggcctagtgcgacacttttataactccttaattgtctgctgctgtcatagaccacagactttatgagaaagggatcaggtgtggcttttctatttcaaacacttaccatagtgcctggcacatagtaggtggtcaaaaaagatttgctacatgacacgggagacgcagacatgtagccagattattgcagcatggtaaatgtcacctgtaaagggggtctctataaaaggcttctagagtacagcctgaagggaggtcactctgatgaaatcactgaaacttctctggaggagatgtttgaatgaagaggaagagttcaccaggtgagggggtgtgggggaaacgacacaggccatggaagagcctggcatgttttgggggagttgtgagtcattccttgtgattggagaggctggaaacaaggttgcaaggtagagtccaaaacctttggtgcctactaaggagtgtgggttttgtcctagtaatgatagggagccattgaaggtttttaagtagggagaaacctagtcgtctcaggttgacctccgatatttccgtaggacttccgggttgtgggctttgttctgatggaatatgctgacagaaacacatcacttctaagatattcttaccccaaagcgcatatcttgaatctaattgtcaggaaaccctgaattaagagatttttacaaaattattgtggtaagaacagacagcatgagatctaccgtcttaacaagtttttaaatgtacatacagcactgttaactataagcacagtgttatacagccaatctgtagaaattattcattttaaataattcatttaaataattataattcgtaaataataataatttatttaaattcattaaattattcattttaaacaactggcctgtattcttcaaaaatgccagtgtcatgagagacaaagaaaggctgagaatctaaaggagacagaagagacagctgaatacaatgtgtggcccctgactggggaggaaggaggaaattactacagtagatgttattgggaccattagccaaatttgaatatgacaatgtattatgtaatggtgttgtgtcagtgttgcatttcctgaactctgtaattggattgcagttatgtaagagaatgtccttgttctttaggaaatacacacctaagtatttagaggttagggagtataatatctataactgctattcaatatagtggccactagccacagactagtgagcatttgaaatgtggtaagttaagtttaattcacttaaatttaaataaccacatgtggctactacctatcatattggacagtacagatatgaacatttccaccattgtagaaagttcttttggacagtgctggtttataatttactgttaaatgattcagcataataacaggtatgtatgtttaaagagaaacaaatatggacaaatggtgaatcaagatgaaggttttttttgtgattttctttcaacttttctataggttagaattatttaaaattgaaaagtaaagtaaataaagacttgattttggagtcagacagtcctaaattccaggtcgaactttgcaactgtatggcctggacaagttacttaacacctctgaacctcagttttctcatctgtaaaatagaactaatattggagggttacaaagattaaattagacactacataaaggtgcttggcacatagcgacccttctgtgaatggcagctcttggtgccagcttgaccttccccctcctgccttccagctgcctgccacgtgctgcgttctccctgtatctgtgtctacaatggggaggagggttcttgtctctctctgagctgctggtatgcttacacccaccctcttttcccagtccctagatgacactgagctccggctgttgggacggacgcactcggcctgcgatgctctgcggacgctggcagaggcccggcgcctctttcccgggcgcgtgtctgtagacttgatgctggggctgccggcacagcaggtggggccgtggcttgggcagctgcaggaactgctgcaccactgtgatgaccacctctccctctaccagctgtccctggagcggggcaccgcactcttcgcccaggtgcagcggggtgcccttccagcccctgacccggagctcgcagctgagatgtaccagaggggccgggctgtccttcgggaggctggcttccaccagtatgaggtctccaactttgcccggaatgtaagttctggggctgatggctggaggtggaggatgggcagactgcagtgtgaccagggcgttgtgaccttctgaagagaaggatcctggccgagatggtgggacattctaacctggggccccttacctgagtctaaaaatgaggcctgccctcttcactctgcactatttcctccctccccgcagggggcgctcagtacccacaattggacttactggcagtgtggtcagtaccttggcgttgggcctggtgagtcccgtgaactacagaaagggtgactcaggagaggaatgtcgtggctgtgtgaacttgggccacattaacctctccaagcctctattttctcatatgtaaaatgtggcaaaaaataatacctccctatagaactgttgagcatgaattataaggggcttaatgttgcaccttgcactagggttctcagcctttagtgtgtatgagaatctcctggagggcttgttaaaacccaagctgctgggccccaccctcagaattcccaattggacagggctagaggagagcccaagaatttatatgtcttggcattttgggatagatgattaaaaaaaaaagaaaaagaaaaaagggcctggtgtcatgtgcctctaatctgagctacttgggaagctgaggtggaaagatcgtttgaccccaggcgtccaagaccagcctgggcagtatagtgagacaccacctcaaaaaaaaaaaaaaaaaaaagaaagaaagaaagaaagaaagaaaagaaaagaaaaataatttatatttccagtatgttagaggcagttgctccagggaccacatgatttaaatctggtaaacacatagtattaacagccattaatgtggggatggttgttgatgttgtcaggggcccatggacgatttatgccccagggggctggaggccacacccgggaggctcggatccagacactggagcctgacaactggatgaaggaggtgatgctgtttggccatggcacccggaagcgtgtccccctgggcaggctggagctgtgagcatccaagggcacagggctctcctccaggatccccacaccccaagaccatgtctatttgtatatcttttatttcctgtcttgtcctggcccctgccttgccacatactgtatggtccctgttagcctcctctaaatgcatcccagtgtagaatttggagaatgggaggagcacaggcctcctctctaagactccttggtgatttttctttgaggctggaggaagttttggccctggggctacgcaccgatgtggggatcactcaccaggtaaggagttaggattcttgcacaccactccctcctaaagtcttgcagaatcaatgccccctccctgccaccccccccacacacatatacctccaatttctgtgagattggcagctagaagtggggcccaggtccagctgaggcctgatgggcagaagcagtgagcagtggtgcatagctaagaaccctagaccagggctgcagagacccaagttccagccctcattttactgcaaccttggacacaaatcctttcacctctcttaacctcaattttctgagctctgtgaagcaatagatagataaagggtttccacttgtttttagggagcactgaaacctctcataggaagcacagtagataattatcaagcaaatccagagctgctctggataaagcagagccataaagccctggctagagctggctgagaggggagggaagagaggaggcatagaggaaggcctggcttggctggaagctgggttccagtctcagtggaataggagtgaagctgccctcctccctgctggcccattggcctggttctgctttcatgcatgtcagctgctgagatctccatgctgaactggaccctcccccacctctcaccataccccaactatgtggcccagagtagccaggccagctccccacctctgaccctctggcttccccagcactggcagcagtttgagccccagctgaccctgtgggatgtgtttggagcgaacaaggaggtgcaggagctgctggagcggggcctactgcagctggatcacaggtgtgttggggggtgccgggcagagggggctgaggcataccagggagccctgactacagctctccacagacccaggagaagtgagaaagactgactggtaaggcgggacctgcgggtgctgggagctcggccctgctgggtgatggg

SEQ ID NO: 96806 - DNA, 16553 bp, Homo sapiens
tttgtttctcttttgccatctcaaatcttgaaattcaagttttgattcatgtgtcatttgtttagaatattccttctagcatttcccttcaataagatacatggtggtttactctgtgagaccttacctggccaaaaatgtgttcactcagctcccagatagatccagctatgagagcctcttaagcaatggcatatcaggcagtgatgcatccatcactgggctcttcccttaggggctgggcatcacaccagctacaagactatcggctctctgcttgtcatctttctggctgcatgtagcagtcctttcccagcttcagtgcctgggagcaatttcactgcaacccctgtgtatgcagatccatagtcttccactgtctgggttcctcaggaagcaaggaagccctaggtctttgcctcaagcttgaagaaaaatctaagcttccctgctgtcagttccctggttctctcttcacttcagagagtatagccctctacctggctttcttccctggagatctcaagggaacttggggcctcagatggaccctccttagtgtgtctgcttttattcttgtgctactccatggaggaaatggaccaaaggtcaagtcaggaatttatactctcaccatcatcttccccaaatctcaatctcttgatttaaaaaaaaaaaaaaatagatattttcaaaattgctcaacagcatttcattttctgttgctatttataatgtcaacatgcaaagcactcctctgagtgttacatatcaaagtggatactgaccctgccctctagggctctaatgtccagagagataagactatgggaaatgaataatcctggaagtgatagcaaaatgatactaacttagggccaagcttggtggctcacacctataactccagcactttgggaggcggaggtaggaggatggcttgagcccaggagtttgagaccagcctgggcaacatagggagaccccatctctagaaataatttaaaaattagaaaaaaaaaattagccaggcatgatggcacatgcctgtagtcccagctactcaggaggctgaggtgggaggattgcttgagcccagggagtcaaggctgcaatagccacagtcacaccactgggctccagcctgggtgacggagcaggaccctgtcccccaacccccaaccccccccaaaaaaaggatattaactcaagagatcttttaaacaggacatcaaggtagtcacagggaagagattgtgttcgaccaaaagtgactttctcttttctctttaatcttttcttttttttgagacagggtctcgctccattattcaggctagagtgcagtggctccatcacagctcgctgtagcctccccctcctgggctcaattgatcctctcacctcagcctcccgagtagctgggactacaggcacacatgtctagctaattttttattttggtagagttgggatttcaccacattgcccaggatggtcttgaacttttgggctcaagtgatcctcccacctcggtcttccaaattcggtgctgggattacagacgtgagccaccacacccagctgttttagccacgtttaatgagtctgtgacctttgtcagccatcatggaaacccagcataatgttgcatgcatgcctagttggttctcaagtagaattttggaacataatctcttcataaattaagggctggttgtgtattcacattttatgatattttatatttcttttctatttttataattataattccctttcaacagtttttcctgattaaagatattttagtagctggcttctttttaaactctttttaaactttttaaagtttttaaactttaaattttaagaagcttttgtaatatgtgatttgtctgtttatgccttattttgtttgttattttgaagcaaacataggaagtggcttactgccttgtataaaaagatatcagagaacagtggagtcatttggaaaaagcgcagtggtaaagtggcttcggaagtgattttttccccttattttctggcacagtgctttctaagatgatgttgctcactgtagttttctttcacttttaaaggcatgatggttccaggcaggataatcttaaatggtgatttgtcatctttttttccccttgcagcattgctatggcaacaaaagaaaatatgacttcacagagaggaatgttgaagtcaattcacagcaaaatgaacactttggccagtatcctttttgaatgttcgcagtctgtgttttgagggtagaggggagaagtgtctgtgtgtgcttttatagggggcaggttgccatcatcagtagcagtagagcccatcagtaattgcataatatgaatatactgtgcattcctactttgtgaaagtttatgctctttagtaccattcctaaaagactgcacctcagaagtttcttactactagatgtagaagaaaaaaattataaatgtgaatttaaaaattatccaccaatttcttctacattttagaaagcttttaaattcatgttagaactccacactatacattattcttacctaaacatgataaattatatgcctttgttgtttttcccatttagagataagtcagtggcagatgcttggaagggggaaggaaggagacagccacccgtgcagatgagctatagctactgatggagtttgtaactctatgcacaggctgaattctaggatacattctccacttgtttgttgtaacctctactttaaaatgtttcagttttctgttttaaattaggattattaatacttcccagaaacccactagggaaccagaaaagcctggcactctgagtcatttcattcagcgaacctctgaaaagacaagccttctaggcaaaaagctttcctccccaactgccaaagggggaggaacctagaattttcaaaagctgagtatcttgtagtcctagataatttgagttcacttttagtttgatatgtctttgcctaaggaaaagactctcctgatgtgtgctgttattctccagtccactgtgaattttgttcttgccttgtcaccctaagtataaaaccacatgtctaaaatcacattttagatagggctataaaatttacagagtgctgttatatacattatctcattttactaaactatgaactcaattgccagccagaaaagctgatcagtgaatttaagagtttgtatttagtgaaacttttgaaactttgaaatagaagtgtgagtcagatagctgatgatttaaaacactaaagcctttctcaattgttcattagaatttaccaccactcttctttgtgacctcttctctactgctctgtaagcatctctcccataagttctctctctctttttttttttttttttttttttttttttaagacagagtctcaccctgttaccatccaggctggagtacagtggcacgatctcagctcactgcaacctccagcctctcaggttcatgcagtcctcccgcctcagccttctgagtagctgggactacagacacgtgccaccatgcccggctaatttttgtatgttttgtagagatggggtttcaccatgttgcccaggcgagtctcaaactcctaggctcaagcagtccttcagccttggcctcccaaagtgctgggattataggtgtgagccaccctgcccagcccaacactaagttcccttaaggcaaagtagtatactggaacctagcatagcgcctcatacaaataagtcacatgggaattttacaattactccaaaagaatgtgttcaaaaaaaaaaaaaatcaaaaaaaatgggtgtgggtcagggctaaagtttagtccactttcctcctgtatctgccttctgctgcgaagtaactttgaaaatattaataattcaccagtgtctgattatatagaccttagagttggttcccatgaattgcctgaatctaaggcgggaaaagatcaggtatttcttcaaactctcaggcagaactccccagtctcctgagagaagaggaaaagagaaggaaaatgaggaaagggagggaaatgggtggtggtggcgatgggagctggctatgcctgtgcctccctgccagagttcctccattcctggccacgctggctcccaccctgacctgaagcctggcagtaagccctcagtgcttgggaactgtcatcgtccttttcttctccctctctctctattactattcttatttgtgttacacacaagactgggagatgtgtattggttaggggccttgagccgcagcgcgttcccggtttgggcaactgcatctgctaaagattcccttggtgtgagtttcttccccatgcctttcatcactgtttctagacaccactgatctctatttttgtgattcctacgacttttcgccagagaggcttcttccaaatatgaccttaataaagatttcccaaagatcgttttcctgctgtaaacagcctgatccagaggatcaacctgaggaagcggcgggactcgctcatcctagggggtgttattgggatctgtaccatcctgttgctgctgtatgcgttccattgatgggacatcttcagggactcttgacagccaccgctttcacaccctggtctggaataaggaaacatcggagggagaagttgactgtcttgataattagcctgaccagcaggatgaatgcaagactgacagtgatggactctgtgacatggtcaggttgagctgaagccacagtttctctgtgctgtgttttctaacacatttttctgtttttaattaaaaaaaaaaaaaaaaggttttcagttgcttttgtctccctaggaggcaggtaaaccaatcaaaaacagagttttctgtgtttccatgatagtgttgaagcctaatgacaagccaggtcttacagctgggctcttcagaaaaccaggtttctacatccaaagactgcttttcttttagctgccagattggattgtgaataaaaataattcttccctctccctctccctctccccacggtctccctctttccacggtctccctctgatgccgagccgaagctggactgtactgctgccatctcggctcactgcaacctccctgcctgattctcctgcctcagcctgccgagtgcctgcaattgcaggcgagcgccgccacgcctgactgcctcggcctcccgaggtgccgggattgcagacggagtctcgttcactcagtgctcaatggtgcccaggctggagtgcagtggcgtgatctcggctcactacaacctccacctcccagccacctgccttggcctcccaaagtgccgagattgcagcctctgcccggccgccaccccgtctggaaagtgaggagcgcctctgcccggccgccatcccatctaggaagtgaggagcgcctcttcccagccgccatcccatctaggaagtgaggagcgtctctgcccggccgcccatcgtctgagatgtggggagcgcctctgccccgccgccccgtctgggatgtgaggagctcctctgcccggccgcgaccccgtctgggaggtgaggagcgtctctgtctggccaccccgtctgagaagtgaggagacctccgcccggcagccgccctgtctgagaagtgaggagcccctccgcccggcagccaccccatctgggaagtgaggagcgtctacgcccgggcagctgccccgtccgggagggaggtgggggggtcagccccccgcccggccagccgccccgtccgggagggaggtgggggggatcagccccccgcccggccagccgccccgtccgggagggaggtggggggcgcctctgcccggccgcccctgcccgccgcccactgggaagtgaggagcccctctgcctggccaccaccccatctgggaggtgtgcccagcagctcattgagaacgggccatgatgacaatggcggttttgtggaatagaaaaggcggaaaggtggggaaaagattgagaaatyggatggttgccgtgtctgtgtagaaagaagtagacatgggagacttttcattttgttctgtactaagaaaaattcttctgccttgggatcctgttgatctatgaccttacccccaacctggtgctctctgaaacatgtgctgtgtccactcagggttaaatggattaagggtggtgcaagatgtgctttgttaaacagatgcttgaaggcagcatgctccttaagagtcatcaccactccctaatctcaagtacccagggacacaaacactgcggaaggcggcagggtcctctgcctaggaaaaccagagacctttgttcacttgttgatctgctgaccttccctccactattgtcctatgaccctgccaaatccccctctgcgagaaacacccaagaatgatcaattaaaaaaaaaataatataataataattcttgtcctcttattttacactcataatgagaaatcacaagttctttcttgatgatctgtgctatagatttctactctgtctcctcaactctgttgatatttggggaaaattctgtttttcatagattctttgagatgctgatggaccagcttcagcatgtttgaggttgtctgaaatggagatcactgtaaaactgtctttttcttttaaattacaagtacactggggttaactgtattgctggaaaaacatcaagaatgacagtcttatatttaaggcaccagtcattgtttccattttttttttaattcttcccttggattaatattttctactgaaaagaaatgaaatctcagttccactatgataaaagaaacgaatcaccagtgtctgtcagtgcccccactgctcctcctcataccagcattgacactggtagctgaggaaggggactgctcaatttctaatgtgatctattcaagaagccacatataaaaaggcattgagggctcactgtccagagaattgcttttgtaaatgctccacaacgtatgggcaaaagtttaaggactactgcctgatgtaccaggaatcctgagttctgtgaaaatctgttcattccaaatctgttaagcatttccaaacatccagagaatggtttcactgttgagggtgcatgtggcagaatctgtctctctctgcacctgtcttctgttaccatccctggacagtgacagattttaagccagccaccagaattcttttcgagttaaccatttcttagtttctgtaaattcatgacttgtcttactgaactacagcctggtttgtagacttccaacatctacactgctgctcttcaccattggaattcactgtggtatttatagtattggcttcagtccgagccacaggcaataaaaggatatcagctgtagttctcagctacatcatggtgtatagatgctgttattcaggcgaacttgctcatgggtggactaacacctggtttggtacagagactgagaagtttttcattctggtgtcaaagttttgttacattatgggtgtgaagggcatttgatatatttttcttaactatggggtttatttttctaaatgtgggttgattgactgttaattgattcagggtacccttaaaagaaaagaagttttcccattgtgaaccttaaatgatcagagaagtaagttcattgattaaattctctgttgggagaacaaaacttttctcccttgacactttattatctttgatttttcaaagggccttgattggtggttgtgtctcggttaaaatttatgggactttgctatgtagttggcatttataaaatctgaagtatcataaataaagttatttatttaattatactaccagtcttttttactggtctgattcttttgtgcattcattaaagctgattgtgtgagagtgaactgggacacaagctagtctagctcactgcagccaagcaaaccctgttgatggctgatgggcctttccattagggttttgcttatgtgaagtaatggaattatgttggttattttctttatgaaaataaaccagttcttccaaggaagttaaaaggcttggtatggatgttggtgtcagataggtctgactaacctctccgtgctgcagcctatactaaggtgacccagggccacatgtagacagctaggccagtgctttttcctcttagggtttctttgcagaaagaaacctccagcaagggaagagaggtgtgtgtccacaggaaggggctccgtggggatcccatgaagggatttgagctctttcagctccatgtcatttaacttttttgtttaaccaccttggctttctctccttttttgctgtcctccttacggaccagttaccagattcagaggctaacagttagttacttgttaatgctagtcacagccaggaggtcagaaggaattttctacttctggatccaaatgttacctcttaggggaagttatgccccctcaactattgtcttattataatgaatctttcctttttggtccttttaagtaaccactcaaaacttttcatttcactgaaaaaatatgaaaaaccatgacaatagggctgggtgcagtggctcacgcctgtaatcttagcactttgggagaccaaggcaggcggatcgtttgaggccaggagtttgagaccagcctgggcaatgtagcaagactctgtctctgcaaaaaaaattaaaagatacctgagagctcmctttaatatcaaggtatttgcatccattcccaccctgttagctcttaagggaggagggaaatcaattccaaccatactttcctgtgatggaagatgtttcctcttgaaaaaatgccaatacagatttttaaaacctattgttttccaaatgcactttgtaagtttttgcttttaaaatagcttcttggaaccaattttattgtatttgtacttaatttttgttctcatctaaatgtgcattttctgactgtatagaagaagctttggtatgtaatttaataataaattagaaatctaaatgattgcatttgtaattgtttatattgaaacagtaaccatcaaggtagtttggggatagagattatggtatctctggtgttgataagtgtttctcatgatgtcctgaaacccaggatgaaataatacaggtgctgaaaagctgtcacatgtcattcagaaaccatcatatgaacagtccactagtattttagccctagaagtgaaggggaatctcttaacatgaaacttcaggaggcataatgggaatctacaattgtagaattggctgggtgcagtggctaacacctgtaatcccagcagttcgagaggccgaggcaggaggattgcttgagaccagggatttgagaccagtctgggcaacacagcaaagaccttgtctctacaaaaactaaaattagccattcatgatggtgtgcacctatagtcccagctactcggaaggctgaggtaggaggatcatgagcccaggaggtcaaggctgcagtaagcaacgattgtgccactgtactccagcctgggtgacagagaccctgtctcaaaaataaattaattttttaaaaatcgtgtactgctgggctttagtacattagttgtgcaaccagccccactgtctaattttagagctttgcaattaatccagccagtgatcaattcctcttctataaaatggtgataaggatggctaccataattgtgccctgattatattgtcagggttatgtgaggaaatgctcataagcatctcagcaaagccaggggtacagggctcacctgacataagagatatccttgggtttgtcctaatagcgagaaaccgggcctcttttgcctctttttttccctcttgctgatgtgggagaggagagaacattcaagaggtgatcagcagacatccttaattttgataaaggcagctgagcggggaaatataaggtcggttctgtgtagatagacaggtggaacccagcaatcagtttaaccagcctccaagcggttctgatgcatgccagaggtggagaaccactactctagagtgtcacgctctataagtacacacattctatttagtcattccattctagaccgatagcttttatttttagtttggaactattacaaattgtgctgctctggacattctcgaacatgggttttgggacacacatgtacacttttctgttgcttatacctaggaataagattgttggattataggtgatgcacatactcagttttaagatatgttgtcagacatttttccaaagcaattgtgccaatgcccgtgcctaccagtaatgtgtgaatattccatttccttcacatcttcagcaacacttaatgatgccagtcagaatttgcatttccctgatagctaacgaggttgggcatttttacatgcttgctagctgttaggatatctttctttatgtaatatcccttcagatgtttgcatattgattaatccgactgtytttttccagttaatttttcctttgttgaataaatatgttgcaaatataccttcccattctgtgacttgtcgtttattttctttcctcttttttttttttgagacggagtctcactctatcatccaggctggagtgcagtggtgtgatctcggctcactgcaacctctgcctccctgcaacctccacctcccagattcaagcaattttcctgcttcagcctccccagtagctggggttacagtcatgtgccaccatgcccagctaatttttgtgtatttttagtagagatggggtttcaccatgttgttcaggctggtctcgaactcctccacccacctcggcctcctaaagtgttaggattacaagtgtgagccactgcacccagccatactttcttttttctttttcttttttttttgagatggagtcttgctctgtcacccaggctggagtgcagtggtgtgatctcagctcactgcaacctccatctcctgggttcaagcgattctcatgcctcagcctcccaagtagctggaattacaggtgcgggccaccacacctggctaatttttgtatttttggtatttcaccacgttggtgaaataattttcatgtatttcaccatgttggtcaggctggtcccgcccacctcggctttccaaagtgctggaattacaggcatgagccaccatgcctggccttgttctcctttcttaatggtggttttgatgaagttcttaattttaatgtaattcaatttatcaatttttttcctttgtggttagtgtttttgtatcctgttaaggaatctttgcctacctccaatgccatgaagatattctcctttttttttttttctaaaagctgtattattttgcttttcaatttagaactataaatattgtgcaactaattactatgtatgatttgaggcaggggtcaagattcatttttccatatggatatgcaattgatccagcaccatttgacaaggtcatccttccttcactgcactggagcaccagctttgtcatgagtgaagcaattgtctaggtgggagtctttttctggatgtttcattcttttccattggtctgtttttctacccttgagaaaataccactctatctgaattactgtaattttacaataagtcctgatatctggtagtacaggtcctgcccatttgttctgtttcctcaaggttgtcttggctattcttggtcttttgcatttttatataaattacagaatcactttgtcagcttccaagaaaaacgtgctggattttgattggtattatactaaatatatagatcaattggaggagaatgaacatcgttacagtattgactccttcggttcatatcatgatatttccctccactgatttcaatcctgttaatgtttcagtactgctccacctgtctgccctccaggctggtgctggcctctgggatggaggagcttcaggtatacttggagaaagaaccccaggtgtctcctccaacccttcatgttctctccttgactgtggcaaggagaggtgggaagggaagagaccaaataggagtcagaggaaaggaggctgcagtaacccactgcaccttggtacagggtcctgtgctggagaaatctagagatgataaaatatgtaaggaaaaaaacacaaggctggttacaatcatactgggtagcagacaatgggatgtaaaggagaaagaggcctggacacttgggcaagaagagagcttagtatgcatggattggacaggactggtcctaaaactaccttcatcacaaaaaagctgcatgtccctggagaagactcccctcattgggcctctttcctcaccgtgaaatgagaggacttggacctgatgctctggatgcttccttcagctctgccactaggacactggtactgatggaggatgatggcaagaagctaggttgaatgtaagtgacttgccctttgccctgtccctccaggtgtagtctttgaactctaaccatccacgcactcttcctttccacagaacagatccctgtttcaggctgacttcatcccgctggatggaattccagccaatgtgatccaaagagggaagcagtaccaggctgcagccctcgtcatgctgaagatggagcctcctgggaagctgctacccatggtcatccaggtgagggccctggacctccctgcctacactgtgctctgttcattttaacctctgctcccagggacccagcctcctgccttttggctcccaaagctacccccactcagcaggtccagtccttgtgttcagccacccagtgactgcttgctgtcttgtccttcctcacctggaactaccttctgagagtcataacggcatctcttggttctcatcctgaggctactcaacctctttgtgacctttgaatctattgaacattccctctttcttaaacatgttttctccttttggttttaatgatttttttttcactcctattgttcacacagtgagtggacagggattgtcagttatctcatacatccagcttctccttctcattccactatcctgactcagaccctcatgacatttctcccaaagcactgttagccttacttggcttccttctaccattctctcctgcacttaacctatcattgtattcacagggcaccacagatagtgagaggcagggtggaggggtcttcattcttcatactacctggaaggcaataatcttacattagccatatgttccccccggaacactcagcatagcatcatccatatggggagaggtgaataaatgcttaattcttcctccttctggcttcaccctcccagcttcagctctcccaccccaatactgttcctgccctcaaatcctttgcttgcctggctcctggctaaatcctggatctgaaactccgattccaactgcacaagctccgatactatttgctgaacactcatctcgtagctgaagtcattgctattgtcaccataatgtgcctcccacgtttgcgccctgtcttcaaggtacaagctccaccactctccgtgtcccaaagcaacaacccaacagctgcctagttttaaagaaatctgaggcacctgggacaacatgtaaacagagctgcttgaaatttcacaaacatccatatgatattacagcagagaatcttcatggcaatttgtaaatggaggcgagaggagatggataattgagccagggccttcagccttgtgattgtacttttaatgtctaaattaatttaatgtaagctaattatagactcacaggcagttgttagaaatactaaagagatcccatctatcccattaagtcaagtcacttagcatttatccagtacatactgtagggtggttctctgaaattctctagtagtgggtcttgagtagagtaggaatacaaatatattaagcaaaagtgttgcatctgcattgggagatttatcatttatcatgaaagacaggcagtacatatgagaaaaaaacaaaacagtatctgtgatatggtttggatgttttccctccacttctcatgttgaagtgtaatccccagtgttggacgcagggcctggtggaaggtgtttgggtcatggcttcatgctgtcctcctgataatgagtgagttctcactctgaattcacacgagatctggttgtttaaaagagatcttgctcttgctcttgctctcctgctccctctctccatgtgacgtgcctgctctgctcccccttcaccctccaccatgattgaaagcttcctgaagcctcactagaagctaagcgatgccaacatgcttcctgtacagtctgcagaaccatgagccacttaaacctcttttcttagtaaattttcccgtctcagataatccctcatagcaatgcaaaacagactaccacaatctagaaacagagtttgagatgaagagaaatagctgtaatcactatagtatctatggagaatgttccaccacaagtggggagtctttaggtagaagaccaaagggcaaggcgagcagcccagcgggtttctcatacctgactaaggagagaggtagataaagacattagcatggcagtgacaggaggatggaagagaaaaatcaaatacgtggtgatgggggaagagtagctgcagcatgcctgtgtccaagatggaatggagatgtaagcttcctcaacacctaggagcctacggggggcatgttgtacttccctagaaatactaacattttacaaaacagtgagtctactatctattgcgaggcagaaagcagcaaagtaaaacttgtgcttgcttaaacatgttttcaaaatctttatgacattttatatatagaaaaagggagcaaaatgatataagcttatgaaccagagcagtggtcagaaacagtaaagtcaggagaaggaggcagtttcggggacaaagatgaggtgttctgttttagatgcatggagttcgaagagttggcaagatatgcaagtgagcgcctggcaggcaggacagctggattgtgtttctgctgctggtcaccacctccacccccaaatctggctattactagttgtggtccctctgggtctgagagaacatagataaggtaggcattaatatactttatggaatcttagatttgattgcgttcatgctgcctttgcctcaccacctggtgcccaggttgaataggttaagcccactctcacatctcagaatcccccttcactagttcagccctctgttcactcatctccctcgcataaccacttcctcctatggcaaacagctgagttgttgtcaagacacagaggagggctaagcccacaaatatcataaaagtgacctgtgcaggctctggactcagactgttggagtctgagtcctcagtacttaacaggtgtgtgtttcagggtcctcatctctgaatggagataacagaatttccattgtgaggttgttaagggattaaacgacaggacaggcagtgtgactcaggataaataggagcgataggcgagtctttcctattactatgtagcaatatgttattattgttagttgtttatccttgggtatgttgttattattttttattcttttttttaccttcagccaactcactccatgttgttgttattagttgcttatcctgggtatctacccacttcatctggactttgggttttctatgacattcaccatctttccatggagttttccaggttcaagccaacgtgagctgctttgatatctttgcctcaagagtattctttgggccggtcccgtgtgtccggcattaaagaccttagatagataccaatggcataaatcctgcatatgaaccagttgaaaatgaaaacaaaatagttctttttttgtttttttagagacagggtattgctctgtcacgtaggctggagtgcagtggcacaatcacagctcactgcagcttcagcttcctgggctcaagagatcctcctgcctcagtctcctgagtagcttagtctagacatacaccactacacctgtgtacctggctaatttttaactttaattagggacagaggcttgctgtgttgcctaggctggtctcgaacttctggcctcaagtgatcctctgccctggcctcccaaagaactgggattataggtgtgagccaccatgtttggccccaaataggttaagaataaaaaaatgaatgcgagaatcagggaccccttttttaagagtcaaagaaaagcaggaaagaggaaacctaatagtatctaactgggggccagggaagatttgatgagaatagcttggctttgctccatgaattctgactgaagccaccgtactcaacaccacttcaatataaacaataagagtaagatgatcagagattggaggaacagctttgaaaataagcagaggctagtttaagctataaggatgtgaatgatggaggaggtatataaaaaatcaaacgttaaggggctgattcttaaagggcagctgtactcaagg

SEQ ID NO: 96807 - DNA, 71360 bp, Homo sapiens
  misc_feature (1)...(71360): n = A,T,C or G
gtcctttaaaaggtattatataatgggctataaccgcttcctttggcaatatgtcactttaattattgctgtgcactaattctctactctgccacttgcatcatgggcattagattacacccatgaacaccaaagaacctatcctaaattatttggctttattctatcctaaattaggctaaatcctactctttatcatcttgcattaaaaagaacattgatttgaggttgaaatctcattgccattgggcagtcttgggcaagtccctccaactctctgagtgaaaaaagtatgttcaactgcaaaaacgaaaatgaaaaatgatagcaaaaactacagttaccactcactgagaagtgtaaggaatgaaaaaaaattctacttcaagacagataactgcccttcttttttctcctacacatgattcttctagtctcagatatttaggattaactggcattaactgctataggatgcagccacagacccctaactcacaagtcaatacatcttttattcaactgcacgtttgacatagtttctagtatacatccctcaaaaagtagttatcattattacttaacagcacagtgcagtcaagttcttaaaatgttttcaaggtaaattcagaccaccaaatttactgttcaagtaaattcttttgctagaagtaggtatttccttcagttaattcattcaacaaatattgactgatcgcctaggatatactgagtagtgagcattgttccagcagtgcactaaacaggagtctctgttcctgctgagtttatactctactaggaagaaacaaacaaactaaataggtagtatgcagagtgctgaggagaaggggatggtgaacgtgaaaaggagttataattttagataatgaggacaagaaaggctttgatgaaatgtcctgtgagttgagacccaaaagaggtgagggtaagtcacacagatccctgggaagtgagtcttctatctatgatacaggacatattttgaaggtagagctgacaagtttgaggataaatcagatgtatgatgtgaaaaaacatgaagaattcagaatggctcctggatttggggtgtgaacaactataaaaatgtagttgccattagcttagatgagtaaaactctggatctaagaatgaggcctagttagacatgctaggtttgagatgactggacatcccaggagagatgctaggtaggcagtggttatatgaacctggaagagtctggcatagagatgaaaatttgagaatcacagcacatagatggtatttaaaggtgagtggatgagctcaccaagggaaagagtgcagacagaaaagagatgaggtccaagaaataagttcagggtaacttcagcataaattaggagttgggagatgaagaatcagtgagcaggaacagctagaatgtggtgtcctggaagtcaagaaaggaaaaagtttcaggaggtacagtgatcagctgggttgaatgctgctggcaggccaagaggagggctgagaattgactgaccaatggatttagcaatgtgatcactgtgtggttcaactgaaattttcaaataattagtgaactttgaacctaaggcttacttgtaccttaacctcaaaaccaagtactccataatttataacttgacctataatctcaggctcaaagcacatgccaattgatactaaccttgctccaggcaagatggtcctcaacactgtctattgaaagggcaatcaacttaacattcctcttggcaaattctggtgccagctttgcagctctgccaagctctgtggtgcacactggggtaaagtcccgagggtgggagaagagaatgccccatctgaaaggaagaaaaacaaggtcacaattgaattaagagttatcaccaacatcacagagaatgaaaagtcacaacttctggatcaaaaacaggctttcttttttaaatgaatgcttatgatgatatttacttttaagcttttctgttgaggagtgcttttcaatctacttacctccagagaagcctatgcttatagcccaattcaatcaaagacatgaaattcaagatgacacatatttaaaaagactaatgttaaggtgttgcctcctttaataattatggtgccaccctgactcctttttggctaatacaatctgtgctattcaagccaagtagttcactgaaaacacttaattatttcttcttatccttttctacatttttttctagcatagaccctgacattcagctccaataatggatgtcccagtatgccctgaatccaaacaaatgcctgactgcaataataaacaaattatgtaatctgaaataaataggtttctatcttctatttatatgtaaaaattaaagttgacacttggcttctctgaagcaagtggatataaaatcttttgtaaaaccactttactgatcttacctgccaaacatgacacccaatatttatactctgacaaaacaatagcaccttcacagttttacctatctcttcatttgcagtttctttttcttctttcttcagaccaagcaggtagaattttgatagcctgcaatgtagatttctacaacagcaaattcttaggtaaatactaatatctaagtcatcattgtctaagattttataattttgagcacatttcaagctgtcacgaagaaagctgaagtaccatttccttcttcttggcaacagaaactactctttcaactgaaaaggaaaatttaacactcagttctccacatccccatcaacttaaaccatcctaaaccagatgatttaggcaggatcctaaactagtagataactaaatctagcctagatgccaagttgacctttctgaagtttccctgagcacagagaacaagcaaagacaagggcacctccttcctacttacggctgccactcaactcccaaggtttcaagaaggaaaaagatcttcttacaaaaaggatggagggccctatggcaagactgggaggaaagttagtatttttttttaagattgtggaggtgtgcactatgttcactttactatgaagggcaaaaggaagaacatagagtatatcttttgaagtagataatatcactatgagtaaaatctaggccttagattctatggaaaacgatctatttaatggttagatgagacttaacagaaggtctccagaagttgagaagaaatggaacagggcgtttcctcctctatcgttaaaaggaggataaattagaaaagttaggagttctttttccactgtgagtccataaagactgttttgctgaatcatgcaaaaggaactggttttaagccagttcacgtccttccctccctcagaagtgaaactccagtttacctcatggctacaaataggataaactccaagaatgtcttaccttggccttccttcccctccaagtcttcctactgctgcacttaagagtaattcagtgacatgctcccattttcttacccattttcaaaagacaaaaggtttcctccttcaagagaatggttcccacttactaagccccagaagacccctggaaaacacatattttgcttagtgaagatgtactatgaagaagctgcttctaccacttaaagaaacagcgataaggtaaactcacccaatgtagcacccaacctctttagttgtttacaatgatcaggggtaaggtagagaaatacattttaattttttcttctcaaaaatacctggatcaaaaattgacagtctgatttgggatcatatacagaatagaaaattggaaaaatcaggcaaaaatccacgtgtcataaacatataaaaggctcaaacttctcttcccggtaaggtagggaatactatacctgatcctaggcagacttgtatattagttaataaatgcagatatttctaccgtgttcctaactatggctccctgataaagtaccacttttgatcaaatctagatggatctagaggccaataaacattaacaaaaccccaaaaaagtatggttagcttaaaaagtgacagcatttataactgttggcacagtaaatacgttttatgctaatatttaatctatacaagctaagagttctggaaatagtttatgtttcatggggatgggggatgagggctgcaggtagaaatgggaaggaacacaactctaaaaatcccaaggattgctggagaaatattactacctagatcctaagtataagaatggccataagctgtatttctaaagtatttttctgcattcaaggtttgaatattccatttctcaacctttttctggcctagtcctatctttcacaaagcttaacttttccctattcagtggctggaaaagggacttaagaggttataaagggttggataggcatatgatgtgtaagaatctgtccctggttctctgcacagccctgtccaatcactgattaatttcataagcctgtctccctggatactgtatataaaaaggatataatctggggaagaactgttgtcaagccttggagccccacagtgtagtgggaccactagtactccagaaccataatataactagacatgcctggaatgcttctgatgaaaactaagcaacttccagtttgctgattcaggagctgttaaaaaaaaaaaagggcaacaccgatttactactcctatccataatggtaaaactgccaagtcagatcacaggtcatcaatttggctatcatcagcaagctcatgtgctagaagcaaggtagaaagcggaggggacagtgaggggcaagccactggaaaacaagagagtctcaaagttggggagtacacgtgtcctggagcctggaacggccatcactagcaagaataggccactccagcggaacagcgtcagaaagtccttccctccaagtgttgcaagttctggaatctctgaaggcacacctacgcagagtgttcttggctcttcctaaagctgttatcaaatcatatcttggccattggaggcggctctggacaaaaagtctttcggccacctacttggcagctagtggttttaaatttcacattttgtgcccagaagcctgcaaataccactgcaccctcagatgatacgttggccttcctgtaacctatagccagcagctgtgtcctccgactttggctttagacacccatcctccccagggagcaaattccagaacggagggtgggagggcggtgcgaccctgggcactagtccggggaagtgatcgtcaatgccgccccgcccctgcgccctcggcctgaccacgctacctgcacagtttactaagacgagttaaatggacaacaaaccctcccgcgggcggtgagtttccagaacccgcagaacacaattttatcctccccaccccccaccttggcgtggccttgcccagccacgccggaggcggggaggccaggagggatcgagtggcccgcgcagggcaggccgaacgggtgccagctcccagcagcgcagccgacgctgagcagaggccacacggcctggcgcgcgccggaaccagtgcgggggaaggcgagggcggcgcagggggctgagcggccgggaggacggcagggagaagaaacagggaaggcacctccgagtccggcgcaaccgaggccaggacagggctacgcggtggccacttacgagtctcccagaaagtcgtggaaacggatgcggccgacggtggtattggcctcaaagttgggagccacgtccccgagaagcagacctccgggcatggcgacggtgatgagggggcgccgctgggacagcaagcaaccggttggttctggcgaagaagcagcctgtcccagcgcgcggaggaataaacgaaggcgcgaggggcggggactggggcggcgggggcggggccgcgggaggccggccgctgggggccgggccgcgggggctgggctgggcgcggggcggggcggggctgggcgcggggcggggctgggccgggccgggctggggccgggacgcggcgcgagctggactaccgcggtcgctgttggtggcgccgccgggcctgcgactaggtggcatccttcagacactataggccgtctctgcacacgtgatgcggggctcggtcacgttgccccctggaagcttgaggatgcgccaggtttgactctgcagggcgtacgcgctttagggatggaaggaagaggaacgcggcaggaaggcgagccccaaggtggagaatcgcctgggcgcgcaggctgcggcggcttcgcacagccgccctgggcgctgcacgggtccgcgcgcaccctgctgcgcacccactcgcggccagctccctacagaggagtggagtgactgctcgactaccacccctcttttagtgtgagcgtctggagtcctgaccgccccagccagcccagctacgatgaactgtctaagaggatgtggcaagacccagaagtatgggtgaccttatgtcagaggaagtggctttcttattgcagcaaaaattcccgtaccaatgtcagtgctagggtaatgtaactaaacttttatttatttttattctgccctcccctttctgtttgttatgaaccataaaatattcaacacaattatcttgaaatctaaatataaaatttaaaacatactctttgagacctactgtgtgcaggtcaactctgtcacccagggaggtgggcggcttagattcatttatttgctatgagccaagtacaaggtagataagatgcctgtcctcttggagctttccttcttgtgaagggaaaccggtgacagacaataagcacacaaaccaaaatatgttagacagcaatcagtcgtattcagagaactaaaatagggttatgtgcctagagggtgactggggggctgctttggtttgggtggtctggtctgggaaagccaccaggataatgtaggtaaactagtcagctcacggtaggtgctctggaaatggtagctatcgtttggatgatgacactggctcatgcagtaactcttgctttgcctgctgtgtgctggacactgtgccaggccatacagtggagaaacacagtccctgctgttacagggaaggcatatttatatgcaattataataaaatgtagggtaaattctgatgggggaaggtgtaaatgattggagttcagagatgagaaaaatcctctggatggggctggcaggtttaaggcaggggcatggcaatrttgagagtagtgactcacatactgtgatttgcgttttcatcacagtgatgtgttggtgcgtgcatgctaatcatatttaccgagttcttcagtgacccaggacttgcagtaagattactggtaaaaatttctagccacttcacaaaaccgtttaaagctaatgtaatttaatctctaatttggctccaagttttaacagctccttgttttaactccctttgtagggaagaaagagaatarttgggaaagaagagtagtttggcctaaggcactgttaacaatatgttgtggaaatcagctagaaaacacaatactctataaatatggagaatgaatacagaaacagattattgatgtctgtcaaaggcataattatattattgtctgttgtaaattaagcaaatataataaaatactcattagaatttacggtgccagaagctgtacactggcaatgcttctgcactctgtgaacttgtttgctttagactttggagcattttaaattgtcttgaattagctgtccactgaagggggccagcccctccacgcctgtgggtgtttctcgtcaggtgggatgagagactgaggaaagaaataagacacagagatgaagtatagagaaagaacagtgggcccgggggacggcgcttagcatacggaggacccggcactggtctctgagttccctcagtatttactgatcactatctctactatctcggtgagggggatgtggcaggactataggataatggtggggagagggtcagcaggaaaacatgtgagcaaaggtctctgtgtcgtaaataagtttaaggaaaggttctatgcctcgatgtgcacataggccagatttatgtttgactttacacaaacrtctcagtgcagtaaagagcagtattgcctccagcatgtctcacctccagccataaggcggttttttccatcttagtaaatagaatgtacgtcgggttttacaccgagacattccattcccagggatgagcaggagacagatgccgtcctcttatctcaactgcaaagaggccttcctctttcactaatcctcctcagcacagaccctttactggtgtcaggctgggagacggtcaggtctttaccttcccacgaggccatatctcaggctgtctcagtggggagaaaccttggacaatacccaggctttcttgggcagaggtccctgcggccttccgcagtgcattgtgtccctgggtacttgagactggaaaatggcggtgacttttaccaagcatactgcctgcaaacacatttttaacaaagcacaccctgcgtagccctaaatccattaaaccttgagtcaacacaacacatgtttctgccagcacagggttggggctagggttacagattaacatcatctaaaggcagaagaatttttcttagttcagaacaaaatggagtttcttatgtcttcttctttctgcatagacaacagtaacagtctgatctctctttctttcgtccacatcagcattttgaaaacatgatttttcataaaartatctggatttttgtctcctgaaaggtcagaagatctagcaacacagcaacaccaggcccatgttccatctggcaaacagtggctgctgagtagccttttagagggcaatgttctctgttactcagaaggtcctctgccagttactaacattagagtagaattgggaggaaaaagaaatagttcttgcattcttatctgtcaaaactgtgcaaatgaaagcttaactaagggctgtatatttcaagaaaaaaatgatcatgtttctttgtgaaagtagagaatgttccatgaacttaatatgcaaacaaagtcagaagaacgctgttctgcctggccttcgtaggtaattgagtttaacatctgacttataccaaaggtaggtgctctgtggactgggccccattccagagggaaaattttaaagctattttcctgagggttagtgagatgtataatgggaaaggaggaggggaggaaggacagaggagacattccagggaaagaccggagtgtggaaaagggagagcttgactaagaaaggatttactttccttagagagagggtggaggctctcctatcagaaaaagtgttttcatacagctataagggtcggagagaaccttgaagtccttacagtaatctgagggacaggaaagaatggatttcaggcatttccagagggctgtgactctgggatgactcacatcttctcttctgtctttactgctttgacagaagaataaaatgaacagattagcaatgggcatttggaaaaacaacagtgcaccatgatgcctgtctctctcactagattgtgaactcctaaaggtttgactatattttattaatgaatatttgtgacctgttacacatagtgggcatgaggactacgttgtacaaagtattagagaaacattgggtcgccttcctgcagccacaacagcaaagtttcttgtttgtccacagctgggagtaaaagagcaagatgtctctagttatacagtcatgtgatacaacattggaccacatatactacggtggtctcataagatgataatggagctgaaaaattcctttcgcatagtgatgtcttgaggatcctgaccctgtgaagccctaggctaatgtgtgcatttatgtctttgtttttaagtttaaaaagtttcaaaagacaataaccttttagaattataaaaaagcttatagaataagaatataaaaaagaaaatacagtattttgtatagctatacaatgtgtttgtgttttaagctaagtgttattacagaagagtcaaaacattaaaacaattttaaagtttataaagtaaaaaagttatagtaaggtaaggttaatttgttattgaagaaagaaatttttacacatgaatttagtgtagcctaagtgtacagtgtttataaagtctacagtacattcattcaccactcactcactgtctcacycatggcaacttccagtcctgcaagctatattcatggtaaatgccctatataggtgtaccattttttatccttttttttttcattttttttttttaagacagggccttgctctgtcacccaggctggagtgcagtggtgtgatcatagctcactgcagcctcaagctcctgggctcaagcagtcctctcacttcagcctcctgagtagctgggactacaggcacatgccaccatacctgggcaattgttttatttttggtagagacggggtcttcctaacctgtgttgcccaggctggtctgaaattcctgggcttaagtagtcctcccaccttagcctcccaaagggctgggattacaggcttgagccatatttaccatggtgttataattgcctacagtattcagtatagtaatgtgctgtgcaggtttgaggygtaggagcaataagctataccatgtagcctaggtatgtagtagactataccatctaggtttgtgtaagtgcactccataatgttcacacaatgacaaaattgcctaatgacacatttctcagaacatatccccatcgttaagtgatgcatgactgtaattagagctrggtaaaaatccctgtaccaatgggaggagacatataaaactaaaattaatgttaggatggtgagattgtgttttttttcaactctataaactttcttgttagatttgattgtcttttcagaaataaagaaagcttgggcacagtaacctgtacatatcattaaggcagtcctgtcaaccttcagtgagtggggctgataatctctccactgcttttctttatcatcgtaatagttcgttttcatgatgctggtaaagatatacctgaaactgggtgatttatacaggaaagaggtttaatggacttatagttccacatggctggggaggcctcacaatcatggcagaaggcaaggaggagcaagtcacatcttatgttgatggtggcaggcaaaaagagagcttgtgcaggaaactctcatttttaaaaccatcagatctcgtgagactcattcagtatcatgagaacagtgcaggaaagacctgcttccatgattcagtcacctcccattgggttccttccatcacgtgtggaattgtgggagttacaattcaagatgagatttgggtggggatacagccaacccatatcattctgcccctggcccctcccaaatctcatgtcctcacatttcaaaccaatcatgccttcctaacagttccccaaagtcttaactaatttcagcattaactcagaagtccccagtttaaattctcatccaaaacaaggcaagtcccttctgcctatgagcctgtaaagtcaaaagcaagttacttcctagatacaatggggttacaggcattgggtaaataccgccattccaaatgggagaaattggccaaaacaaaggggttataggccccatgcaagtccaaaatccagcagggcagtcaaacttaaagctccaaaattatctcctttgactccatgtcttgcatctgggtcatgctgatgcaagaggtgggttcccatggtcttgggcagctccacccttgtggctctgcatggtacagcttcccacttggctcctttcacaggctggtgttgagtgtctgtggcttttccaggcacacggtacaagctgttggtggatctaccactctggggtctggaggatggtggccctcttctcacagctccactaggcagtgccccagtagggactctatgtgggggatctgaccccacatttcctttctgcactaccctagcagaggttctccatgacagccctggccctgcagcaaacttctgcctggatatccaggcatttccatacatcctctgaaatctaggcagaggtgctcaaacctcaattcttgacttttgtgtgcctacaggctcaacaccatgtggaagctgccaaggcttggggcttgcaccctctgaagccatggcccaagctgtatattggccccttttagtcatggctaaaagaagcagctggaacacagggcatcaagtgcccagactgcacacagcatggggaccctgggcctggcccctgaaaccgttttttcctcctaggcccccaggcctgtgatgggaggggctgccgtgaagacttctgacatgccctgcagacattttccccattgtcttgggtattaacatttggcttcttgttatttatgcacatttctgcagccagatcgaatttctcctaagaaaacgggattttcttttttattacattgtcaggctgcaaattttctgaactgttatgctctgcttcccttatraaactgaatgcctttaacagcatccaagtcacctcttgaatgctttgctgcttagaaatttcttctgccagataccctaaatcatctctgtcaagttcaaagttccacaaatatcttaggcaggggcaaaaagctgccagcctcttggctaaaacataacaggagtcaccatttctctaattcccgacaagctcctcatctccatctgagaccacctcagcctggatttcattgtccatatcatgatcagcattttggtcaaaggcattcaacaagtctctagggagttccaagctttcccatattttcccgtcttcttctgagccctccaaactgttccaacctctgcctgttagtcagttccaaagttgattccacatttttgggtatctcttcagcagtgccccactctactggtgccagtttactgtattagttcattttcacactgctgataaagacatacctgatactgggtaatttatatgggaaagatgtttaatggacttacagttccacatggctggggaggcctcacaatcatggtggaaggcaaggaggagcaagtcacatcttacgtggatggtggcaggcaaaaagaaagcttgttcagggaaactcccatttttaaagccatcaggtcttgtgagactcattcactgtcacgagaacagtgcaggaaaggcctgcccccatgattcattcaccttttactgggctcctcccgtgacctgtggaacttgtgggagttaaattcaagatgagatttgggtggggacacagtcaaaccatatcaatcatgtttaatgttgtcattatatctactactccctattatatctactacaggacttctacaatctggagagaaatcaaagtaggaaatgtaggagtgaaaatgaaagacaacagctaataaaatgctacaatgagaaataactctcagagggattttggagtagtaaattattattgttattatttgattcaggacctcacttcacccatgctggagtgcagtggcattaacttggctcactgcagcctccamctcctgggctcaagtatcctctgcctcagactcctgtgtagctaggactacaagtgtgcctacactccctcataaagaaagctggctacttggtgattgcacaggaccattgatctggatactggctattacatgtgtttagtttgtaaaaattaatcaaactgtatatttaagataattgctgttttctctgtgtattttgcagtacttcaataaggttaaaaaaacaagaagaaaagaaaagaaaaagaaattgccactgtgtgtacattakaatagttgtatatgaactattattttcctgaattgttcaaaaagctcactccagtgtttcaaaacaaacttcaggaagtttcagtcaatgttgctaaattgttaaaatcactataattaccaggaaggttcttcttacatgaaaaacattgttgagatcaggctttctttataaaacctttgtttagatgcatcctgggtgtagaggttcattgaacgattgatagcccatagcctctggctgtgattgagtagatagcccacccagagatggtagacatctttgagatyctctactctacaaaattctttacatattcactcattgagatagttgacatccctgcagcaagtggtacatttgactagcctggtatctggttgatatggttgactgtgtccccacccaaatctcatcttcaattgtagttcccataatccccacatgttgtgggagggactctcatggtgttcttgtgacagtgagttctcacaaaatctgatggttttataagaggcttttctcccactttgctctgcagttctccttgctgctgccatgtgaggaaggatgtgtttgcctctccttttgccatgattgtacgtttcctgaggtctccttagccatgctgaactgttagtaattaacttctttcctttataaattacccagtctcaggtatgtttttattagtagcgtgagaacggactaatacactggtgatctctcagtgcatgttagtgcttttcctgaagatccttccctcaggatatttgccttttagtaagtagccatcagactataaaggatccctgaagttttgactgggagtcattttgatgtagcctaaaaatagaccactatactttaatttwaaaaaatttaccagataatgtgctcaacatacaccctttccatttcacagagtctcggcctcaccctttcttcactcgtgtgtgagccacacccaggttcagggagggagaaaagaatattgagtgtttgagaagatcagttgggcattacttagtgataaaaataatatagtttttacattttggctcatcaaaatgttctttatggagaacttatccagtggtcactgcagagtgttagagtcataaatctttacagtggaagggaactttgaggtcatataatacaaaccctatctccaacccccctaccaccattttaaagctgaagaaactgagttcaagtcaggaatggatttttaattttatcaaatgtcttttggcctttagtaacacaaagcatgaagcttttctccttaatctattagtgtaatacatgaatacatttctaaatgttcaatcaccttgtattcttaggctaaatcctatttggtaatacagttttattaatagattcttagattagcatggaggctgctgcacatccatttatacttccttattttctaatagagtcactgctgtgttcaggtatccattctcggtgtagctagctgtcttggggaagtcgacctcatttccagctctagagatagtcctgactggtccaagataatcagtattaatgtaactggggaatttattagaaatgcagagtatcaagacccataccagacctactgagtcagaaaccctggggatgaggtccagcaatgtatattttaacaagtcctccaggagatgctgatgagctggtctaaaacaactccattctggtgattagggttggttcagttatgagcatgtaatccaactcttgctagtaagcaatgacgcttgctaggtgaacttctgcgaaaagtgtctttggctcctgagtagaaatctaaaagagttagtgtttcatctttttctggaaatcatgtctggatgcttggaaatattgcaatcatgttgctacctaaccaggaatgaaataacacaaagaatgacagaccaggaagatggaaaggatggattctttttttaatttccaactttcattttaagttcaggggtacatgtgcagcatgtgcatgtttgttacataggtaaatgtgtgccatgttggtttactgcacagatcatcccatcacccaggtatgaagcccatcattcattagctattcttcctgatgctctccctcttcccatgccctgtcctctgacaggccccagtgtgtattgcttcccacaacgtgtccatatgttctcatcattcagctcccacatgtaagtaaaaacatgtggtatttggttttctgtttctgcattagtttgctaagaataatggcccccagctccatccatgtccctaaaaaggacaagatctcattcctttttatggctatatagtattccatggtgtatatataccacattttctttgtccagtctatcattgatgggcatttaggttggttccaggcctttgctgttgtgaatagtgctgcaatgaatatatgcatgcatgtatctttataatagaatgatttttattcctttgggtatatacccagtaatgggattgctgggttgaatggtatttctgcctctaggtctttgaagaattgccacactgtcttccatggtggttgaactaacttactttcccgccaacagtgtaaaagtgttcctttttcatcacaacttccccagccatctgttgtttttgactttttaataatagccatctgactggtgttagatggtatttcattgttgtattgatttgcatttctgtaatgaacactgatgttgagctttttctcatgtttgttgtccacatctatgtcatcttttgagaagtrtctgttttgtcttttgcccactttttaatggggttgtttgtttttttcttgtaaatttgtttaaattccatatagatgctggatattagacctttgtcagatgatagattgcaaaaattttctcccattctgtaggttgtctgttcactccaatgatagtttcttttgctgtgcagaagctctttagtttaattagatcccatttgtcaattttggcttttggcgtctttgtcatgaaatctttgcccatgcctgtgtcctcaatgatatttcctaggttttcttctgaagtgtttatagttttgggttttacatgtaagtctttaatctatcttgagttaatttttgtatatggtataaggaaggggtccagtttcaattttctgcatatggctagccagttctccagcaccatttattaaatagggaatccttttcccattgcttgctttcatcaggtttgtcaaagatcagatggttgtaggtgtgcagacttatatctggattctgtattctgtcccattggtctatgtttctgttcttgtaccagtaccatgctgttttggttactgtagtcctgtagtatagtttgaagtttgggagcataatgcctccagctttgtttttgttgcttacaattgccttgtctattcatgctcttttggggttccatatgaattttaaaatagtttttttctaattctgtgaagaatctcaatggtagtttaacagaaatagcattgaatctataaattactttggtcagtatggccattttcacgatattgattcttcctatctatgagcatggaatgtttttctgttcttttgtgtcttctctgatttctttgagtggtggtttgtagttcttgaagaggtccttcacttccctggttagctttgttcctaggtattttattctttttgtggcaattgtgaatgggatttggctgtcagcttgcctgttgttggtgtataggaatgctagtgatttttgcacatagattttgtatcttgagactgctgaagttgcttatcagcttaagaagcttttggactgagacattggggttttctagatataggatcatgtcacctgcaaataaagatagtttgacttcctctcttcctatttgaatatgctttatttctttctcttgccagattgccttggccacaacttccagtgttgactgggagtggtgagagagggcagccttgttttgtgccacttttcaaagagaatgcttccagtttttgcccattcagtatgatattggctgtgcatttgtcatagatggctcttattatttggagacatgttccttcaatacttagtttattgagagtttttaacatgagggatgttgaattttatcaaagactttttctgtatctattgagataatcatgtgatttttgtctttagttctgtttatrtgataacttaacatttattgatttttgtatgttgaacagccttgcatcccaaagatgaagccaacttgatcatggtggataaactttttgatgtgctgctggaatcagtttgcctgtattttgttgaggatttttgcactgatgttcatcaaagatattggcctgaaatttctcttttttgttgtatctctgccaggttttgatatcaggatgatgctggcctcatacaatgagttaggaggagtccctccttttcgatctttttgaatattaaattgtttcagtaggagtggtattagctgttctttgtacctctggtagaactcacctgtgaatctgtctggtcctgggctttttttttttgttggtgttggggtgatcagacccaacaccaggtcatgggggtgacaaagtccagcagagtcaaaggattgagaaaaagacagtttgagggagaaaggtggaaccaggaggccattgttagtgtatggaggctgtgaaggctctgagctctgggagcccatgctatttattggtaatccaacagagaaacaggtggtgagaatgtggaggtcagaagagcaggtgcatgatctacagctgtgatggtttggcatttataaggaacatgttctgctacttgagataatgaagatacaatcgaactaggagcctaggagggctagaagcaaggagccagcaagtctagacacattccagaggacattgtggcagacatgcgagccctgcctcagctttcttcccaacactcagctttttcccaacagttggtaggctatttattactgcttcaatttccaaactcattattgtctattcagggattcagtttcttcctggttcagtgttgggagggtgtatgtgtccaggaatttatccttttcttctagatttttctagtttatgtacatagtggtgtttgtagtattctctgatagttgtttgtatttctgtggggtcagtggtgatatcacccttatcacttctgattgtgtttatttgaatcttttctcttttattctttattagtctagctagcagtctatctattttattaatttttttcaaaaaaccagctcctggattcattgattctttgaaggktttttcatgtctctgtcttcttcagttctactctgattttggttattttttgtctcctgctaactttgggttggtttgctcttttttctctagtttgtttagttgtgatgttaggttgttaacttgagatctttttagctttttgatgtggacatttagtgctataaatttccctcttaacagtgctttagctgcattctggagattctggacattgtagttttgttctcattggtttcaaagaacttcttgatttctgccttaatttcattatttaaccaaaagtcattcgggagcagattgttcattttccatgtagttatatggttttgagtgaatttcttaatcttgtgttctaatttgattacaccttggtctgagagactctttggtatgttttcagttcttttgcatttgccaaggagtgttttacttccaattatgtgatcaattttagagtaagtgctgtggcgatgagaagaatgtatattctgttgttttggagtggagagttctgtatatagctatcaggcccacttgatccagagctgagttgaggtcttgaatgtctttgataattttctgtctcaatgatctgcctaatattgtcagtggggtgataaagtctcccaccattattgtgtgtgagtctaagtctctttgaaggtctctaagtactttctttttctgggtgctcctgtattgggtgtatatatacttaggttagttagctcttcttgttgaaatgaaccctttactgttatgtagtggccttctttatcttttttgatttttgttgatttaaagtctgttttgttataaactaggattgcacctgtttttttctgttttccatttgcttggtaaattttcctctatccctttattttgagcctatgtgtgtctttgcacgtgagatgcgtctcttgaagatagcatactaatgggtcttggctctttatctagcttgttattctgtatctttttttgggaggcatttagcacattttcatttaagattagcatttttatgtgtggatttgatcctgtcatcatgatgctggctggttattttgcaggtttatgtggatacttcattgtatcattggtatgtcagtgtgtttttgtagtggtaatggtttttcctttctatatttagtgcttccttcaggagctcttgtaaggcaggtctggtagtgatgaatttcctcagcatttgtttgtctgaaaaggatcttatttctcctttgcttatgaaacttagtttgcatatgaaattctgggttggaaattcttttctttaggaatattgaatactggcccccaatcttttctggcttgtagggtttccactcagaggcccaatgcttgtccgatggccttccctttgtaggtgacctggtctttctttctggctgtccttaacatttttttcttttttcttttttttttcagatggagtttcactgtgtcacccaggctggagtgcagtggcacgatctcagctcaatgcaacctctgtctcctgggttcaagcaaatctcctgcctcagcctcttgagtagcctgagtagctgggactaaaggtatgtgccaccacacctggctaatttttgtatttttagtagagacagggtttcaccacgttggccaggctggtcttgaactcctgacctcaagtaatccacccaccttggcctcccaaagtgctgggattacaggcatgagccactgtgcccagccaacattttttctttcattttgactttggagaatctgctgatacatatcttagggatgattttcttgaatagttatcttactggggttctcttgttcctgaatttgaatgttggcctatcttgctaggttggggtcattctcctggatgatatcctgaagtatgttttccawcttggttctattcttcytgtctctttcaggtaccccaatcagttgtaggtttggtccttttacataaacccatatttctcagaggttttattcattcattttcattcttttttctctattcctgtctacctgtcctatttcagagagatagtctgcaagctctgggattctttgctctgcttggtctattctgctattaatacttgggattacattgcgagtacttgtagtatgtttttcagctctgtgaggtcggttatggtcctttctatactggctgttttggctgtcagctcctgcattgttttatcatgattcttagcttctttgcctttggttaggacatacacctttagctcagcaaaattggcttttgtccacattctgaagcttacttctgtcatcttgggctcagcctagttctgagcccttgctggagaggtgttgtgatcatttggaggaaaaggggctctctgggtttttgaattttcaagatttttgcgttgattctttctcatttttgtgggcttatctatcttcgatctttgaggttgctgacctttggatggcgctttcatggattgttttgttttttcatctttttcttttagcagtctgtttactcttccttacagatgctgcagttagctgggggtccactctacaccctggttgcctcagtttttcctgtacttggaggtatcagcagtgaatgctatgaaacagcaaagatggcagcctgccccttcccctggaagctccatcccagggcggtactgtcctgttgccagcatgagcacacagtatgtagggggtggctggagaccccagttgggacatctcacctagtcaggaggaacgggatcagggatccacttaaagaagcagttgggctgtttttgatagagcagttgtgctgtgttggggatcccatcagccccttgttggtttgggctctccgaggcccacaggctgaactggctgaggtgcccaacagccaagttggtggcccgccttcccctctgggcactctgtcccagggaaaaattagaagtctgttggccacagaacatgggcgggggtggctggataccccagctggcatgatctacccgtcaaggaaaagtggatcagggtcccacttaaagaagccatctggccatgcctcaatagaacagccttgttgtgctgggaaactgcttctgcccttgttggcttggactctctaaagcccactggttggaatggctgagtcattcaaacagccagcttggtggccctcctttcctcccctcctcccctcccctcctccttccctcctcgcctcccctcgggcatgctattccagaaagagatcaggatccgtttgtggaatacaggcagagatggctggaggccccggttgggaggtccctcccagtgaagaggaatggattggggccccacttaaagaagcaacctggccacgttcaggcaatgccgctgtagtgttctgggaagacccttccttgtttgaaccatatggattctccgaagcccatagactgaaatggctgagtcaaccaaacagtagagatggcagcccacccctcccactggggactctgtcccatcacaggtaggctatattccaagccagtaggtcttattttgtgaggtgttgtggaagtgggacccacagattgatgctgcttggctccctggattcagcccccttcctaggggtatgtacagacctcccaccttgcctgagttacagacacctctgttggggatcctggggccggaatatgtaaagttcctggatctctatgcatgcctgagcagctgctctgctgagactcaacacacctctgtgtgtgggacccaagaccctggtgatgtgggtgcacaaggtggtgtgggtgcactgatctcctgatctgtgggttgcaaagatccgtgggagaagcgtggtttcctggggttgcacactcactcactgcttcccttggctgggggtgggagttctcttggcttcatgttgctcccaggtgggctattgccccaccttgcttttctctcttctccatgggtcgagttgtttctgtgatcagtcccagtgtgagtgcctggatatttcagttgaaggtgctatattcacttgctcctttcttcctctccctgagtgccacagacagctgctgcttctaattggccaacttggcccccctcccctgggttcttaataacgtaattaaaccacaacccatcctaaaacttatcctacttctagatttctgttgagttcagaaataccctcatttttaaagataattggagtcagggtttctgttacttgctgtcaaaagcattcttaattagacttgctaatatttgactttgsattttaagaataacccaatatgtattttatttttactattgtttagtatttagtatactttagtatcagaattaaatttgtcagtgaagtgtattgggaagtttttcatagtttgtactggccgaatgtttaaataatccaggaattatctgttctttatgatgtattagaacttactgataaaacaaactggaactggtgctttttttgaagttagagcttttgctgcattttcaagtttttctttgattattgggataatttcctctcttcatgagctaatattagtaatctgcattttgctaaaaatttgtctatttcatgtagattttctaatttactggtgggtatttggaattttagaattttaaaaatctcttaatgctgaattatttttctttccttgttgtagatatttgcattttctttctctttttttcttgttcacacttattaatggtttgtatgttgtattctaaaaacaaaaacaaaataaaacaattgctttatttaccaggtctatgcaattttgttttgccatgctttctagttcattaattttgaattttatttttattagtttctcctattctctgttggcttattttttttttttaattttttwaaactttcttgaactgggtgcttagatcatttactttcaatcttccgtatatattaagaagatcactgaaagctctgaattttcctttgagttaagactttggttgtatcccataagctttgaaatggagtgttgtttcattggtaatttcaaacagtctgtgttctagtactgatttccactttaatccaagagttgtttagaaaactgttttataatgtccatgtaattagattgagtttgctgtctttttcatactgatttcttgtttgattaccatgtgatctgtacctttagatatttgagattttatttgtgacttagtccttgataaatgtttattactgcttcatggctgtttaaaaagagtgagttctttctgtataaaggatacaacaaatattatctatgtacatgcctttctctacttgtttgttgatctatgtatgatgtccatcaccccttatctgcttaagctctaaaggtcttttctcttttccctactctttctctttctacatcatcaattcctgattctctactagatcattatattagcatacaaacatgctctagtacaactctctccagtataaatatgatgtgagccacatatgtaatttaagattttatggtagccatattaaaaaagtaaaaagaaaaaaaagtaaatttaattgtcatatatttcatttaacccaatgtatgtgaaatattatttcaccctataattgatgtaaaaattattgatgagatattgtatatattttctcatactgagtcttcgaaatgtggtgtgtaatttatacttatagcatatctaaatttatgctagccacatttcttttatatatacatattttttattattatactttaagttctagggtacatgtgcacaacgtgcaggtttgttacataggtatacatgtgccgtgttagtttgctgcacccatcaactcgtcatttacattaggtatttttcctaatgctatccctccaccagccccccaccccccggcaggcccaggtgtgtgatgttccctgccctgtgtccatgtgttctcattgttcaactcccacttatgagtaagaacatgcagtgtttggttttctgtcctcgtgatagtttgcttagagtgatggtttccagcttcatccatgtccctgcaaagaaacattaactcatcctttttttttttttggctccataatattccttggtgtatatgtgccacattttcttaatccagtctatcattgatgggcatttgggttggttccaagtctttgctattgtgaatagtgccacartaaacatacatgtgcatgtgtctttatcgtaraatgatttataatcctttgggtatatgtccagtaatgggattgctgggtcaaatggtatttctagttctagatccttgaggaatcaccacactgtcttccacaatggttgaactaatttacactcccaccaacagtgtaaaagcattcctatttctccacatcctctccagcatctgttgtttcctgactttttaatgatcgccattctaactggcatgagatggtatctcattgtggttttgatttgcatttctctgatgaccagtgatgatgagcattttttcatctgtctgttggctgcataaacgtcttcttttgaraagtgtctgttcatatcctttgcccactttttgatggggttgtttttttcttgtaaatttgtttaagtttattgtagattctggatattagccctttgtcagatgggtagattgcaaaaattttctcccattctgtagattgcctgttcactctgatgatagtttcttttgctatggagaagctgtttagtttaattagatcccatttgtccattttggcttttgttgccattgcttttggtattttagtcatgaagtctttgtccatgcccatgtcctgaatggtattgcctaggttttcttctaggatttttatggtgttaggtcttacatttaagtctttaatccatcttgagttaatttttgtataaggtgtaaggaagggatccagtttcagctttctacatatggtatactggccacatttcaagtcgtcagcagccacctgtggctagtggctgttatattagacaacttagttttcatattttttcaggtttaaaacttctagtttgacccaacgtttccttctcctaccacttatttctctgttcatgtttctttctttctcttccttcatacattgaaatacatcttgttaaatccaggctgggtgtggtggctcatgcctgtaatgccaacactttgggaggccaaggtaggtggatcacttcagcccaggagtttgggaccagcacctgggcagcatggcaaaatcccatctctacaaaaaaaaaaaaatacaaaaaattagccaggcgtggtggtgtgcacctgtagacacagctactggggaggctgaggtgggaggattacttgagcctgggaggttgaggctgcagtgagctgagatcacatcactgcactccagcctgggcaacggagtgagaacctgactgggaaaaaaaaaaaaaaaagaaaatccaatggaagcttttcttcaatttcaatgcatttgacagagttgattacttttttggaaacacttctttctctgcttccgttacaccaaactctcctattttttttttttgtttgtttgtttgcctctcactggctactctctctgtttcacctcttctcttacttctgaatgttggtgtgtctcaggaagttctctggctcttttctctatctgtagtttctctggagatgatatctagtccagcgcccttaaataacatatatatgctgttgatgctaatttttatcttcagacaagctcawcatttgtatagccatctatctgccaatttgacaccttgatctgaatatgtcacagacatttgatatatattcaaaatttaattcttaattctctttctttctaaccacaacaaactcattccatccacaaatgaatatactattttccctttctctttagaaggatcatcctgattcctccttttactcccctcccacaggagccttaacactaagtccaagcgattctatctccaaagcatatattgtaactgttcgcctttccccatctttactcctagcctctatattcaagtatgcttattattaatttatttcctcttagttccaaactacctttctttgtcctacttcacgatactggagatgtacactgcaaactacatttttttctcagatatctggctttatattaggttcagccaattaggggctaagggagtgctgaagggattctcaaagttggagaaggaaaaagagatttatcttctcctgttatttttgccttctccacatgacagtgaatgggtcagcacatacctggccccggcagtattccttgtggtggtgaattgttcctgtggttccagcaagtgaatgtcccccggaggtttcttcttcaccccagcagtgggtgacatgtttctgcaccagctgaaccatctccttagaggcccaaatgttagtctgctggagtcctttctctctttctaagtttcctccttgtttacctttcctttcatcttaagagtgatagctgtagtctgaggttgccacctctattacaccatacaattctcttttatcctttttagtggttaaccacctttttaccaagttaacagttcttcatgattatactttctttatttgaattactgtgtggtttctgtctcttgaccggacactggactcttaacggcagtagtgatcactgcaaggactgtagcataggatggatatttctgagtgtagtggagtgcttacagacagaagatgaaaagctcaggtccttaagctcttggtttagttctcggtctgagaactagaggacttccatggcagccctaacaggatcttttatgtcttgtagccacagggttggtattgttaaaaattaaacacaaaatttaattttacaggttgcagaactacaacatcagtaattttcttgggaaattaatgccaagtttctcatgtgaaagttaggtcattgattgggaaggagaccccaaaacttgaaatgggcacatatggttggtctcaagtgagagtgagaatcttgaacccctgagttgctctgagtctcccttgccagtgggagtatcttgctcttgtgtatctgcagaatttttttctcccctcaaaaaccctgtaattgcctctcctggagcaaatacttcacaaacaagaggatgctcactctcctyggagcctacctgaaacacccgttactgctgctagacccataactagggtcaattgtcatcatattccagtggygtggaagtggcagccagtctgtgaatataactctggccctgagtcccaagtttgccccttattccaaagagtcactgtttgctatgcagaggaagtatgggccaagataacctcaccaaacaccgggttccagattctcaagcagtccctttcaacaccatggtttcaaaaagtaaatttgagaggtaattttaaggctcttacatagaagaattctccccaaagaaacatatctatggtgattattgttcaattctggacctctcagcattgtttccttgctttgtcacttataaaataaatatacttctagctttctggctgtatgggtgatacatggcatagaaatcttgggtgggagaaatggggtgtctggcagggacagcccctttctctgagatttgttctcctgagctttctgagtgctgagtcatttttagcaaatggctgcattttagctgttgaaaaagaagatctctcttccaaggagaaggaatgtgggcttgtcctagtctttagatactgagctcaagtgtccctaaactaaattgtttcattttacagagggctagacaattaaagtatataaacagagtatttacatgtgttatatagtcagtaacgctgtttcccaagagtccccatgggcagataggtttattttacaattaacaatcacaaccctttgtgaagttttgattggcagattagaagcccagaatttactcttacacctctggggtttttgtgtgcccacttaggtatgaagtcagttcttgtcagtaagcactcagctttcatttccatctcattagctgagagtacaatcccactgaaaactcaactgtggcttgaggcctaatgggcacctgttaattttcctctgttccatagtcccatctctcagatcaacaacctgatcataaaggtaggtgataaaggtagttactcataaagatgtgtaactaattcacagagaagcatctctagtggaggataaacaattgaaagtacataattctggccaggcacagtggcttatgcctgtcatctcagcacttcgggcggctgaggtgggtggatcacctgaggtcaggagtttgagaccagcctggccaacatggtgaaacctcatccctattaaaaaaaaatacaaaaagtagctgggcatggtggtgggcacctgtaatcccagctacttgagaggctgaggcgggagaatcgcttgaaccctggaggtggaggttgtagtgagccgagattgtgccattgcactccagcctgggtgacaagagtgagactctgtctcaaaaaaaaaaaatttaattagaaaaaacaaagtacataattttgtttggaggcgctgagaagagatgatattggtgttgcctttttatataaagttaggtatttaatatttaagacaatttacaaagttaaactttgtgcaaggtgctggtataaagcattgatgagtttatagtgtgatgttcttttccctgacttcttttcctatatttgctcatttgtcattccattttctctaaacatttcttctttactattttttctcttacattatttaagtgtgttacaaaaataattgttgtctattgagattcagctatcccaaagcaggaagatatggattttgagtacttcttatagccatggtgggctgcactcctgcattttgcctttgccactaacagcacctgcttatgggacagttagaggcatgggagtagtagaagcaatgctaggtgccctaccgagatcaattccataatgttagacactaagctgtagccatctgccccttcgaagtctatctttgtcttgctccagcattaattagtacaattcctacttctctctgaaacaattttagttttaggtcattctctctgcctagctaccttgcccatatgaagtctggaaaatttcgttacgcagaggtgtgccacccagaagaaaatggttcggagtggctccattaagcataatctgaaaacataaagccatgtatttacgattagtctagaatgaactcttgagggttggggactctggctttgtattttcttgtggctgcctagcacattatgttttacttgcccaataagtctgttaatgcttacttaataaataccgacagccatgaataaaaactaagaagctagactgggtatttcaatagtcaggtggacaaattctgtgagaacaaacaagtaagagtgactaccttattcaccttcctttccaagctggggtttgtttttttattccagccttgtaacctaacctggtatcagaaactgttgatccaaggaggaaaaatgctgaaaacaaggccagagatgagagatatctacacctcaggctgtttcgtaacaggtgtttagtaaagacatcacttttagtttatattggctcatactctgcagagcaagtggaacgagacaaatctgggaacctgggctcagtgccacagttatactcagagacctgctgccacttccaggctgctggaacatgttgaaattggactctagttatgggtctagtggcaataagaagtgtttggggtagattttgaggagagtgggcatcctctcttttgtgaggcatcagctccaggtgaggcaattacagggttttcaagggggtaaaaaaagaaaagacttcttaaaagacacggaagggcaagatagtttctttttctacaagtttattagctttagactttatagtctatgatccattttgagttcattttgtataaggtgtgacatatagtttaggcttattcttcatatgtatgtatgtgtgtatgtatgcatgtattgtgtgtatatgtatgtatgaatttatgtgcatctgaatgtccaaatgttccagtatcatttgttaaaaataccataatttctccactgaattccttttacatctttaaagaaatcaattgaccataaatacaaaggtttatttctggactgtcaattctatttcattgatttatcttttcctttgccaatcccacatgatcttgactactataaagtcttgaaatcaggtagtatgacacctctaatgttatgttttgttttctttcttttggctaatctggttattttggttttccatataaaattttaattgtctaaatctacaaaaaaacctacaaaaatcctttggattttcaattggaattgcattaactctgtagattaggagaatttacattttaacaatattgaattttccttatccatgaatactgtatctccacatttatttatatcttctttgactttttcatcaatcttttgtattcagcaaattgattgtgcacatattttattgtttataactaaatattttccttatttttggtgctattataagtggtatttttgaaaaaaattcagatttcaattattcattgctggtatatcggaatataattaacttttttatattgacttgtacatatgctggcaccttgctaattcacttactagtttaaaagctttttgtagattcartgaaatgttctacatgaacatgttatctatgtatgaataaatatatttttgctttttcccttccaatatttatatcctttacttctttttattgccttattacactggctagtactttcagtacactgtcgaatgtgtcaagagaggacaactttttcttcccagtcttagggggaaagcattagtctttcatcatgaagtataaagttagatgtaggtttttcatagatgccttttattagtttaaggaagttccctactctttcttgtttgctggagtttttttttttttttttttttttatcatgaagtgattactgaatttattctaaactttttcttcatccaataagatattcatgtgattattcttttttagactgttgatgtggtgaattacattgatggcttttcaaatgttgagtgagccttgcattctggggataagccccacttgatcatgccatattattaatatcttttaaatatatttttggattcaatttgataatattttataagatttttgtgtctgtgttcttaaaggatattgggttgacattttcttaattgtaatgtytttggttttattgggtaatgccaatctcataaaatcaattgagaagtgttccttcctcttctttatctggaagagattatgtaaaattattatttcttccacaatgtttggtaaacttcatcagtgaaaccactggggcctagagaattctttttggaaggtttaaactacaaattcaatttaaaagttatacatacatatatatgaaataaatcattgctttaacataaacttttttcttcctgaatgaatttggtaattttttttaattttaaaaattagtgcattttgtcaaatttacaaacagcttttcatagtactgttcccttgttatcctcttaaggtctgtggggttaatagtgatgtttcttctctcatttctgatgtttctaatttgcatcttatttttcttggtcatcctggctagaggtttatcaattgtgctgaacttttaaaataatcaacttttagtttcattaattttctctattgtttttctgtttccaatttatttgagttctggtcttctaataatactttccttccttctacttactttgggtttattctgttctttttctagttttgtcacttgcaagcttagatccttgatttgagatgttgttcttttccaatataagcatttataaatttctctaaatcaccgttttaaatgccttctgcaaattttgatatgttgcattttctctttcatttacttttctaaattcctttgtggctttccttttggcccatgggtaatccagaagtatgttggtgtattagtccgtgcttgcattgttataaagaaatgcctgaggccaggcacggtggctcatgtctgtaatcctagcactttgagagactgaagtaggcagatgcttgagactagcctcagcaacatggcaaaaccccgtctctacaaaaaattaaaaaattagctgggtgtggtggtgcatgcttgtagtcccagatactctggagactaaggtgggaggattctttgagccaggaagatggaggttgcaatgagctgagattgtgccactgcactccagcctgggtaatagagcaagactgtctgtcacacacaagaaaaaaaaaaaaagaaagaaagaagaaaagagaaatacctgagacagggtaatttgtaaagaaaagaggtttaattgacttatggttctgtaggctgttcaggaaacagctctggcatcagcttcagaagaggcctcaggaagcttacaatcatggcaggtgaagccaggagtgggaacaccacatggtgagagcaggagcaggagtagggggaggtgccacacacttttaaatgagcagatctcacaagaactcactcactattgtgaggacagtaccaagaggatgatgctaagcgattcatgaaaaatccacccccatgagccaatcacctcccaccaggccccacttctaacattggggattacatttgaatatgagattttggtggagacacacatccaaactttatcggttggtttccaaatatttggagatttactagatatgtttcttttattaatttttaacttagttccattatggttcaagaagattgtcaggcctctgagcccaagccaagccatcgcatcccctgtgacttgcacttatacgcccagatggcctgaagtaactgaagaatcacaaaagaagtgaaaatgccctgccccgccttaactgatgacattccaccacaaaagaagtgtaaatggccagtccttgccttaagtgatgacattaccttgtgaaagtccttttcctggctcatcctggctcaaaaagctcccccactgagcaccttgtgacccccactcccatccgctagagaacaaacctcctttgactgtaattttcctttacctacccaaatcttataaaatggccccacccctatctcccttctctgactctcttttcgkactcagcccacctgcacccaggtggttaaaagctttattgctcacacaaagcctatttggtggtctcttcacatggacgcgcatgaaaaagattctttgtatgacttcagttattccaaatttgttaaagtttgttttatggtccagaatatggtttagcatggtgaatattccatgtgtgtttgaaaaaaaaagttttctacctttgttgggtagagtgttttataaaggtaaattatgtcaactggacataacgttgtttgggtctcatctgttggtactgattttctgtctacttctatcaattactgtgagaggaaagtcaaagtctccaactatggttgtggatttatctagttctcatttctgtttctgttttaagtttttggaacttctcttaataggtgtgtacatttaagattgttatgttttcttgattaattgaaccttatcccattatgcaatatctctgtttatctttagtagtatttcttgctttgaaatctactttgatattaatatagccactacattttttctttcgattagtgtttgtatggtatctcttctttcatcttattacttctattcccatctatgtctttatttttaaagtaggtttcttgtagatagttaggtcttatttatttttaatcaaatttgacaaactcgatgttttaattggtgtgcttagataatttatatttaatgtaattattgatatgtttgaatttattttattattgattttctagttgtctcctctgtctttaattcctctgttttccctttctattgatgtctcactatgtttgctgactctttttttcttttttctgtattttgctgtcgaacccatcaattgatttcttaacttcacacagtgtatttttttcacttctaaaatttccatttcattctttaaaaaaatctttaaaaagactatttttagagcagttgtgggttcacagacaaattgagtgaaaagtacagagagttcccatatgccctctacccctacacatgcacaacctcccacactgtcaacatctggtaccagagtggtacctttgttacgggtgatgaacctatactgaaacctcactatcacccaaagtccataatttacataaggggtttattcttggtgttgcagattctgtgggtttgaacaaatctataatgacatatagccaccattatagtatcatacagaatagtttcactgctgtaaaaattgtctatattctgcatattcatctctccttccctgctaaactctggcaatcactgacttttttactgtttctatacttttgccttttccagaatatcgcatagtaggaatcatacaatatataatcctttcagattggcttctttaacttaataacatgtatttaagtttcttccttgtattttcatgccttgatagctcattccttttagaactgaataatgttccattgtatggatataccacagtgtattagtcagggctccgtggagggacagaactaataggatagatgtatatatgaaggggagtttattagggagtattgactcacattatcacaaggcaaagtcactcaataagctatctacaagctgaggagcaaggaagccagtccaagtcccaaaayctcaaaagtagggaagccaacagtgcagccttgtctgcagctgaaggtctgagagcccttggcaaaacactggtgtaagtccaagagtccaaaagctgaagaacttggaatttattgtttgagggcatgaagcatccagcaggggagaaagatgaaggccagaagaccgagcaagtctacttttccatcttctcctgcatgcctttatagctgtactggcagctgattagatggtgcccacccagattgagggggggtctgcctctcccagtccactgactcgaatgttaatcttctttggcaacaccctcacagacacacccaggaacaatactttgcatccttcaattcaatcaagttgacactcagtattaaccattacacacagtttatttattcattcacttactgaaggacagtcttggctgcttcaaggttttggcagttawgaataaagtcactatgtacatccatgtgcaggtttttgtgtggacatatgtttttaactcatttgaataaatgccaagggatgtgattgctggattgtatgttaaaaatatgcttaattttgtaagatggttctttttttttatagtttctattattctgccaataatttctgtttttttccctttgttcaagagtgtttatctttactttgtggagcatagttacgatagttgccttaaaatctgtgcctgattattctaccatcttggtcttctcagtggtagcatttattgactgtacttttcatgcaaattagtaaacttttattggttctttgtacgctgagtgattttagattgtatcctggacattctgagtatttaatttggatgtttttcattaaaatcctcaagagatttggaagattgtttgcttatttgagtaggtaatcacactggttttgttcagactatctgtactttatgagtgatacttccaatgttatctcagttttcggaacctctacttggcagctttgagtatgttccatgcaygcacagctcagggttaagcctgggcctgtgctaggtcatacacagagttaggagatccatttctctaatctcttatctccgggactccccatagtcacctacctatatgttttctattcctcatcctctggctcaatagaccggggttcttttggagttttggctgcctgtgttgctaccaggtcctgtgaccaggaccattttgggtgctatgtggagatggaaaaaagagagagaaaatttacctactgacttactccagtactctctggaccacaggagcccttttctgtttgtttaactagaaaaacagaatttctattgggattttagccgaccatgctacttttcaccctggctctgctaggcaagctgtgaaaatgggggagggaatgagaatgcaaggattcctttctatgttcttcagcttaaaggatcccagccttctttctagacagaagggatttatctgaaagtattagctgtctgcagcacccccatcgcagctcatttgtgtgattgctttcagccaaagcctgtgaaaagaaagaggaaataaaatgagaaacttaatcctgtgcaaattgctgtttcagtttttgacttctcttcataatctgactgcatttctttacctttcagagtccttaggtagttgttttttgtattttgtccagagtttttagctgtaatcagcagaagaggtaggctttattgaattcactcttgactgtactttcttttatattcttttttcacttctatctgtactacctctctcaagatacaatgactgacactaatcctrtccttttattctttgaagtagaaaccatgactatccctttaaagaccacatctgtcacttcaggtatttttacttgtggctttcatttgctggctgagcgggtaaagcctgtttaggaggaatacaattcaagaacctcactttgaagctaaccatagcaaacctagtttacctctagaatgcaggtgacagtgtgcaaccactcctgtcatctgtcttttgtatgctcttcataagcaatcttcctcttccttcccagttcatttatttagcctctgattcattcttctcttctcccacccctttctcttctaccagccagcctaccaatacttattctctctgaaaggatcttatcctttaccagaagttcagttattacctctaagaaccagtcccttcccttttaaattttcttttccctgaaagagtcagttttatgtattagaaaaatgaaggtatatgttttcctttaaagggattataatcattacagaaaatttgaaagttttcaaaaaattaaaaaaaaaacccagaatttcccaaaacctgactatccaaagagaagcacttaatgttatgtgtgtgatcttgagtgaaaatttaaaatttatattagaacattttataaattatccaaactttttgtacgaaaaaaacagaaaatgtaaataataagaaaaaaaaacactcatcatcctaccatctagaagtaaatactggttttagttcagagtatgtgtacagatacgtgtgtgtgtgtttgtgtgtgtgtttgcaggctgcttggttggtttgagtggggaatagttgagcctgatctgggatcacagccttgctgtgttggagaaaggggtcgggtggagtgggtgttggtatgcaaaggttgatttaaataaatggtttcgattttggtatttggacaaggcttgaagtggaatctcctggtgaacaaaattggggaatggaaagaatttggtagtgttgtgttttgtgtcttcctgycccttttcttctgatttcccaaagagctcaccctgttctgtagactaaatcttaggcctctgtggcaacaaagactataggctaatggcttagatgacaaagaaaacaagagttggaaaggggctttctctacatttcaatcagaacatagcaggactgcagcacagtcagcactgaagtgaactccactgcatcagttttgtagcatcagggagttctagaaaacagtgccttgtgttgggaactagcattctaccagtaactatgatattggtggagcaagggtgaagagaggaccaaagtggaggaacatgaaggaaaaacaatgagcaagttattagaagtaacccatgaagactccaaaaaagaattaggggtgactttacgggggagagaggtcctggagtcaagagcctgagggtgtgtgtgtataaatatgtgtctatttatatctatatcaatcgctatctatatctacatctatctttcttcaaaaataggacatttttacatctactattgtataatatttcttcccttaataatatatcttgaaaatcttgtcatatcaaatatagaaatattttatcattttaaatggctgcattatattccattgactgcatgaggattccattgtaatcattgtatgcatgtatgtgagtatcaaaatttatttaaccattatctaggttgttttcaagctattatcaatttcttattagcagttcattttattattaaaataataatgtatttttctcctttaaaaaacaacattgttctggcttctcatactttcagccatagaatccttagatggcatttaaaagtttctgacttattctttctcatcttttctgcataaccacatttaatctgttttcaatttgatatacatggccagcggtactgccccaaagggaagaggcaaaatggaccctaatagtgcccacatgttgctcaccttctttcctgcccatctcaaggctcactgtctggcaaggatctgttagacttacatattctgaaatataaatgttgtaaaactgagtggcctggcatggtggctaacatctgtaatcccagcactttgggagggtgaggcaggtggatcacctgaggtcaggagtttgagaccagccaggccaacgtggtgaaactccgtctctactaaaaatacaaaaattaggccgggcacagtggctcacacctgtaatcccagaactttgggaggccgaggcgagcagatcacgagttcaggagttcgagaccagcctgaccaacatggtgaaaccccgtctgtactaaaaatacaaaaattagccaggcatggtggcgggtgcctgtaatcccagctactcaggaggctgaggcaggagaatcacttgaacccagggaggcgaaggttgcagtgagttgagattgcatcactgcactccagcctggacgacaaagcgagactctgtctcaaaaaaaaaaaaaaaaaaaaacaaaaacgaaaaaccaaaaaccgaaaaccaaacaaacaaaaaaacccgagtggattagatttctcagggacattttcattttaaaggcaacaaagaagttttagaagcaaatgattgaaattcttaggtatgtgggagaggtgttgcatttggttttgttttgaaggggttctggggaggagttgggggagcaggatcacttggatactcttgaactccatcaggacatgacctgtttttcctgaatgaaggtctgatcctggcggtcctggtctgtgtggtgggaatactatactatagaacgtggacttactgtgcatttactcccaactcagcattcagttatttcacagggggagcttgaaatcggtcagggtaagagcatttacaccatagaaagcagaaaatactacaactcaggtttttcatcactctcctcccaacccagatccagttattaaacattaccagcacaacattggcttcttattcctcagtttaccaggctgttactcaaaattcactctccagccctgctttggagcagttgggaacttcagcattttgatccacctttttggagccacctcatgtgaaagatggatgagaccttcgtcagcaaacctggtaagacctcaccagtcctgtcctgaggaatgggtgttagtttttgccttgcccttcaccctggagagttaagcatacgttctttgggtggaggtaaaatgtgactactctctccacaccacggggaacatcagaaacacaagtatgcaaacacacattcttgttcacctatacacaaataaattcccttttagagtgaaaaccagacactgtttaaagcgcccactttaaaaatgaaaactaagacttctgaaaacaagtaataacaactgatctttggacttaatttttttttgagacagagtctcgctctgtcacccaggctggagtgcagtggctcaatcttggctcagtgcaacctccacctcccgggttcaagtgattctcatgcttcagcctccctagtagctgggactacaggtgcacaccatcatgcctcgctaattttttgtatttttagtggagatgggatttcaccatgttggccaggctggtctcaaactcttgagctcaggcaatccgcccaccttggcctcccaaagtgctgggattatagggcttgagcaatggtaagggaggggagctataaggaaggagaggaagtgagattgagktagaaactaggaaaagcaaagagaagggaggggaaaaaggatgaaaaagaagaaaagggtgagaagtaaaagaagcaagtagggaggaaaagtttggagagggtggataggagaaaaaagtggactgtggaatggaagatgaggagcctgctgggctttggggtgartgtggtggttggagttgaactgttttggtttccttgggcacaggccctgagaggaggwtacccctgctctgactgcactcagaggtttagtaacaataatattctaagcttttatttttatttccatctttattgtctatttttgacaatcagaatattttctactgggattttaaacatcttcaccttgcgacaaaattacttagaactaaagatttagaaatttagtgattaatattagattgtattaatatgtatagcctgtattttgctttgatggattttaaaccttacagattgcattaattatttttaggaaagattgagaatgtgtcatttcataatgtctagatattgcatcttattaaaaaataaacctatttttagtctacgtaggagctggtatgaggatcacacaatgcaagcaaataaaatgagaaaagatgattcaacaagaggcttcactgatttactgtttaactgctttgaccaaagtgcttggttcttatatgaataagaaaggggatgagttatccaccagaatgaaagttatattctggtttgaagcttctgctgtcagataatatagttttctatagtgtggaagaacagcatcatcttcaagcaaggtggaattaagcatggacagaactgtgtttctcacccaggaggagggtaggtttttttttcttttttacttcttaaaacttattttaatattattcttccctcccccaccccattgggaaaaggctaaaacaatctggatgggtttaattagaaattaatacatactgtcattgtataaagtaaatcaacattgtggcaacaagggactattcttggaaaaagtgaaacccatattaacaaaatatgtcatggaagatccccacatagtgatttcactggctgcctgaaagacagacagtgtaaaggtcgatgttctgcatgttctctggggcttgtccatgcaacggaagaaggtctttcccagactcagccaagcctagttagctccaaccaggccctagaccaaaagcaagggaagagcacatcctttcaatagaataagggtagraagggattctctgaatgtagtaactatgaagctatgccaaaggtaggcagaaaatgggcttgggagccagacactccagggttcagtagttcctacccacagtctttgtgtgcttgctaaatggtgtacatttcttgttaaccaygttattaaaacttgatcagcatgtaagctttcttctgttagatcttttggcagcaaacaaccttccccccaagcctctgaattttggaggagggtaggcttgatgaattgtttagaaattttgtgtttggtggtggcaggaggggagggatcatgcggccttctggtcacaagcaagcctgcagaagattcagtggcctttccagttgacttagacagcctgtgtccctggtgtcactgactggcacctatagcaatacttggtgttatttagcttcttgtcacatacaactttcttctcttctttccttcaattgtccctttcctcctgacttctgtgagggatagcaggattgaggccacaggctgccactcagggcattcactctctgataagagtcagtaaggcagagccactggtgccccctgaacccctgctgcaggtgggcagaggctgggctgctagtgtggtatccaaaggacagtagctgtgctcactatggcagagtctaattttgagatgttggggattctggagaagaaacattttgtgtgctgctgagtcattaggaattgaccattataggtagtaaatagcagaacagaagaaagaaacaagactgatcatgaaataattggagcgaggagttctgctgactgtaacaatgtaagacatttgcatgtacattgtgtggttgattaggaaagaagctctttgttctgaaatgtcttcatcagtgaaagttgaagagatatgctcagctgggatacagtgaactcaatctactcctccaggactggatctgcagaactcagatctaccttccatgacagcttctggccgttggcatacagagctctcctctctctctgcacgtagcttgtcactcactcagcttgtattgatggggtggggcagtctcagattgttttataggtgcaattatttaacttctttagatgagggttgtgctttatgttactctctgaagcctcatttatttgccacatggtgggtacatgaagatacatgctaaatgaaagttgtgcaaagagctctgaacttggaggcagatgaccttggacttttactcagtctgtgttacacatgagcttggataagactgatctttcagctttcttcagaccttaagcatgagatataaaacaagtagaacatataaataaatagaagaaaatatacacaaatattacatgatctttgaattgtaagactcactaagcataaatgccactgaagaaaccacaaagaagagatttgccagtatggaaagctttttaattctatatatcagaaaatataataaaattaagaggcaaatgacctattgagaaaaatacttctacttggtaagtcgaagtatagaaaataagcaaaagatacagttcacaaagaaaaaaatacaatcagctgataaatatatgtggtcaaagaagtacactttaaatctacagtgagatactttttaatcagctcaaattttcagggggacccattcagtcttatatgatgctggtggaagtggaaatttcctggagcagtgtgtattaagagccataaaaatgctatttccttgaagttaacaagaaacttgctagacctgtatgaaggatgccaacttaaaacaatttataaaatgtatttatttatttttttcatgttgtataggttttaatgtttttgaaacaaaattaacccatggtagactttggtggacaatgtgagtcttctacctagatactctctaatttagtcagggtttaattaaagaaatagaagtactaggataaaaatgtatttgtttttactgggggacataccatgtttctgaatggaaagattcagttttgtaggtatacaaattttcccaaattaatatttaagtttagtgcaattccaataaaaaattctagtgggattttaytggggaggggcaggtgtgatgggaattgatgatgtgattttaatttttcttatttatgttctgagtaaaacattttcttggggtgcagaaaattttatgatggaagaataagaaaactaagaatattttgaataggaacaataagtaggaaaaatgtttgcaatgggatattaatatgtattataaacccacagaatctgaagacaagagtgatgractgtatatagatggaacagaatagagtgaccacatatgaaccctagtgtatgtgggaatttagcatgtgataaaaatgaagaaaaatacagtgaggcaaaaggtggttttgggtcaattgagaatcagtttgggaaaaagtaacaatagatttttacctaaaagagtacaagaaaacaaattccaaatggaattagttaaatgtgggagaaggacactaaaaaacttgaaaataaagatgaatgcctatataattttgtagtgagaaagacctttgtaagtacagaaaagctgtaaaggaaaagactgatagaactggttatataataacttaaagctacaaactaaattaataagcaaataattaataataagctatttacaacaaaaaaattaacaaagttaaagtacttaaaaaagaaaaagccgagagaccttgtctggccaccctcaggttgggtaattcacaagaatgacacacagtactcaggaaagcagttttattatgcttacaattttattatagcaaaaggacacagataataaaatcagcagagggaagcgacatagggcagagcctggaggggtccatgcacagggcttcccatcttcctctctctacagagtcatggattgtgttacctcctggttacgatgtgtgacaatacatacagaatactgccaaccagtgatgctcacctgagcctttgatgtccagagggtcaaagccctcaccataaatcacatctctagactggtggccaaagccctcaggccaacaaagatactcataacacgctgggcattccaggggcctagagatcacctcccggtagccaaaagccctaagttaattcttcactacacagaaacctatcattttatccctatcaagttgacaaagtgtaccagatgccatcagcgctgggacacatttctggacatttcagcgctccccattagatttctaagggcagtatttgcaactccatgcctgagggcttaaaaaaaaatgctgaaggccctgtgcccttttccttaagtagccctcacttggcagtggctcacacctgtaatcccagcactttgggaggacaaggcaggtggatcatgaggtcaggaattcaagaccagcctggccaagatggtgaaaccccacctctactaaaaatacaaaaattagccaggtgtggtggcaggtgcctgtaatcccagctacacaggaggctgaggcaggagagttgcttgaacccgggagggagaggttgcagtgagccaagatcatgccactgcactccagcctaggtgacagagtaagactccgtctcaaaacaaaacaaaacaaaatggtagccctcacttaatgacttttggagttgtcatgtaagaccttagccctttaggtgggataatgctggggcattttgtattatttcccagagtttctctgcaagattaagttccagttgcccactgtgataggtggcttagtaatgcaccctttattggctgccttcgcttctggttacttcttacccatatccatccctctgtatttctgtattactcagataaactgcctgcacttgaatccttgtctcagtgtctgcttctgggagataacaaactaagacataaaatttaaaatgaaattcagaggtggcatgagtacatggaaatagatgttcttctctgctcctttgtggagtgtaaattggttcaacctttttggtggatacttgggaaatatttatcaagtagctttaaaatatgcatagtctttaacttagtaattctacttctgagaatgtttcctgagaaatagctakggatgtgtactaggttttcttttctgttttctaaacaataaactactttgaaaatgaggaaaggacactaaatgacattcatgggtaaagcttttatgtctcattatattaaaggtaggatgcaacaaataattgactacagtttttctttcataagcaactattaatctttaaaaaactttcctcagaggtagattaacttttattgaatatagctgttaataagaaattttaaattgattgcatactgtattagttggcttgggctgccataacaaaataccatagacaaggtgttttaaacaacagaaatagaaatttattttttcacaggtttggatgctgacaggttcaagatcaaggtattggccagttagttcctagtgagggctccttcctgccttgtagatgtgtgctcatgcggcagggagagagagtaagctcgctggtgtctcctcttmtaaggacactaatcctatttcattggggtctacctttatgatcccatttaacatcagttacatccttacaccaaatacagccacactgggggttaggagtgcaacacatgaactttgggaggacacaattcagtccagagygtaaactaataaatagctcagttatttagtaagttttagaatgttcttatttgctccttttgttcttttccagctctctgggtcatatctattgatgagtatctctagtaggtaaagcctgtctcccatcactttctgggtccatctatataggggtttttgatgccattgtccaaaagacttggctttactgcttaccagcaagataggatcaggactatcagatatggtcatgagtgaccacgaagctgagagttgcagcagtcccctcagccttccattggttgcccctgtcctgttttcatgggccagctcataggtggaacctcagtattattcatgcccagcactccagtttttcaccagagatgaatcctaggccatttggctgtgatcctctttctttcttcagtgtttcactattttgtcccatggggcattagatttctctcccagtcaagagcacatctgacactgagaatttctctggatattcttctgtctgccaaatcagatttcctcaactaaaatcctgcgtgatccacagttacattcaccattctctttagacactgtatctcaattacccagatggtattatggttccggcctctgcagaggagtgtctttgctggcatttggtctccatggcatcgaataccttgcacacttttgtagccactcccatttcatgaccctcaaacctcccaaatgttgaatggtaacttttagaaaactaccaagtaacgtggataacacattccccagcacatccatgaactctcatctgtttgcacccattgttcactctactccaatgctatgcctcactggcatcttcttttgatttggcacttggtgatgaaaaaggtgaaaggttaacccactgattgctcacttaccagtctcacttgctcacttttctgccaggtctcctaagtgatctttcgtgtaaaaagaagtttagaaaatgctttaggataaattgtatgaggttcaatagggacaaaaaagcacctacatcataataacagttaacatgcacttgtaatatcctaattagatacaagacaagaaaatataagggaaggtaaagtaatttaaaacaactgtgcattagttttctagggatgctgtaagaaaataccacaaactgagcagatgacactgcagaaaagtgtgtcttatgattctggtggctagaggtgtgagaacaaagtgttagccaggttggctccttctgagggctgtgagggagagtctgtttcatgtttctcccttagctttggggtggcttgctggtaatctttggcattctgtagcttgtggcagcataactcatcttcacttggcattctccttttacatatgcctgtgtccaaattcccccttataaggacaccagccttactgaattaggggctattttactcggatatgatctcatcttaactgactacatctgcaacaaccctatttccaaataaggccatattcagaggtactggggagataggacttcaatgtatgaattttgaggggacaaaattcaacccgtaacaacttggaagtctttgtggtggatcgaaagttgagtcagtcagtttcttttatttttttttgagacgaagtctcactttgttgcccaggctggggtgcagaggcatgatcatagctcactgcagccttgatctccccaggctcaggtgatcctcccacctctgcctccctagtagctgggtctacaggtgcatgccaccatagccaagtatttttttttttttgtattttttgtagagatagggtttcgccatgttgcccaggctggtttggaactcctggactcaagagttccaccaaccctggcatcccaaagtgctgggattacaggtgtgaaccatctcgcctggccaagagtcaatttcttaagagatgtttgtttacttatttattccttgttcgggggtagaattattgtacctagctgccacccttaagactatactgcaagtctgtatatgagtaaatttcagattaagagcacactgtgtttggggcacttgagacaacactccttattgtgactactttagatggcctaaaagggcagcgtaatacgaggagtcttggggactgccacaatacatttatatttctgtgccttcaaagggttagtgaattagtactcctgagacttgacatcttgtttgcttatttttattttcccagtgtctagtataggcaaaaagttcctggcaaatgggtcaataaacattgagttaatcttaccaatcaatgctaagatgtatatgtatatgttacgtatatgtgtatatgtacatacatacatattttcacattttaccgtctttgaaataaaaactgtcttacaatacatggagcataacaattgtcacttttcttctcttaatagcaaatacagtaatgccttataagcattggtttcttagatttgatgaaatgggatatttgcacaaaatttacctaagaaattgstgtcgtttttacatgaacaaggtagattataggtaaaacacctaaaactggtttttaatgctccttcattttttttttttcaggagagttctgtattcctcaaagatccctcaagaattttgtcagtgttgccataacctcttgtttattagtctgcttgggttgccataaaagaatgtacacagactgggtggcttaaacaacagacattattttcttacagttctagagtctagaagtccaagatcagggtgccagcagggttggtttctagtaaggcaaccttctcactgtgtgctcacatagacaaggcctttcatctgtgtgcgtttgtggagagagatctttggtgtctcgttctctttctataaggtcaccagtcctactggattagggccctacccttatgaactcatttatctttaattatttccataaaggctctgtttctaaatacaaatacattggggattaggacttcaacatatgaatttgaagggtggaggtacacaattcatttcataacactctggtttggatggcaattgtctaacaaagatctagttgttttggactcggrtggctgtgagctggtctctgggtttggactggattcctcactggggagcaacccctcgccctttatcacctgtttatagcatattactaggaagtgatgtgtcttgcttcacattattacgtgccaaatgctaattgtggaggacctcttctkcttctaccctcttaggtcttagccattaggtattagttgtcaatccttaaggcctccttcacccagttcttttaggtcctctcagggcattgctacactctgctgatttcactttgctactattatcaagtgtgtattctagccaagggggctacatactgagcttcagcaccagcctgtgttcatgatacatcattggtcacaagtgaggctggaggagaactcatctgctgaggaagtaagcacatgacctgtcaccaaggagtcaccatttggccaagatcgaaatccaacactaaacttcattacacatcaccatcaggttgcagtcctgaacatgcattgtattccatgccttgcgagaccctgaaatgttgtcagtgaaggacagcaggcaaggtagtgcatgtgaaaacaattgttgaccatgaaatattttattcagaaatgagtaaaaaagaatctttgtagcagccagcctttcccctgggggagaaagctcagcagttggtttggtcagttggttcactgaaggcagatgaattggcactttgcagttgagagccaatgcaggctcacggaggtggcttctttctgcaggctgattttgggcccccagcagggcccaaggcccaacaatcagcgcatggctcttaattctgtgcaactaacaaatcccgtcccagtgtgctgagagcgccctctagtgcccagaaacttcctcaagaatggagtgtaaagacctttaaggaccttcatcaggaaggaaccaccatacttttgaatttcaagcctaacctgaagattattatttaaggaaaccgacaaattttctcaaagaaattattgtattggaaaatatttagaatgcaaacacattctccaaagaaaaccaaagacaactacagtgattcatttactttaggtctacaacaacaaaatattaatttaacaatacaaataacatgccctttagctctttgaaggatggcaatgaggaaaactggaaaataatgatctagcaattactggctgaaccacattctaagaaatgttaagataacaggtgaacattcaaaattcaaatttaccactttggaggctgcttatttgcatgacaaatggattctttgttttacagaaaggctttctcacaggcctgggttttattaccaattagccttaaccccagcagagctttaattagaatgcaaagggtttgtgggatctgtgggcactggaggaagagtgtcttatgttgagatttttataggattaagtacacagcctctgagttacatctgctatatatagcacaaattatataaacgttggtattgcctgtcacctaatacaattatttgtgcagacagagtatgacattaattcctgcagtgaacaactctatagacccttcaccctaatgtgtccatttaaatggagccctatttgctatgcacacactttttcaaagaatctrttagagaatgtgaataccaagttataagcaacaaaaaagaaagcaacaaaatataatgaaatccccattacatccctttgccctataatactttcccttgactttgctataagcattcctctggcattcccactcctgacccacaagattattaaatgtttattgtctcaactaactatgccaacaggttcgtaatatcgatacagagaaagtggaagactctgtgaaagttatttacattaaacatgcaagtgtaaaaaaggattgttgagcaacaggagtgagctaagaaggcagttgtgaattctgtgcattcaagatgaaacaatgttatttgtgtgtgttagctgcctggctgagtaaataaagaagattcaaatttggcgcagctgttctttctcagtgctgcctggatattagattccctgcaaccgtctgtgtgcttagaccccgcgttccattgcgtaggctgctggcaggcctttttttagcggaatgcagctgggagcaggaagggtggagcctgctggggtttgactcagcagctgtgggcgaggccctacacactctgtcttgaggactgtgataaaggttaaaaataaaggatagcacttgagtgggcttcataaggagtagcaatctaattatagggcttatttttacaaagcagcagctgacagcgtcagcccagcacgtcctaaaagttcttagtaaggcaggaagctgctacatttgctatgaccaatgtcactttaaggggtcttggcaattacattctcactcaacttttccttctgcaacaaggatatatgagggggattagaggatattgcaaaagctcaccttttattcagacccaattaaaaactaaacccactaaatcaacttcctctctcccttctcaaacatttataaagcgccaccacgcggcaggcacagtgctgggtgctgccattcacaccccacatggtcttttcccacagctggtggaggttgtggcgtagcctgtgctcagtcttggatctgtctcttgaggaccagtttctctttgggctcttgtttccaagagccatggagaatgagcagagcagcatctaacaaaggacggggtcccctctcagcttctctgtcttcacaagtgaatgtcacacattttaaactagaactctttctacttatttagcacctaacagatgctacgagaattctggttactttttcttttctgtttgggtcgggagcacatgtctaagtgtgacaaatgtgagcagattatttggagaggtgaggaaatacaggaaagaggggggccagtcttttctctcttttggaaaaataatcatttttcgtagaaaccagatactttcataatactctttttttttaaagaaatgttttaacatgaaaaaaatttcaaagatacatacaagtagagataatagtgtaataagtccccatgtactttttgtccagctttaacaattagcagcatgtggcctgattttgttttacacatatcctctctcctgtattattttggagcaaatttgatacgttatttctttctttctttctttttttttttccttagacagagtcttgctctgtcacccaggctggagtgcagtggcacaatctcggctcactgcaacctccgcctcccagattcaataaattctcctgcctcagactcccgaatagctgggattacaggcacctgccaccatgcctggccacaagttttgtatttttagtagatacggggtttcaccatgttggccaggctggtctcgaattcctgacctcaggtgatcctcctgccttggcctcccaaattgctggaattacaggcatgagccactgctcccagccaatatgttatttcatctgcaaatatttcaatatgtagttctatagataataattcctttttaaaaagtaaccacaaaacaataaattcaactaacattagcaataattcattaatatcataaactagtyagtatttaaatttataattatctcataaatgcatatgcacaatttttacagcttgtttgaattaagataaaaatcagctgcacatattatagttggttcctttttctcttaaatcttttattccatagattccccttccatgtccctctctgttttgttatcctggcaatcagttgaaaaactgagtactttgtcctgtagatttttatggattggatgcctgtggtcctctgtaacagtatcctccattttctgtttcttgtaaattagtacagtcatgcccctcataacaaaatattctgtcaacgatgaaccattatggatggtagtcccataagattataatagaggtcgggcgtggtggctcacgcctgtaatcccagcactttgggaggctgaggcgggtggatcacttgaggccaggagttggagaccagcctggctaacatggcaaaacattgtctttactaaaataaaaaaagtagccgggtgtggtggcgggtgcctgtaatcccagctgcttgggaggctgaggcaggaatcgcttgaacctgggaggtgaaggttgcagtgagccaagatcgcaccacttcagcttgggcaacaaagcaagattctatctcaaaaaaaaaaaaaaaagattataatggagttgaaagattcccattgcttagttatgtagccattgtaacatggtagcacaacacattaccttttctatgtttagatatgttgcaatacacactattgtgttacagtcrcctacagttttcagtacagtaacatgctgtacaggtttgtagtctgggagcaataggctgtaccatatagcctaagtgtgtagtagattataccatccaggttgtgtaagtacactctgtgatatttacacaatgaaatcacctaataacacatttctcagaatgtattgctgtcgttaagggatgcatgattatagttgactctagagacttatcagagtcagstttcatttttctgtcaaaacgacttcatacatggtagaaaaatctcatgtctctcttttttccygatgacattctttacactgtcagtgtagtttctgaacttagttgcaatctgtaagagagggtttcttgacttcatcactattgaagttttgtaccagctaattctttgttgtggggtcagtgggggggcgggctctcccgtgcattgtggaatgtttagcagcatcctggtctctacccactagataccagtagcagccactccccagttgtgacaatcaaaagtatctccagacattgccaaatatcctttgggagggtagggaaaaatcatccctggttgagaaccacagctgtagactaaccattagttattctgaaaggttatctgtccacagcctttaacgtttcaagtgctaatccattgaccatgagacctaggccattcactatgattattgtattgattttttgttggtgctgtgacaaattactacaaatgtagtggcttaaacaatacaaatttattatcatacagttctgaaggtgacgagtccagattgggtttcacagggctaaaatcaaggcatcaggagggctgtgttcctcctgcatggcgtttttctttgtcttcagagcctacagtatagcatcttccagtctctctctctctctgactgtcttgcatcccccttataagaacccatgggagctgtgcgcagtggctcacgcctgtaatcctaacactttgggaggctgatgcaggaggatcatttgagcccaagagtttgacagcagccctggcaacatagcgagaccttgtctctacaaaaaaatgaaaaaatctgctgggtgtggtggtgcgtacctgtagtcccagctactcggggccgaggtgggagaattgcttgagcccgggaggttgaggctgcagtgagctgtgttgtgtcactgcactctagcctgggtgacagagcaagaccctgtctcaaagtaaaataaaaatttaaaaaatgaacccatgggattacattgggcccactgaatagtccagaataacctctgtatttaaaagtcctttatttaatcatagttgcaaagtccctttgaccatgtaaagcagcacatttacaggttctggggattagaatgttaaagctcagaaaacaacactcctaagtatggcattttgacatgctgagtattttgaactaaagaagcagccatggaaacaaggtatctctgaccacctcctgtccgctgtctcttgcctatctgcctctcctgaagcacagggagaaaatttttctgaagttcccatatctgacaaagggaagcactttttctgaagtttccatatctgactaagggaagctcctccagaaggaagcaactgacttgagccccactccctataatctcatcaaacagggaagactgactcgcaggaaggaacgttagagttgacgccacacccagagcccagacgaactttgtttcaggttattatctgagtatataaacttctattgatacagcatgttggattattgggtactcactttcctgtgatgctccatgcacttgataagtctatatgccttttctccagttaatcagtctattatcagttcattttgaagactcaaacctcaacaggggagagaaagagttcttttgtcccagtaaggactttcacatcttttggggaccatatccacataactgaggccagaatgtgtgaaaaattcatcaagagatttacaaggaatgaatgcaggttgtagaatgtgggaacagtccatggtttggtcacagtgtccaggctcagcctcctcgctctagttcatagaaccacctggaacacacaaaggctgtgtgtgcattaaccatttactctatcatgtttctttcttgaacagggctgcatttttaactgcctgatgtccttttctgtctgtttttatgattgctggctcctccagctgtgtcccaaacagattcattgactttgcttctaaatctgctcttcttccccatatcactagttatgttaatggctttgccatcttcctagagccagatttcaacctcattatttacctcatctaacatgcaattatttgctaaatcctggggattccatttccacaggagcttttcaatctatcctttcttccctattcccagtgctattctcttatttcaggcctcaagttgctatttgtggattatgaaatagtctttctaaatgaccccctagccagtctccatagcttgtttttccttttctgtcaatggtcacacagaaacagctattcttatggagcactctaagtcagtaatacccttaaccttcaaaccactccctgagctgcactgagccaagtgtaagccagaaggcagaagttcaaattcacaacctataaaaaaataccaagacatcatcgaaaatcaaatccaagggaacttttgtacccaattaaaagaaaggagaggactcagattagctgcagggtcatatgtggctgggtggaatattgacaattcctgggacagtggaggaaaggctaggagtcattgcatgactcaatgctcaacctctcctttgaaaaacttgaatatttaaagaataagaaatatttaaagaatctctgattgaaggtgtgccaccttattgcatgcctraaaatccacctgtctggtcgcattcttcagatgaagcaactgaggctcagaggatttaagtaatttgcctgaggtcatgtagacagtaagtggcagaattggaattctgttttaggaattcaaagtttcatattctttccactgtatgacctggtttcatccacatttgcaacttcattttccattcttttctttttatcttaatgttgcagtaaaaccaaattcctcactcttttttgtgggacctggaacttttccacctttatatcttttctcatgtggttccctctgcctagaatggcccagaacctatcttaagccgtgaaaattgtacccttgaaaatccagcatcaacagcattgcttccaggaagggaacagacagtttctctctggctttaatgcacccctttcataagaactcatagaatcacattgggcccaccggcccacaaagatccctactttgaagtgataagcactagtagcagctcatagcttgtttatggctgtttccagtttgtgcctttcgttatagatagtcatgcataggtcttcctcttttagtgaacacattgttcacgagggaagagctgtgtttgattcatctttatgcttcccatagagtcttgcccatgagaagcactcaaaatacgtgtggactaaagaagcaagtaaagagaagaaatactttgtctagaattgcctatttctttctggtgtggtctgaatgtgttcccccaagttcatatgttaaaacttaatcaccaatgtgatagtattaagacgacaggcctaagtcctgagagcagagccttcctggatggaattagggtccttacaaaagagcttgagggagtgtttgttcttttctgttcttctgccatgaggatacagcattcacccccctttttgcccttctgtccctcccaccatgtcaggacacagtgcgtaaggtacctccttggaagcagagaccaggccgtttccagccaccaaacctgctggcaccttgatcttggatttcccagcctccagaactgtgagaaataaattttttattgtttacaaattacccagtctcaggtattttgttacagtggcataaacagatgaagacactctctaattataaaggaattgccaaggataatattaaaggcagacatagaagataggcatagttttggttcactttgcttccgtgtctttgtacaaattgttacttctccatcaccggtgggatgttctccttcctaccccatatgcttccaccagttcacagctaccagtttcttcaagacctggctcaaagcctagtccttcctaggggacttctttcctgagtccagaccactgcagttgcccctttatccagtggtcacaaggcatccacacaggctgacagttgctacctgatcatcatcaccagtcatcaagctgttattgcatacttggtatatgaaaggctctatgtcatgtgctgtgggggagggagggagagctttgcagaggaagtgggattcaagcagggtcttgaaggctgtgttttaattaaagaggtggaaaagaaggggaataaaataatggacaacattgaagatcaacttctactcttcttgttattggctatataattttgagaaaaatcttttaatccctgtggaaatccattttctcatatgtaaggtgggagtaataaaatctattattttagatttagggagggtgcttatgaggatcaatgtgaaagccccatgtattggtgagaatgaatttatttgcaagtgatattaataacttaattaagatataacatgtaaggaggctgaggcaggagaatcgcttgaacctgggaggcggaggttgcagtaagccgagatctcacygctgcactccagtgtgggcracagagcgagactctgtctaaaaaaaaaaaaatgtacatatatatatgtatgtaacatgtaacatctcttcagtggttaacatgaagctgacaaacctcctttctccacgacatcaactctctcatctggtggtgtccaccgtcttactcctgttggttgaagatggaagaagtcttgcatttgtacttccttgtgcaggggcccacatatgggtgttccgtcattccagtaactttacattgcttggtaattgactggttttccaaagagaagggaactgaattgtctccccctcctctgcacacactttgttgttttaagtctgcacctttgcttgctgttgcctccactgcttggaatgcrccatcttctcagcctcagcctggtcagcagttactgggtcagtaagagtcagctgaggtctcactctgtgaagtttccctgacctcattttgacctcctagactggccaaggttccccttttctgtactcccatgccgtactgggtattgctctctccagtgcacagttatcacaccatactacaaagacctgcctctctcactgggctctccatccctttaaggctggcacatagcactcactcatgacatggttgttgaatgaatgaatggccttcctccattctctcccagtcctttttttttttttttttttcactctgggcaccaccattccttctctctcattctgcattgtttatggcttgttagttattaatgcaaagccatttctgggtctctagacccattggtaatggccattggtaatgtctctaggtgttaataataacactagctcacatctactgagcacttactatttggctggcactgttctaagcactttgcatgtttaaactcctttaaacgttcctttgttgccgcttttttttctgctagggactaaccttgrcattgtgggggagaggtgttctcgtatagctgtgggactgtaacatggctttattttcctattatgtgcaggacagtaaatcctgcagaggaatacaagttgactaggtctgtcatcactcaaatactggaagatatggctgggaaaaaaccaacaacaaaaagttttgatatcctcatagtgcaatgacattacagttttattttgttttgtttttttctttatgcgtagttctaaattactgtattatgtttcaggtaattaagccagaagaacaaattgggatggactgttgtatttacatttcagtttactagaggtagccttgaaatagttacaaaaatatgaatatcagtggggaaaaaaataagggggattttcatttttttttttccagaaacgataaattggcaaggaagacagatacgggaaaatcagtcatgagaatttgtctttcagtgactctttcttggctgggaagaaaagcttttcttctatttagttgagaacagtgacaaggattattttacttgaggatggcagattattttaccagcagctggcagatgagaakaattccctagacaacaaggaggggcagtatggtagggagggaacccggttcggagggtctggggttcacagctccacagtgctgcttaccagctcttagccttcattacattgcttaccttcctggaggttcagtttccttatccataaaatgggggtcaggttgccaaatttatcaaataagaatctaggatgtccagttaaagctgaatttcagataaataattattttttagtgtaaatatgtcccataaaatatttatgtcccatgcaataactatgtccctaatggtgcgtgggacatatgctaaaacattatttgttgtttatctgaaattcaaatttaactgtgcggcctatattttttctggcaaccctaaatgcgggcaggggcagtggtggtgacatgtagggatggtgtgaggataaaataataccrcagttaggttttatcgcagtgtgtagtctgtgtgtagtcaacacataactrtaagtagtgactgtaacataactgtaactggtgcatagtaaaaaacaaatggatattattagtataatagttgttattaataaaggtctttaaatgacaattggccatacaggagcctttggggaaaagtttctgactctaaattaagggaaggtaaattatgatcaagatctgggaataagatttagacttacacagtaataatttgaggaagagaaagacttagtaaattagttatgtaattacataattaacaacttgggaggttttctttacacgtttattccctagggcatcatctttaaattatatttagtttttgctaagttgaccagtttgtggttttaagtgtttactttcttttcttttgaaatgtagggaaagcatatttgacatcatcttaaagaaattatgtagccatataaaaccggagggtagggtctactggccaggaaaaaaaaaggcctttactgccacctggtggccatattctttaactgcaatrtgcctaagtgaggctggaaaggaaagcgttggaaaacatgctaaacccagagggcaccaaggccgcgtcatgacagtaagagccgtcaagtactgtgtcctttccctcagttctcaatctctcacagcttgaggcttgagaattagcagctggctacgagaggtggaggagagaaaatggtgaagtccatgccttcctccttggtaccgagtttccaaacctgaagtgaaggagtctgagaggggagaagcttcaggttgagtagactgttttttacttttttttttgtttgtttgttttaaagagcctctttatttaatggctcagagtggctagaaaatccgtggtattggttagctttcatctcaagtgcagggacaaggcaaatccagagagaggagttgaaaggacaaagaaaaaagaaaaaaaattgctttttacgtgcattttgctgcatgcagctcactcaataaacatgcgttaaatgcataaatatatcatgaggtaaaaatcgggggaaaggtgatgcattgatgctgatagaggacaggcaaactgcattccnnnnnnnnnnnnnnnnnnnnagataatagagtatatttatatgctgatgggaatgactcaatagacaaaaattgttgatccaacaaagaggacaagattattcctagagtgatgtccttgagtagattagagggatgggatgggatccagtctacaaacagagaagcagaccctggacaaggacatgaacagtcatccactggaacagaaaagcggcagactattcacattaatgtgtaaatatgttgatagctgtggtaataggagcatgaaggcctcctctctcttctgtgacctctcagttttccttctctgtaccccaaatcatgcctgtcttagtccattgctgtaacagaattctacagactggatcatttataaagacaagaaatttattgcttatagttctggaggctgggaagtccaagcacatggtgctggcatttggtgaaggccttcttgctgcatcctcacgtggcagagggcatcacatggcaagtgggcaagagcaggcttgtccgcttgggttactctaactcttcttttttttttttttttctgagacggagtcttgctctgtcacccaggctggagtgcagtggtgtgatctcagctccctgcaagctccgcctcccaggttcaggccactctcctgcctcagcctcccaagtagctgggactacaggtgcccgccaccacacccggctaatttttttgtatttttttggtagagatggggtttcaccgtgttagccaggatggtctcgatctcctgacctcgtgatctgcccgccttggcctcccaaagtgctgggattacaggcgtgagccacagcacccggccaggttactctaactcttcttataaagccaccagccccaccgtgggggccacacactcatggccttatttaatcttaattacctctcaaaggccctacctccaaatgtcatcgatatgtgaatttgggaattaagtttccagcacatgaaatttgggggwcacattcaaaccatagcaatgcttaaccttagaatactgcctggcatctgcccaggcttccacagccactacctctgggacatgttgggatctctatttacatgtaaggctcgccatgaccattacacatctgtgagtcagtgtagggtcctggtggaagcccggtcttggagtccctccattatgtttgctaccctggctctccaccttcaatttctggcttctcattttggactatgatgattttcttgttgttaattttttttttttttttagtatgaaagttttcaagacgcctacaagtggaaaatgcactcctcccagccaaatcaagcttcgccagattccttacagctgtgtgcagtgaaatgactaatgaaagagccctctgctgctggtggaactttcacatatggcactgttatgccactcagcaggacccgaccctggtatttacatattggatgtcaccccaaaagcccctgaccagggggtttccgggatgtaataagaatgccactctgggctttggaaggtgcaccrtatgcacacccatactatagggcaggggttagcatttcagacccctgttcctcccttgacaagcaagtgcttttctccagggaagacgttcaggttcattcatagatccattggtgccgtgggcagctcagtaacaatagctctgctgcctaccagctgctggtggaggtgttgagaatacctaatgaggaagtcagggcccctgcgtgcttcagcagagctggatgcctggcatggcaatcaatggacacaaacctttggataatttccgtccttggcggtgtgttctatagcataggtatgaagtgggtgctctgggagctcagaagaggggctyttctcttaacttatgggtggccagggaaggcttcctggagctcaaatgactgagtggagtcttcaacattaaaaaaaaaaaaarraaaaaaaaagtgcttccctcccacccccagttaaaaaggtaatacacctcattgaaataatttaaactttacagaaatgtgttcctttaaagttcagagagtaaagaggaagtaataaagctgaaatagtagaatttctaattaactggagcctgtagctttcttcctgaaaagggagtggtgtgtgtgcatgtgtgagtgtgtgtaggtgaatctgtaaaggatggagtagtactaaaaagagggaggtgaagacggaggtgagatctcatctttgtgccctgaacctctttgttataatgtcaggcaatgagagaaatcagtactcaccctctatgggactctggctttttcaaacttggttttctaggttttggtcttggttattgatggcttgtaacttcagagtctccattgctggccacgcttccacgtggtttattaagatgttttcctaaacaaaattgatctctccctaaaaaaattataggtctagctgtaagatgttaacaatatttaacctgctacaatgccaataagagttcttgtttattgaagactttttttgcaccagctatgtgctaagagctttacatttgttacctcataacatcaaccctcacacgaaccttatgaagcgggtatttcattattcccacatcccagataaggaagctaggattattattgctgcacccgcaaagctgataatcagtggggctcggccccaaaccgaggtgtctctgactcctgggtctatgctcacaaatgcaccattcctctgcattatttctcaaaaatatttggctataggagcattttcaaaagtgagcaccacttacctcttagtactgttattagcattccgtgggacacaatttgggaaatactgccccaggaaaatactgccctgtctttaaaatagagataataatacaatctccatattgtgatgattaaaagacgtttcaggaaatgggtgctgaggatacttaccttccaccaggaatgtgtgtgtgctttaaaaataacatttgtggccggccacaatggctcacaactgtaatcccagcactttgggaggccgaggcgggtggatcgcttgagtccaggagtttgagatcagcctaggcaacatggcgaaaccctgtctctactaaaaatacaaaaattagccgggcatgctggcgcacatctgtggtcccagcaattcaggaggctgaggttgcagtgagccaaaatgacatcactgcactccagcctgggcaacagagtgagatcttctctctctctctcaaaaaataaataaataaataaataaataaaaataaaaaaataacatttataatgtcctcagtgaaaggaagcaatgttttggccaggatgataatgaagatattgttactgggctgggagacccttgggccctgttggggagggccctgtaagctgccactgcccaccctccacaggtgcccctttggtccccttccctctcctctgccctctggttctctccgtcatccctctgtagtgcttgtctttgttcaggaagatgctccatttgcctgcctctgggcaggggacttgctttaagccatgctgctgcctactcaggccagcccaggatgtctcctttgcaaatttggaccatgttctgagccccagctgtaggccagagatctgtgacatattgggcagaccacccacagcccagctgctgccactgcttagcctacatgtgcccagagagctacactatcaccacccaccacatctcaccgacagaccctgcctttagagacaaggaccaacctaggagagcctgggttggctctacctccctgggcattgatttggacagctcaccaactcccaaaggagccagtcttctggcctggttggctcccaacctactccctgccccatcggtttgctgcagaggcccggtggacctggcagtcccacatcatgacattccttttcttccatgcaccagttttgcacagctgtcatttttctttcataatttcatcagtcccacagatacgcacatttaggcaaaaatactatgaacaaaacagacaaacaaaaacaggccctcaacccagctcctgaataccagttagaaagagcatttgcattcttctcagtaaatatcaagcatactaaaaaagaaaacaaattgtttcacttacattcttacttgcacctgtgagggagccattgttactgtcatttcatgcgtggaaaggctgagggtcacagaggttagctgatttgcctaacgtcgcagagctgagaacaccaaagtcagggccaggataattatccagtgtttgtccctctgccaagtgctgccccttggacttggggccctcaggccatcaagactggggccctttgctcctggagtgtcccaaattgatagtgtaagggtggttccgattgagtctgacatgctgctaggaaccctctgttttcttccctttattctcttctatcttccttttcctaaggctcatcccactgtccattcttcataggcttcaaggtgctctttgacttttctctgtagctaggccatgggacttttaggtgtcacccatcctcccacccactcacttgcctcttgacagtgcaccagctgaagcacaactatgtgttggggagatatgtaaggagaaatgtgagacgtggtcttgcccctaataaactgttaaagaaaaattatcctgatatctgtgaaaaacagcaacgaacactttattcaaggctattgcagtaagggtcaagattattgcaataggtgagaggattgaaacccaaatacatcagggataaggggggatttacagccaatcagcacgctgggggagtggatggaaaattactaacaggaacttgattaggtggaggaagaggagcttgattggatgttgagggtgagagaatctcagtaaatggacttaacaagattcattgctaaaacttggctcatcaggtcaagggcaaggcctagttgagaagaaggcttcagggaacccgactaaagtttggtcaaggagggagtctttgccagcactcacaaagtcatatgagagtcaggacccaaacacaggacccaagctgctacgaggcagtgatgtgccagccatggcatggctgaagcttggagaggagccagtggatatatctgggttattccatcccctcgctccagggctgactggcagacagtcacactggcttcatctcaggttcattcatttctcactgctctatgatacaccatacttttcttctacttcatactttgaagcttgaatttccaagatttgataagaaagactgaaaaccataagcagactgaaaagtgccaaggctttatctagatcttggacaagaactttaacctcatgtttcttgtttgcaatattgagacaatacttgttacagattgaattgcgtcccccaataattcatttattgacttaacctgcagtatgactgtatttggaaacagggcctccaagaaggtaacggttaaatgaggtcatagaaggtggggccctaatctggtgtccttgtaagaagaggaagagataccagagatcttttcctctgtgcacacacagaggaaaggccatgcaaagacacagtgagaaggtggccgtctgcaagctaggaagggaggttttaccagaaacagaattttctggcatcttgaccttagacttcttacttccagaactgtgagaaaataaaaatgtctgtggtttaagccctccagtctgtggtactttgtgatggcagcctgagcacactagtacaatacctatcctgtgggtttacgatgagaactgaacataaggtgagttgaggacctaactgcaattcacacgttggcttgtccccctttcctcctgtcatgtgatttgtagggtgttaagggtcttttgccagcagacaccttccttgtgaccatatgatggtgtggaaaattcacacagtagaagcattcttttggattcaggctttgcttctctgtataaactaaaagggggaattttctgaaagcatgttattatcagttaggattcctggtttcaagcagtgtacatggattggctggtttaggccaaaaaggaactattgaaaggatatagactggggtacaggattggcaggaaggatggaggatcagatgtggggcctgccagctggcaaaagggccaaacgtcacaccttagaatggggcgtgaggactgcagggctatgctgctgggcgccggctgctgctgctcgctcctctgaccctgtgaacactggcctgctgtgacactgctggactagactcttctatgaccaagtcctccacaccgatgtgccctgtggtctctgtgattctggagcgctgctgtctccttggctgagcttagatcatgaacactggcattttcagcactgagagtgggaggcaactctgcctcctgtcaagattcataaggtggggaacttccccaaacaattaaaagcaggctcaaaatgccagatggtcaaaaagaataacaagttcccccacagatacagggaaacctttcagaacccccacataggaagtgcagcttcactcacaggagtgagaacaaagaattggaaagccgacggctggttactctgcatctctctgcccctgtctctctgtctctgtgtctctgtctttctctctctcctatattttccagctccacttgctaaaggtaaggcccacctctgtcctgaccattagaaattagttgtctcccttagaacatctttttcctcatcttctgcaaatacttttcaatcccccttggagattccctcctctgtccatttttggtctgggtgggctccatcctcagccctcaggatgggccataggaccccgtcccaagccaatcaacacactattcccttggatgcaggagtgagtatgtgacctaaacagcctcgattcccacccccttttttattgaactcaaacttatctgttgcaaagtgtacaaagtatacaacttgatgaattttacataaaatccgttgtatacatctgtggaatcattactgagattgagatactgatcatttccatcagcccagcacctccccttgtagtccttctctgtaatactccactcaaagataatcactattccgacttctgttaccattaatggaaattttacccatttttaaattctatatgaatggaataatatgtaatctttggtggctggctgttgatctttctgttactgacttgcagcagttctttattttggatatgagtcctttgctaaatacatatattgcaaatatattttcttagctcatagttgcgttttgactctcctaacgatgtctttttaggaatattagttcaaatcgctagtctttcctatggttaatgcttttaatttgttctatttagaaaatcttttaatgcttttaatttgttctgtttagaaaatctttgcacactctgagatcatgcgcaagttaatgactttgaaggacgaagaagtaaaatgtttttgttgcatttgagattgtgaggcagtgaggctgagccagaaacgaagacagaaagcagatagacttgtagggctggccttgagatggggcactgtcacagggtgagtctgagctttgcaggcactgtctatttactatagttgtggctgaaatcagaggcaggccaagtggatgagacatggggcagttgacctcagaagagattcctttaactatttcctttttttttttttttttcttgagatggaatcttgctctgttgccaggctggagtgcaatggcgcaatctcagctcactgcaacctccgcctcccaggttcaagcaattctgccttagcctcctgagtagctgggattacaagcgcccaccaccatacccagctaattctttgtatctttagtagagacggggtttcaccgtattggccaggctagtctcgaactcctgacctcgtggtctgcccgcctcggcctcccaaagtgctgggattacaggcatgagccactgcacccggccaactatttcctttttaaaatttttttatttttattttttgagagagtct

SEQ ID NO: 96808 - DNA, 14664 bp, Homo sapiens
cctttctgaacagagaacagatacagaaaacatggaggattgccagaatctcttgaagccatgtagcttatgtgagaaaagaccacgagacgggaacattattcatggaaggacgggccatcttgtcacttgttttcactgtgccagaagactaaagaaggctggggcttcatgccctatttgcaagaaagagattcagctggttattaaggtttttatagcataatggtagtacgaacataaaaatgcatttattccgttcacttaccacattatttgaaaatcaatcctttatttaattttatttccaacctgtcagagaatgttcttaggcatcaaaatccaaggtagctgtaagaaaaatactggagctaacaatgaagaacagaagtaatctgattagtcaaattattaagtgccatggattactttatgcagcagtcaggtacatagttaggtgaacccaaaagaaaaactcttgaaaacaagagatttcttccatgcacatttacaatattgaggtataattaacatgataaagtgtttccttctaacgagttgtagaaatctgagtaaccacccaaaaaagcaatagaatgtttctgtcaccccaaaacactcccttctgcccctcttcagacagtccttcagctatttcatggctctcaccctagttttttttttttttgcacttttttttttccgggggtataggggaggtgtggggcgacagggtctgtcttgttctgtctcccaggctgaagtgcagtgcagtggtatgatcatggctcactgcagccttggtttcctgggcataagtggtcttcccacttcagcctcctgagtagctgagactatagactagcataaccacactggctaattttttgtggagatgaagtctcactatgttgcccaggctggtctcgaactcctgggctcaaacaatcctcccgcctcagccttccaaattgctgggattatagtcatgaggcacctagtctggcccttttgcaagactttaatctgaaatctaaatttttaaaatttaagtacttacaaaggatatactatccaacatattgcatattatatatgtgctttaaagttttttttttttttgagagacggtctcactttgtcatccaagctggagtgcagtggtgcaaacacggcccacctcctgggctcaagtgatcctccagcctcagcttccctcacaggcattcactatcactcccagctaattaaaataatttgtagacggtgtctcgttatgttgcccaggctggtctcgaactcctgggtttaagtgattcccccgcctcagcctcccaaagtgttgggcttacagccttgagccactatgcttggctcaaagatatttttatgaaagccctgggactatagatttagctgattaaatttatagaaaaagtcctgtcatataaactggcaaagtctgttcttaatttaattagccaaatcagacttaacttccgtcagaacatgtcttggttttaattcagataaacacacaaacatacttctctggcacagccttcagaagcatcagtttttgttttgttttgttttgttttttgagacagggtcttgctctgtcgcccaggctggagtgcactggcacaatcacagttcactgcagcctcgacctcccagatccaagcaatcctcccacctaagcctcccaagtagctgggtctataggcgcgtgccaccaccatgcccagctgaattttgtattttttgtacagacagcattttgccatgttgcccaggctggtcccaaacttctagcctcaagcaaccctcctgcctcagcctctcaaagtgctaggattgcagtcctgagctactgccccctaccctctttgcgtcttaggagtcatttagattttttttgatccttttgtttagtgcctctggagctgcttacaccaaggcaatacgccttgatatactggatggttgagaggcagcctctttttttttttttttttttttttttttttggaggatagggagtatggctgttgtgaaaagggaggtaaagagaaatggtagatctgaagaggcctcatcagagcacatattttaggacaacacatatggaaattggacatctttaagttggtttccatagagctatgcatgtatccttacccccatgggaaaatgttggtgtgttctcaagggtatgcatgtgtcattttgaagaccaaggccctagaattgtcaaacttaaggatcataaaaatcatgagggttgcttgttaaaaatgtccaaacgtgcagagactgatctttgagatctggaccaggaatttgcatttgaacaagtgttcctggaatctctatgcaagttttatacagaacatacttttggaatccttgccctagacaggggtgtccaatcttttggcttccctggtccacaatggaagaagaattgtcttggaccacacataaaatacactaacactaacaatagctgatgagctaaaaaaaaaaaaaaaaaaaatcgtggaccgggcgtagtggctcacgcctgtaatcccaacactttgggagatcacctaggtcgggagtttgagaccagcctgaccgacatggagaaaccccatttttactaaaaatacaaaaaattagctgggcatggtggtgcatgcctgtagtcccagctactcaggaggctgaggcaggagaatcgcttgaacctgagagggggagattgcggtgagctgagattgcgccattgcaccccagcctgggcaacaatagcgaaactgtctcagaaaaaagaaaaaaaaaatcgcaaaaagaaaaatctcataatgtcgttgttggtttttttttttttttttgagacagtctcactctgttgcccaggctggagtgcaatggcatgatctctgctcaccgcaacctctgcctcccgggttcaggtgattctcctgcctcagcctcccagatagctgggactacaggcacataccaccatgcctggctaatttttgtatttttagtagagatgggggtttcactgtgttggccaggctggtctcgaactcctgacctcatgatccacacacctcggcctcccaaagtcctgcgattacaggcgtgagctaccgcacccagccaagttgtaatttttaataaaacttaagaagtaaacattttacttatgtttataggtatttgatcctaaatttgacacatcattgcccatgaaagaatcctcttaggctgctcagcttcactcttcctgcttgcccaccggggtttttcactgcttctgttagcactaagtacttagacgatcctaagatatgtgcttgagccgaatttcatctttacttgtaggaaactttaaactatttcttttcttttcttttttttttttttttacttgagatggagttttgctcttgtcgcccaggctggagtgcagtggagtgatctcggctcactgcaacctctgcctcccgggttcaaatgattctcctgcctcagcctcccaagtagctgggattacaggtgtgcaccaccatgtctggctaattttgtatttttagtagagatggtttcaccatgttggtcaggctggtctcgaactcctgacctcaggtcatccacccacctcagcctcgcaaagtgctgagattacaggcatgagccacagcgcccagcttaaactattttcttggtctgtttttgattttcttttttccttgccactgcggtacagattttttttactcactgccactaaactaaagcaaggcatagtttatatgtgaagtgttcagagtttactgctataaggaaacttccaaatactgacatttaccttttagctgtagttattgggaccatgtgctctggttttctggagactgccaaattgctcccatttttctgcatcccacctggtttctttctgcatgtcccctttcactttcaaacctcttcatttggatgttaaattatatggtcacctagttataggtaagccttgttcgagttgatatcttgattgtgaggaaggatctgtgtcattggagcttgtttctgctgcaacgtgctgtagactatgaataatgaaatcacaccacattaccatcagatttcttgttttagttgtcaaattaatatttatgattgttatcttgggcgaaaagttcagagcagagatgacaaatcattagaacaacgatgaatttcagtattacggctaaaaagttcttctgtctgaatattaactcactctccttccagtgtacttcacagtaattggtatgcttttttatttaatgcttaaatcaaactttataaaaatcttagaccagatctttaatatggtatgccatttccccagtctaccaatggaatagtatgggtttctaatcctaggcttgtacaatggattggagttgagccatgccagcctccacactgccactaacttctgtaatgtaagattgagtcactgccaagcatttgaaatatgcagttgtgttttaattataatttatgtatagttagatgtatgtagtgcattgtgtggtattatttggtttgtaagaatttatttttaagggtcaaggtcatttgtaacattttgtgtgtgtcaattcaatgcaatgttggctgccttttgaagtctttgatatattggtgaatattcttctgatctataatacaaagctatgtaatgttacctcttgactcgcttttgaaaggaagacaattgttaactagatatttgagttttttcccctcagaattatgtgaatttctgatatatggctttagatactgtgaatctgttttccatttagtcagttatctgcttaaattgttcagaactatatcctaacgagcaattagttctgatggttctcccagtcatgagtgtgcatgtgtgcaagcatgttttgatcctgatgctacctttgctaaaaatggccatagattaggaactagctatgtttttagaatcaaagatgaaccggtaagctgtctcatgtaccaaacgtgaaatttacagtgtttacaaatgtctggaattttgcactgccatagggaatgttaaggttacttggctggaatttatcagacttgtgagtaaacaagttgaagtttagcagatgagggggaatattgaggcccctaaggctaaacaaaataatcagtatctgagatagtggctaatgtggctccccaggcctaatttgggaacagtttttcctgattgctttgagaagtactttcttttgacagaaattttcattctgcttgccattgctatattctccctttataggagccattggatttctttccttttgtgggaaatgtcccattagcattttcagatcttttgatgtgcactaatgccattattggtaatgccgttattggtgaatacagcatagttaaataaactgttacagtaaatctacacttggatttgctgcacctctaccaatagccttttgaatgactgaaagtgttaacagagaaagaggcatgtctgcagaaagagatagctaatattttttggtactttatctgaaatccaagatgctgcttcccctgcaggttgttttccttcttacgatcctcattgaatcccctctgggagcacaggacagttagtagaactctccatttctttttttttttttttagacggagtctctctctgtcgccccggctggagtgcagtggcgcgatctcggctcactgcaacctccgcctcccgggttcaccccattctcctgcctcagcctccctagtagctgggactataggcgcccgccaccacgcctggctaatttttgtatttttattggagacggggtttcaccgtcttagccaggatggtcttgatctcctgacctcgtgatctgcccacctcagcctcccaaagtactgggattacaggcgtgagccaccgcgcccggccggaactctccatttcttaaggtaaagagggtcaaggatacctaaaaagggtcaaataatgctccaagagcaattcctctttcagagcagttgctgtaatttggcaaatgctttatcgaagattgatattaggctaggggcggtggcttacgcctgtaatcccagcactttgggaggccgaggtgggtggattgcctgagctcaggagttcgagaccagtctgaccagtatggtgaaaccctgtctctactaaaaatacaaaaattagccggtcgtggtggcgtgcacctgtagtcccagctacttggcaggttgagacaggagaatcgcttgaacctgggaggtggaggttgcagtgagccgagactgcaccactgcgctcccacctgggtgacagagactctgtctcaaaaaaaaggacatttatcattataacatcttattagagcccctaatttcttatctgaaggcactgtttttttttttaaacagttaagtactgatgtcaacagacaaatatttctgatcagatagtcccctgtcaacagtagcaaatgtggtttcataaagtgggaagaaaacagcattttaaagtaactttttgggagactgatttgagtaataataaaactctggtctcccttaagaaaaaaaaacccttccacctttactgtgtcatttatatccccttagttccaaagttaattatcttatttctggatattgcttttataccaaagacccttatcagcccttgtaactacagtatctttagataagattcctctttccagtcagtcctgggaaatgtttctgttgcagagttaggcggtagatgggaagctgtgatggcagagctactatctaataaagtaacaactcgtagttgaggcttcctttctgtgtgtgatgggggatagggagttagctcccctgttgtctcagcactaagaaattgaggtcaggccaggcgcggtggttcactcctkttattccagcactggggtggccaaagtgggcagattgcttgcgctctggagctcgagaccagcctgggcaacatggtgaaaccctgtctctaccaaaaatacaaaaaaaaagctgggcatggtgggtgcatgcttgtcccagctactgaggaggctgaggtgggaggatcgcttgagcctgggaggtggaggttgcagtgagctgagatggcaccactgcaatccaaggtgggtgacagagacgctgtctcaaagaaattgaggtcaggcttccttcttacagaattatttttttctctgtagtttgcctcattttttcactttyttttcaatgagaatcgaagtgtttcttttgggtttttttttcccccttttaaaatcaacaggaaatgtttcaaaggagggatgaaatgcttcttggcttcctcagcacttggcaaggtagacctcatagcaaccttgaatatgactttctttaktctctagctatgcactattaagtgcctcttgggtagaggtagagttaagtattgagtgccagtcttgacgtccgtatgcctcagtttttctcatatataaaaagcagtatacatacctacccttttctacctcatcatttgttgtagggattaaatccgggagagcaattctgaagcctataaatttccttgaagagatctaagaacctattatgctcttggtgtaccaagctctggggtatatattcagaatacctcatgttctggaagctgagcactagctcccctttattgcctgcctggcagagcctgtttgattactgcaggcccttttacccatgcttctagtttaggtattctttctttgatatgaggctcttgaccagaaaagagttctttctctaggtgttctgagagaagtttgtaaatttggatagtacattctatcctgataaaaccaccttgctgtggtcttgatgtacaaaaaaaaattttttttttgagacagagtcttactctgtcacccaggctggaatgcagtggcgcaatcttggttcactgcaacccccgcctcctgggttcaagcgatcctcctgcctcaacctctcaagtagctgggactacaggcgtgcaccaccacacctggctaattttgtatttttagtagagacagrgtttcaccatgttggccaggctggtcttgaactcctgacctcaggcgatctgcccgccttggcctcccaaagtactgggattacaggcgtgagcaactgctcctggcccaaaacatctctttctacatacacttgagtaggtggcataaaatgcactgtcaatatatagaaaacatgaaattttccaaatatttccgatcagagaatcacaagagcagcaaatgtggtttcatcaagtgggaagaaagcagcaatttaaaataactttttgggagactgaattgagtaataataaaacttcagtctttcgctaataataataataataataataataacaayaacttattgaatgtgkccagctcactagatgaggaaagaggaaggcattttctgcattcttgcctagttttccttataagcaccactaagttaatagctctgtctttttggtgtttgcactatgtaatgcttttaatactttttaattgtgcttttttatgtattaaatgtttttccttttgccattgtgtgttgtcattatttttgaaataggtaattttgtgtgtatacagttaaatctcattgctattggatcttttggtctgatagaccaaagatacaacagaaaattacttctgttacttctttggggaaattaatggacttaaaatcagcagcattggatattttcccccagttaccttttagagcaattgctatattttattttcagggtcccaatcctgaagaaatccatcaaattttacagagtattttctaacattgagctcgttgtggttttgaattggggctagtacgagaggtactgagggtttgtcacaccatatgcattaatcagttggtatgcctagcatctgctagggtctctaatggcggttcttaaactttggggattatagtcctccttgaaaagctaatgaacctcatgaaacctcttcttataagtagcacaatattaaacatcaatttcagggcttcattgaaaccactgatccatgaccctcaggttctgttctttggcaggatgccaaagaagagtgaatggcccacaaagagcctggtagcacatacgcttttcaaaaggtcatgcacttacagctaaagccattaaggtgagtgaaacatctggctagttgtcctgagcttgggtaggggcaggattaccatatagttggtgcagattgctgtgaactgtataactcttggggcactgttcataggctgccatataaatgatcctttagagatgtgtaatatatatctgaggaggccttgggggtggggtggggtgataatggacataccatcgtaacttttttttttgatacagggtcttgttctgtcacccaggctgaagtgcagtggcgagaggttcacggcagccttgacctcctggctgaagcgatccagccatctcagccccccgagtagctgagaccacaggcatgtacaccacgtctggctgaattttttgtgtttttgaagagatggcgttttgccatgttgcccaggctggtcttgaactcctgggcccaagtaatcacccacctcagcctcccaaagtgctgggtttacaggcaggagccaccatactgggcacccagggtaacactttttaaatgaaaacaaaacaaggagcattagaaacaaaaatggggccagcttctttgtctacttaagcctttcacattttgtatgtgacctgtataaggtactctaatgcaatttcaatggcataacgtgtttcctggggttttccatcctgctcaccttgagttcctggtgctgtagatgtatcatttttgttgaatgtattcttgatactagaagaagaaggcaagctgaaactggtaactaagcttacagagtattgcagttttttttggaaatagggtctcgctttgtccccccaggctggagtgcagtgatgcaatcacaactcaccacagcctcagcctttaaggctcaagtgatcgtcctcctcagcctcctgagtagttgggaccacaagctcatgccactacacctggctaatttaaaatattttttttgtgaggaggtgtggtcttactgtgttgctcatgtttgtctagaactcctgggctcaagcgatcctcctagctcagcctcccaaaatgttgcttttgcctggcacaattgttagtaggtaaatttcacatcactgtttgttttgagggtttgggggttttttgtttgtttttggtggagttacacaagtccatcatataaaggtatgaaaagagttattgctattaggaaaaattcaagtcattataggtttgggcatacagggttaaccttgtgatgtacatccccagccctgaatttatttgattaatcctctttaaaataaaggattacattcaatcaatttgttaaaaacttcagccgaattaaatttagaggagtttaatagagcaatgaacgattcacgaattgggcagtctccagaatcacagcagattcagagagactccagggatgcctcatggtcagaacaaatttatagacaaaaagagggaagtgacgtaaataaataggcagtgaagtacagaaacagctggctggattggttacaggtgggcgtttgccttatttgaacacagtttgaacactcagcagtgtatgagtggttgaagtatggctgctgggattggccaagactcagctattgttacaggcacatactcgtaaattaggttttcaatcttgtctgcctattaagctaggttacagttcatccacagggactcaaatatgtaagtatggagtccttctcaggccatatttggtttgctttaacaaataaatacttattaaatgttaatatgagccagagactggttgatactgagaatacaacagtaaggaagctgctctcaagttgcctatggccagacaatggagttagatacttaagacggtttccacatgagccaaggaaacagtagctgaaagaactaaaggagagagaatggcttttggggggaactcttaagtgtttgttgtgcctggagcaaatgatgtgcttggaaaagtgatgagagatggtgctggagtgggaaggggcctgggtgttgaaagtgtgatatgctaacctagtaggtttgaatgttatcctgaaggtagtggagagctacaaaggtcttaagcaggagagtgacatcatctcattggcatttttgaaagatccttctggctgcattggtgagagtagactggagtgctgtttagagcagggataacagtgaggccatggcagtaatctgggctgcattgatactcctaaagtcatggcagtgggctgggcaagaatagtaatagatgcattattgtaatagaacacttagtaggtgctgacttgacatctgttattccatgaggcatttaaggctcagagatgttaaatagcctgtcaaaggcaattcagaattgcagatagtcagtggttaaacccagtatgtttgagacaaaagcccaaaagaagtgcaaggatttgagagaaatcaaggtagaagagacagacttcatgacaatgcgtgcactttaaacaatgtatgtttaaagtgaccatcgtttttagaaaaaaaaagatgaataaatgtggtttgagggaagcagggagtcaaggatgactgggtaactggtagatggtggtgccattcgttgagataaagaatataggaccgggtgtggtggctcacacctgtaatcccagcactttgggaggctgaggtgagcagatcacctgaggtcaggagttcgagaccagtctggccaacatggtgaaaccctgtctctactaaaaatacaaaaattagccgggtgtggtggtgcgagcctgtagttccagctactcgggagactgaggcaggagactcgcttgaactcagggaggcggaggttgcagtgagccgagatcataccactgcactccagcctgggtgacagaccaagggaaaaaaaaaaaaaaaagacaatagaagagtaggtttttgatgatggtggtgagataggaaaaaatgatgagtttagttttggttgtgttgagtttgtgcatatgagaacatccaaatggaagtggagcttaggagacacctgagctgtaaatattaagtacgtatcatgtatttcgtattgtctaggcactgggggatatcgtgatgaagatgaacatggttcctgttctcctgtctagggaaactggttaagcatgtaaatattagcatagtgaatgttttgttgtgagactacatgctgctatgagaaatacagaagggggacgtaatgtagccaagagcttctgaacaacctccgggaagagatgagctgagattaaaggaaggttaggagttaggagaggaagggaaaagtgccgtagttaggaggaaacatgccaaggtcttgaggtgagaaaacagtggcatctgggaagaactagaaagtttagtgtcgctgaaagcatggacagagagagatgagtgaattgaattgcctgggcatcctgggaacgggaagacaccctgatggcagggaacccgcgcctgcgctttcggggtcaggtccaggtctgccccgccagggctgaagccagctcctggtggggctgcagtgaggcggaagaggtgggatgctgctgcctggcggtgctgcggcggcagacctccacgaggaggtcctgggctaccgcggggtacacaggcgggcggaaaagggggagcagagtcagggggcagttgggaagctcggagacaaaaggagggagggagccaaaaagcctacagcaccaggtattcccaggcggtctcccatccaagtactaaccaggcccgaccctgcttagtttccgagatctggcgtgttcagggtggtatggccgtagacactaatggtggtgcctggctgcctcttcaagagcccggcccagccacgcccgcccgactccaggcgtcactgccaccccagggtcgtggggctcggactggggacccctgagctgctcgcctgcggtcggactgctctccccttctacgcccaagcaccgccggtctgccctgctgcgccttccaccggcctcccagagcctccagccatacagcagagatggtggttgggataagagtttgaagagagtggagcaggtctggaacaggtattctggagaataggggagagaacagagtaggaaaatttccacaaggcaattgcctgagactgtccaatttgcagaccagggcttttcagcctcaggactgttgacattttggattgaagaattctgtgatgggggctgtcctgtgtgttctaagatgtttagcagcattcttggcctctgctccctagatgccagtagcactcccctaattatgacaataaaaaatgtccgcagacattggtaaatattacttaagtgggagaatggcctctggttgaggaccactgaggccagccaatgcgtactacaggagaaacatcacacaacctgcagattggtgtcacacatttatggccctgacctggcctctcagttctatctggttcttctgttttcctcataggcgaagtaatggttctaacctagaagacagaatgaggtgaagacaggctaacttctctaagctctcaatgactcacgagataatagatgtcaagatagaacctactaagtgttcagtaaatgttatctattgtcatttccaggagggggctgattgaaactgaagaatagtacagtaggaggagaggaccaggagctgaaaagacaggtcgctatgttgagagagagagagaggaagaaagatctaataggacttcaaaggctgtggtagatgtattactgtcaaaacctgcgcagcttttctctaccaggccttggaaaagattgcacttcctgcaccactggcagcgggctggccaatgggatgcaagtggaaatgaactgtgctattctgagcagaggcttagggaccattgtgtgggtaagtcagtgctctttttcctccacgtgaggctagtgtgtcccaaaatgggggctgctccctttgacctgtctccaagactgaagagaacagggaccatagctgtacctatcctgcgagggacaaaggaacaagcttttgttaattcaagcgattgagatttgggggtttgttaccacagtgtaatttggcataagctgactggcatacggtggagcatcccagatgagggcaagctcccagggcctaacagagtgagtggctggagtatgtgaaggtgaaattctttgacatgaagtggttaaggtcccacgaggccgtggtgttagatgggtcattcatgtgatgttgttatcatccaggaagctggtaggaggtaggaacccaaagtctgtaatgaacaagggaaagtgtgagcaaagtcagcagatgacagcagtaaaggaggagtaaaggggagtatagatctaaatatatatatgtatatgtgtgtgtgtgtgtgtgt

SEQ ID NO: 96809 - DNA, 12248 bp, Homo sapiens
ccgttgtcataaatcgggagagtggatagaggccagagatgctgataaacatcctaacaaagaattatctggccgaacaagaggggagaccgctgccctgcagggtgagtctcaggcctggtcacattcaccacaagctgactgaagggcctttgggccttaggcgaacatcagcagtagtaccctggcagtactcctcatagacccgtggtggtggtggacaaggggagagactcctatatctggggaaaagggagggaagagtgggaaggactgtgtcctgtggtttcagtgccagcttagctgcagtagcacagagcactagagagatttctaaggtttccgactccaggccctggcccatggacagcaactgtggacctctctggggcccagcagtgaactaaccaccctaaggggaagaacacaagcctggctggcttcaccacctgctgattgcagagccctagggccttgagcgaacgtagggcatagccaggtagtgattacagcgggccttgagcaaaacccagtcttgtgctggcttcaggcctgacccagtgcagtcccaattctggtgaccatggggatgcttgtgtcacacctcacccagctccagggagctcagcacggagagtaagactccatttgtttgggagaaagtaagggaagaaaatgagagtctctacctggtaatccagagaattcttcctgatgttatccaaaaccacaaaggtagtaacctctaaaagtctgcaagaactacagtgttactaggcttggagtgcccccttatgtagacatggctgcagtgaccaaaacttagatcacaacagccaagccccttccaatacctcgaaagccttcccaagaaggatgagtacaaacaagcccagactacaaagactataataaatacctaactccttagtgcccagacaccaacaaacatccacaagcttcaagacgatccaggaaaacacagcctcaccaaacgaactaaataaggcacacagggccaattccagagaaacagagatatgtgacctttcagacagagaaatcaaaatagctgttttgaggaaactcaaagaaattcaatatttcctccacagagaaggaattcagaatcccatcaacaaatttaacaaataaattgaaataattaaaaagaatcaaggagaaattccggagtcgaaaaatgcaattgaggccgggtgcagtggctcatgcctgtaatcccagcactttgggaggccgaggcagtcagatcacctgaggttaggagtgcaagaccggcctggccaacgtggtgaggccctgtttctactaaaaatacaaaaattagctgggcatggtggtgcaggcctgtaatcccagctacttgggaggctcaggcaggagaattggagaggcagaggttgcagtgagccgagagcatgccattgcactccagcctgggcaacaagagtggaactctgtctcaaaaaaaaaaaaaaagaaagaaagaaaaaaatgcaattaacatactgaaacgcatcagtcttttaacagcagaattgatcaagcagaagaactagagtgtttaaagacagggtatttgaaaatacagtcagatgaagcaaaataataaaagaataaacaaagactttgggaggccgaggcaggtggatcacgagatcaggagatcgagaccatcctggctaacacggtgaaacctcatctctactaaaaatacaaaaaaaaaaaaaaaattagccgggcgtggtggtgggcgcctgtagtcccagctactcaggaggttgaggcaggagaatggtatgaacccaggaggcagagcttgcagtgagccaagattgtgccacggcactccatcctgggcaacagagcgagactccgtctcaaaaataaaaaaaaagaataaacaaagaatgaagtatgcctacaggatctagacaatggcctcaaaagggcaaatctaagagttactggccttaaataggaggtagggagagagacagggctagaaagtttattcaaacggatagtagcagagaatttcccaaatctagagaaagatatcaatatccaaacatgagaaggttatagaacaccaagcagacttaacccaaagaagactacctcaaggcatttaataatcaatctcccagatgtcagggattaaagaaagggtcctaacagcagcaagagaaaataaacacataacatacaatggagctccaatatgtccagcagcgacttttcagtggaaatcttacaggccaagagagagtggcatgacatatttaaatgaaatacggctgagggaaaaaatcttttaccctagaatagtatatccagtgaaaatatccttcaaacatgaaggagaaataaagactttcccagacaaacaaaagctgagagataccatcgacaccagacctgtcctacaagaaatgctaaaaaggagttcttcaatcagaaatttaaaaaaattttaatgagcaataaaaaatcatctgggctgggcatggtggctcacgcctgtaatcccagcactgtgggaggccaaagccggtggatcacctgaggtcaggagttcgagaccagcctggctaacatggtgaaaccacatctctactaaaaatacaaaaattagctgggcgtggtggcgggtgcctgtaaccccagctactcgggaggctgaggtaagagaatcacttgaacccacgaggcggaggttgcagtgagctgagatcgtgccattgcactccagcctgggcaacaagagcgaaactccgtctcaaaaaaaaaaagaaagaaaaacacagattagtataacactgtatttatggtatatacactactcatatcttaagtagaaagaggaaaagatgaccaattaaatataataactacaacaatttttcaagaggtagacagtacaataagaaagaaatagaaatggccgggcacagtggctcatgtaatcccagcactttgggaggctgaggtgggtggatcacctgaggtcaggagttcgagactagcctgaccaacatggagaaaccccgtctctactaaaaatacaaaattagccaggcgtgatggtgcctgcctgtaatcccagctactcaggaggctgaggcaggagaatcacttgagcctgggaggcggaggttgcggtgagctgagatggcaccattgcactccagcctgggcaacaagagtgaaactccatcttaaggaaggaaggaaggaaagaaagggagagagaaagaaagaaggaaagaaatagaaacaacaaaaagttagtaagcggaaagacgaagttaaagtatacagtttgtattagttgttttttttttttttttttttttttttgagacaatgtctcactctgtcacccagattggagtccagtggcacaatcacagctcactgcagcctcaacctcctgggctcaggtgatcttgctacctcagcctcccaagtagctaggactacagcagtgtgctaccatgcccggctaattttggtactttttgtagagatggggtttggctgtgttacccaggctggtctcgaactcctaggctcaagcagtccgcgaacctcagcctcccaaagtgctgatattacaggagtgggacaccacgcctggccttcattagttttcattttgcttgtttgtttatgtaatcagtgttaacttgtcatcagtttaaaataacaggttataagatattatttacaaaccttgtagtaacctcaaatctaaaaacatacaatggatacataacagttatgtgacccaaaatgtcagtagtgatgaggttgagaaactgaagctctccaaacccagtccacaagtggggaggggtcctttaacactgtggaccatttgaactttctctgccttacccccacccccaacatataatataaacacatcccatgcccccctcctatccctcagcctatgttctatttctgttcaaccaataagctgcttctggtgccttccacccagggtcaatggcccttcatttatctttaccccaaactagaagcatctgcacttgtaagagtttctctatcatctgtgactctttggcaagaacaaagcccagggctgaccggagaagatctggaatagacattttccaggtcttggaaagataaagacacttgaactttatctgtttaggatgagttctgccagaactttcccaaagcctgaggaagttgaaacccaacctaaaacacacagttctttcctactgcctactaggaaatcacctgactcagaggaacagaaaatgaaagtagaaaggccattaagagagcctgcaggctggaggcctgtggacctggtttcatattccagtcccattgctccttactgaaagactctggacaagcaagttatttcctctgtgcctcaatttcctcatttgtaaaatgcgggtatatattacttatctcacagaactgctgtgcgaattagatgaaataaccatgtaaaccgtttggcatgtaatggttccaatgcaataaattctggctcccatctctcttccacttggctggaaagaccctctgcctcattttgctgccaacctccagatttagtatctaggccaagcctgctctgggcatcccagtctgaggccattttcttctcagaggctgagggtagcaggcaccctcttcctagagcctgcccctccaccctgcagactggaaggggcacttctgaaagacttggggtgccagactcacttcaccaggatcaccttcctccctaatccatctccaaacaccctgggttttcccaccttctggaggaaactgccccctccccatccttccagatcttatttcaaattgtgtccctgataggaacaaaattcaacaagggccggatttgtgttcatctctgcccgcccccccccccctcctagaacagggccagcacatgtaggcattcaacacttgtagaactcacgaacgcaagccacctactccaggaggccttccaggtccacctccgcatcttttcctccagagaatactcagggaactttgtcccaaattctaatcagcattccgtgtttctcaggactctagtaatacaggcatcaaattatgggatgggctatgggcttattccaaggcaaggacttcatcctggtcatctgtgttcataacccaccaccagcagtagcagaatgcctggcaccaagatgccaaggacttttcctgcactggagatgcacccagttgttatcacaagtttcaggcaggaaaagcgaaattgaaaccagttttgggggagccggctcatcttcaccacgcgaacggctcaagcagaggcctccaaacccccaaaaccccagctctggccactcttgcaggccagtcctcctctgagtagagggcggggaggacagggattcagccagccctggtgcccagacaaataaataaatgtgctcggagagccgcggaggggatggagggaggagggaatgcgggaggcgaggggagccaagagaaaggggtcatcctatacgcggttaccttcaccactcgcatgctcgccatcatgtcgggaccgagtgtgtggcacccgtggcctccagcaggaccgagctccgacccgcgacacagcgcgccccgccccgccccggggaccccacccccggcagccccgcccacccctcctccagccgtcgctgcgtgggcctccccgcacccgctccggcgaggccaggaggccgtcgaaggacgacccgccggacaaccgcccgatccccgcgcggaaggctcggacccgggactcacggtctttgtgcggagacgggggcgggcctcggggcgcacggctttgctgatccctgcctcccgcggggtgcgccgtgcaccggcggcgagcgctcaggggcgctggggggcgctcatacgggttccagtcttcgctccgccggcggccgcaccgggagctctccggtctttgtcagccccctgcacgccgccccaaatacacactcgccctgaataaataagggatgctcgctgtacagacgcagctccgtgacagttctcagcggcctccactatcggactgccgccttgagcccctgccccagcaagctgccggagccgccgagcctgccgccttccctmcatgggcccagcgctccatctccgaaactgcgtgrgggatggcgtagacctgtgccctccgagcaccgctccccggcagtcggggatcctttgtgctgcccggcgttcggcgcgggctgcaacgtttctccccgtggcttggggcagagcaccgcaaggaggcgctgttggaccctttctcttttgctttgggggttcggtctaccatcattcagtcctttactaggtttagtatttactaagtgcctactgtatgctggtttgggaaacagttggtgggggaagccccaagaaggactcaggagcctcctttccaagagagagtctgcttcccctcccttactttactactggtccattacaagctgtgggcctaatgtgtgcccccatgcacagctggagtccccaaccctctgtgcaaggacagagtacttgcagcccctgagcaccaagcagcatctggggaagatgagacttgttgggagggccgatcccctccttctcacccttccctacccccgtttagtccagacgagaaaggaaatcagtatattttgagcaccagtttgtgatctcagtacctcacagtttttttgtttcttgtttttctgacagagtttcactgtcgccctgactggagttcagtggcgatatcggctcactgcaacctccgcctcccggttcaagctgttctcgtgcctcagcctcctgagtagctgagatttacaggcgcgcgccaccacgaccggctcatttttgtatttttagtagagtcagggtctcgagctcctggtttcaagtaatccacccgcctcggcctcccaaagtgttggaattacaggcgtgagccaccgtaatgtttttatccaagtattttgaaaccaaatgacttctctgctcagattttgcagaacgattaattgtttcattcaattcaatgaactttaacagcattttctatatgcccgaaatgaataggacactccgtaatcccttaacaggggtagagatgagggaacaaagacattcgaacctgcctgtgatcaatagtctcagtcaacaagcgcctactactgagtggcaggcattgccaataggaaacaccaggatgagaaaggggagtccctgctcctgaggagttagttcccagactactgggacagagggagagaatgcagcccctgatttttaatgataatgctatagagaatcacctggtactctgggagtatgaggagggtcactttatccctcttcagggaggggcagaggtttcccggaagagagaaaaatccaagtgtattgtgaaacatgatgagtcagcgagaagtaagagcgtgggatgaagatgttctaacaagagggaacagcatgagcaaacggggcagtgtctatggaaactggagcaaaagcctctgtccacgtatcgtagctctccttttcttttcttacaggaacgctgcatcccgaggtgaattaacagtcatggatatagctgggtcctaagtccccacacagtggggcagcccactggtgtgcctttcatgtcctttcacaatgcagacctttgtgtgtcagaacaagccccagggagacctgggttctagttccacatctgcccccatgtgcagttatggccttgggtggtcggcggaaactcctatctgcttgccaggaccattgtgaggctaagctgagggaagtggaggaacttagaatattgtaagtcgccgggcgcagtggctcacgcgtgtaatcccagcactttgggaggccgaggcaggcggatcacctgagatcaggagttcgagaccagcctgaccaatatggtgaaacctcgtctctactaaaaatacaaaaattagccgggcatggtggtgggtgcctgtaatctcagctagtcaggaggctgaggcaggagaatcgcttgaacccaggaggcagaggttgcagtgagccaagatcacgccattgcactccagcctgggggacagagcaagactccgctcaaagaaaaaaagaaaagaaaattctaagtccgaggcctggcatggtggctcatgcctataatcccagcactctgggaggccaaggcaggcggattacctgaggtcaggagttcgagaccagcctggctaacatggcgatacctcgtctctactaaaaacacaaaaattagccaggtgtaatggcgtgcgcctgtaatcccagctactggggaggctgaggcaggagaatcacttgaacctgggaggcagaggttgcagtgagccgagaccgggccattgcactccagcctgggcgacaagagcgaaactctgtctcaaaaagcaaaacaagaaaattgtaattccaggatataaacaatcaggtttgaatcccagctccactatttttggctaaataaccttgggcacattacttaacctgtctgtgcctccatttcctcatctgttaaatggagctcataacagtggatgtgagaaacaatgagttgatatttgcaaagaacttaactttgaatggtggacaataagtgacagttatgataatgataacataataaatattaaaatgatgtcaggtgcctgcctcagagtgaatgtaccaggctgtaggaacagatgcctgagcttgctcccttagaacaacagcaacactatcttctccagtaggagaccctgttttacttctccctgatctggtcactggcatttattcatccatctacaaaatttattgagcacctacttatacaaggccctgtatggggtactcgatgggattcaggcattgattggttaggctggctcgtcttcaccattgagaggaagagacacacatctgtgtgatgacaaaaggtggtaggagaaaggcctcttaagtgacgtgcacatatgaggtatgtctcttccaagactgagctctgccagctgtaaggcttgccagtctcttatgaggataaaatgagatggtgtatgtgagcagacaccttgtaggtgtgaaagtacgttatctatttataatgcctctagagttctgggcaagaggttcagatttttcaaatgtctccaagaaccttcagtgcatcttcaaaggaagaacttggatcaggaaggatcagttgatttctttccatgcccattccttgggcttgttcctatttggagtagggacggttaatctcagaactaccccagctctccccatcttcctagagcttaaagaagttcctgggccaggtgcggtggctcgtgcctataatcccagcactttgggaggccaaggcaggcagatcatctgaggtggggagttcgagaccagcctgaccaatatggagaaacccctgtctctactaaaaatacaaaattagccaggtgtggtggtgcatgcatgtgatcccagctactcgggaggctgaggcaggagaatcacttgaacctgggaggtggaggttgcagtgagctgagatcgagccattgcactccagcctgggcaacaagagcaggcaaaaaaaaagaagaagttcccaggaaccagagacagaagagaatttcctgcttcttttgatcctcgtgcttaccccacacccccccttcctctgggttagtctcacacacacacacacacacacacccctcctgtaccatgagccctgcccttgtggttgaggtggagggatggatagaggcaatcaaggagtcagggagtcccaggaggggagctgggggtattcttgccacaagagcaggaaggtggcctgatgagtgaaggacctgcttcctcagtggggctcaaccactcactgacttccttgttgtgggactttggacatgagaagtaacagttaacaacagataacaacaataactaatgtatattggatgtgcaaggatgtatcagcagcttgggctgccatcacaaaataccacaggccaaatggctttaacaacaggttttattttctcacagttctggaggctggaagtccaagattaagattctaactgatttgatttctgatgagggctctcttcccagcttgtggacggctgccttcttgctatgtcctcacatggcctttcctcaggtgcttgtgcaggcaatgtgggtattagagaaagtgagctctccagtgtcgcttctcacatggacatgaattctgtccgatcggggccccaccctgatgacttcatttaatcttaattactctttagaggccccatgtccaaatacaaccacactggaggttacagcttcaacatgtgaattttgagggacacaaacatttattccataacataggtttgtgctaagtgcttgacatgcagtatcataattgatccattcaataatgcttgcttaattttctctctaacttcctaaaataggttcttttattgttaccagatttttttttttttttttttgaaacagaatcttactctgtcacccaggctggagtgcagtgacatgatcactactctccacagcctcaacctcacaggcttaagcgatccttacagctcagtcccccaagtagctgggactacaggcatgtcccaccatgcctggctaatttttgtatttttgtaggcacagagtttcaccgtgttgctcaggctgttctcaaacccctggactcaattgatcctcctgccttggcctcccaaagtgctgggattacaggcatgagccactgtacccagccttgtctccattttataggtaaagaaactgaggctaggtgactactggcccaaggtcacacactctctaagatggaacttaaacccagaactactgacttcctgcttattaactgccacgtctgtctgggccttaagttcttcatgttaaaaatgagggtgagaaggccggacgcagtggctcacacctgtaatcccagcattttgggaggccaaggcgggcagatcatctgaggtcaagagtttgagaccagcctggccaacatggtgaaaccctgtttctactaaaaatacaaaaaaattagccagtcctgggggcgcctacctgtagtcctagctacttgggaggctgaggcaggagaatcgcctgaacctgggaggtggaggttgcagcgagccaagattgcaccatttcactcacgcttgggcaacaagaatgaaactgcatctcaaaaaaaaaaaaaaaaaaaaaaaaaactggtgagaatctctgccctgtctacttcatgcggggttttacctggaagactttgattcctgcaaagtgagatgtgcacatataagttgttttccttaagcagaaaatatccaatgatagaagtgttctaaaatgtggctgtcccaggacattcaaattagccccccttaatctcagaactggaagggagctttgagatcatctacagttgatgcttgaacaatgcaggggttaggggcattgacccccgtgctcagttgaaaatccacagataacttttcactcccccagaacttaactactaatagcctactgttgaacagaagccttactgagaacagaaagttgattgacatatattttgtatgttatagagattatatactgtattcttaaagtaagctggagaaaagaaaatgttattaaggaaatcacggggaagatgaaatacatttactattcattaagtggaagtggatcatcatgttttccatgtttgttgtcttcatgctgagaaggctcaggaggaggcggaaaaggaagggttggtcttgcagtctcaggagtggcagaggcagaaggcagtctacctgtaagtgaacctgcacagtttgagcccatgttcaagggtcaacttcagtgttatataaccactccccaccacatcccaccgggtgggataagaaaacaggtgcccagataggggaaatgccttgccccaggtcgtggattagaactcaggggagcttagtcctggtctacttactgctctacaggttcttcccaacaggctcagcctcagtctcgtccatgaatttttccaaattgggccatttggtgggagcagcggggttccacctcactgctgg

SEQ ID NO: 96810 - DNA, 14803 bp, Homo sapiens
cgccctcaaagaattactgatcagtcaaggagacaaaataaattcacaggtcagagaataaaaacctaaactaagtcattgctgtaatcagtaaaaagggaattcagagaagacagaattcttggaaggcaggtcgaagatgatccagaactatgtgatttctttctttgagacagggtcttgctctgtccagcccaagctggagtgtagtggtgccatcatggctcactgcagtcatgacctcgtgggctcaagccatgttcccacctcagcctcccaagtagctgggactaaaggtatgtgccaccatacccagctaatgtttgtattttttttgtggagacagggtttcaccctgttgcccaggctggtcttgaactcctgagcacaagtgatccacctgcctcagcctcccaaggtgttgggattacagacgtgaaccactgtgcctggcccacatgatttcttgacatctggagcaaatatttatctttctctgaagagtgtcccttggtttagcccagcatcttctccacccacgagtaacatccattcacagcatgtacagctgagactgtttggaagaaaaattatacataacacccctcaggacaagatgagtttagcaacaagagttcaggaaattctcactactttgtatttcagccattaatgtctaatgtcaatatattgttttttttttttttccaaatagcctcttttgaaagatatcaagtcttggtataataggaagtctaactgaaaattggtttaaaaaaccaaaaccttgagttcttaccccagattactcttcgttaaatacacagccttaagcacatcccttcttgcctctgttacttgctctcgaaaggaattgactaaggccagatgttccagacccaaatctctggcttcctaagcagcatgcaagacggtaatgatttcagaaattctacatgcacctgtgatgcatcctgatcagccaaccaaattgcatttggcaggacattttttttttaacacctggaagacccggaaagataaagctgccagtagttaagaatcaatagattaggttttagagagaattcaagaatttttcatttctctcccaccttgatttatccttgagccttttaaaaaaaatttatatataatagttgtacaaatttttggagtatatgtcatattttaatacctgtatacaatgtgtaatgatcaaatcagggtaactggaatatccatcaccagaaatgttttgggaacattacagttcttctcttctagctattttgaaatattcctataactgcattttataccccttaaccagcttctcttcatctcccctcctgccttcccttcccagtctctgataactaccattctactctcacatttcagaaagtctgagatacactagaacaaactccaagaaagggtggtcaggaaagttcagatttagaaatcacatccaatgaggggatagatgaagcaataggacagtttattctgaagaagtagaagcctcaagacacacttaagcactttacttaaatatcctagggcctaccatggaggatattaggtccctgcagaacagggaccagtgactacaaatcataaggagacatatttggcttcaatccaatgtgggaccaagagactgccctttgagagaatgagctttctggccgtgagtccttgttgctgaaattattccagcacagaggagtcctgaatgaagactaaaaacctgttgctaagattacactatgttttctgtaggatttatttttgccatacattttaattttttaggatttggaatattccctttatgttctaatacaaaccctcattttcccagggagatgaataagcgtctaacagaggaacaagccaagaaaacctatgatcgagcaattaagctagaacaagaatttggagaatattttacaggtaagttcacttttaccctggtagtgtgagaaaggggataaattgtctgacatttggcacagagagggttctgggcctggtgtacttgtgccctaaaaccttcctgttgagaatccctaatatctgtttcatatacaaggagtatccctctgcttcacccattttgatgtaaaaccctgggttctcctgagagttcagctgcagccagctcccaggttcccaccagccctacccaaaaccatgggcaggagatacccctgagctatctcctaccatgaaaaggatttgaggcattgctacctcattaaactatctccctgatatcatcagaaaacttgaaaaacaaaattttagggctcaaaatggtcagtgtccaaagcagttactcttgagaagaagcttggaggcgtccgtccccagctccatgagctttcatcagtgtccctatcagcagcacctgaacaagatgcttaaaacttcctcatgtttcagttcactgtgtcaagtctcaaccaaaactgctttttttttctttttaaatgtttccttggaaacatgaaggggaatagaggttttcttctggagagcctgagttctgagttctgtattcctatatactttcatagaacactgagtaatcagactttgtgaaatttgccttacacctggttcccggaggtttaaaaacaagaactttcgagctgggcttatgcctctaatcccagcactttgggaggctgaggtgggtggatcacctgaggtcaggagttcgagaccagcctggccaacatagtgaaacccccgtctctactaaaaatacaaaaaattagctgggtgtggtggcaggcacctgtaatcccagctactagggaggctgagacaggagaatcacttgaacccaggaggtggaggtcgcagtgagccgagatcgtgctactgcactccagcctgggcaacaagggtgaaattctgtctcaaaaaaaaaaaaaaaaaaaaaaaaaacccaagaactttcttcctggattaccatatgtgaagttagatgttttattttttaccttattcagaatatagaaagtgtcagtgccttagcagtttgtaaatatcttgaatcaggtaatattaagtaatctttctgtcagtaaccaagatacgagctgtgtttcatcctaaaagaacatccaggtaggagaaacaaaagtgtacattttgacagtggtttatattttgtatacaatacaataatatattctgaggattgtttttaaatatctaaatcatctttcagtagtaatttatttttaagacctagtgtcatatggataatactgatgtgttttggaaatctttctacaagataacttttgttcaaatgagacaataaaatgtacttaaatctactccaagtgacttagtgttttaggagatacacaactgagcagtttgtttatatttcttcctgtttatgtttcttataaatagtggacttatggtattctcaatatgaatagctctgtatggtaaaaatctcaagttaccagagatttggggaattaatgggttttcctattaagggctttgagggttgggaggctaactaaacttccctctaaaatcttcattatttcctcggtgtctacaatatctgaatttctgctgctgccaaaataagtaaatatacagactgtaaggccagttttcttttctaaatagggagctctcagtctgaaaattgatcattgcccagctcagtgcctggctcagagtaggcacccataaaatattggttaaatagatgagtgataaattgtccagtactacagacagacatgtagaaagtgcaaagactgtgaatcatttgttactgatccaggatatccattgaaagcatttcttaaaatcatgaatgtaactttgcttatatgaattttctgcttcttcttactaatgaaaaatgatatgaagcttcctgatgagtcatctgctactgatttgagcctccaatgtgtaagtgatgattgttcttcaccatccaggaaattatttctaattctgggtgtgtttgcttttgttacagctattgtccaaggagatactttagaagatatatataaccaatgcaagcttgttattgaagagcaatctgggcctttcatctggattccctcaaaggaaaagttataaattagctactgcgcctctgacaacgacagaagagcatttagaagaacaaaatatatataacatactacttggaggcttttatgtttttgttgcatttatgtttttgcagtcaatgtgaattcttacgaatgtacaacacaaactgtatgaagccatgaaggaaacagaggggccaaagggtgggacagaaaagacattgcagtatgaaggaaggctttggtttgctcaaagtgccaggtgtagggatgaacctctgacgggctttctgcccaagagatgagatgagagcctcctcaccccagcagatgtccagagctgatttagctgcagagctctctgtgtcttttgctttaaagaaaaattgccagcactcgaacctcatcagccttcccattacccacatctgtaattggtacactttgaattttataactatgcacatcttttgatttcttaacaagcaaatgaaagaaagaaggaaaaaagaaaggaatccctttggagatgacatactatcagggaaggataagtgtgtagttttttgactggcatctgcaaagacaagaatttcataaaatttgcaagtgtatggaggactaacctcactgacaggaggggattccacctgggattagctttatgattgttgattgcctattttgccatttataaactgaaagaaggcactaaagatgagaataatttatacaataaaaatatattaaatgtatagaaacaaatttctataggttaaaaaagttttgtgaaatattttgtaaagactaatattgaaagactaaatgtatgcaacatcagcagatgatcaaattcaagacctgaaagttgcactctcccttttgttgccaatgatctgttaagagcatctgagttccttttaagtctgacaaagacttcttcctcacttacctcccttccacattagtgatacactctcatgcagcacatcccttaatgagttgccctcatggatatttttggaagacatttggttaatgcatttttttatgctgatggcttttcagagacaaacttatgcaaatgatctaaagggaagtttttgctttcctctagttaaataacctgagcctgccatgcaaatagttgaataactttgttcctagttactgacatacaattcttaaaggaccatttagcattttggccaacaatgagtaattaggattagtacctttttgttttacagagtaactgagagttttgtaacatccagagatggtactagagccaatgagagatctgttcctagatgcactatttctttgaggaagagagagaagagaagtgtctggttgggggtgagggggtgcagacttttttgtttctatgtacagagcaaagagatagagtcacaaggaaagacaattaatgactttgagctcaaccaactgaactgcctttcttggagctgcacctggaccaagtttattttttaacaattataataacgatgatttaaaaaaagaaacctcccaaagcctataaactgaactagaagagttggtttcccactttagagtggatggcgacatcagcattgcttttgcccatggtgtttggggagagacttttcagtgataataaccactctactctgggttctgtgcatgcccagactaagccccatcgccttatttctggggtacatccagacctggcagggattctgccacactgtgcagcaaaccagcatgtaggctgggtaggagagcaagagatagagccatcagagtgatggggcttcttcacagtaagaacatcggagcttagaatgagagtctctttccaaaaacaggcattgttcatcttacgctaaacatcattgtctgcctggctacagtyaccaaaacaaaacagaaatgcaaaattatgcatcttcccatagtcctgaggcttcctttgccaatggaagggctagcaatgcattctccctctcatgaaagttaaatttccagagacttccttagattgctcaaaatgttaaagatatgtccatgtckgcaattcgccagtttcaggtcaaggcctactttcatcaatattgctcccagaagttttctgacaccagaatgccattcctgatcccagctctatttttaggccaccacgataacttctttggtttctcaactgagcatgcaaccatttatttaaaagactgtcattaatgagtagatgttttcgcgggtcgtgtgatgtgctttccatttactagtgttgctgtggctaagtacaatcaaattgaaccaccaacccttggttttgtagtaatataactatttattttcctagtgtagatgctttcagattagaattggcatttgcactgatttttttatgtagatttatataaatatatagatacatatatatttgcttgaagaatcaccaagcaaattggtgagagggtcttttccaatagaatttacacctccatttgttgtgttgtcttgcacttcccaatgttgatgtctctatggctccaatgaactggtgtattttgcagcaaatctgatgacttgtatggaaatggcatgaaagttacccagattacatctggtgcaaatgcactcggagcctggggccagactggtgctaacactgcaaactttgtccagagctctctccaacctgaaggcttgctgggggtgcaatgtcaccttcacacatgctgggccctttcagaaaagtgccagatcgtgtaactggtgctatttttcatgctctggtacaatgtgtagcaccacgggggtctcagctttaccaaaatcaaaattccatttgtcagctaagtgcagaggcatttgttttttgctctcctcccacagaattgtcggccatttatttgcaggccttttgcgggatttcttggctatttatttgcaggccttttttcccagccccaaattcttgggttggctctgtctgcttaaagagcctgtcttcacaaagctgcactcgggtgcctctgtgcgctgtcttagatcctactgccggcccttcaggactccgagccaggaaagaactctccaacctctggctcgagactctactttttttctcattcttttccttactctcctcctccttctacttccgactaattccatctctttttttttttgttcctctccttttcctattcctccttcccaccatctctgagttgttgactttctcctataatccttctctattccctttctctttttgtccacctctcctttagtctctgtttctctgcccttcttattcctcttctgtcctttctcctctcctcaaatctctgatcatcttctcccgtacatccctgtattgatttttctgtcctctaaagggctcatggctgattcagacagcaagtccatgcactggactaatgacacaaatactttaggtcgccgtttcacctactcagcccagaaagtaaagctgagcgtgaggccctgacctggagcctgctccagcccgcctcccggagccagcctgcaccgttgccctggcagcgatgatgcatgtgctgtgggccctgccggcgcctgagtgcctctgcctgaacactgctcctaagcgagcccactcccagcactaccgcatggctctgaggacattttctttcaataaaggcagactctggccccaattattctgatagcaaacctcttcctcctcattgaagccatgccatcaccttggtttggagagagacatttttttcccattcataagctttctttttcccatttttatgtgaagccccctctgcttttcagctggtgattgctctggtgagactgaatggacttgctggtgaaatgaaatctcttctttcctgtcttggtcctgcctaaattcctacaaatatatttaagccaaggactcaggctaattcctaagttgatcacattaatttgttactcctagagggaaaaagatcaattcccttgaagcatgtggagtacctcctgtgacagctgacttgccaggggactccctacagaattctgtgatatacattttacttctgtgtatgtatggtatatatggtatgtataccatgtacacacgttacattgagtatgaatgactgtggttggaaacmcacacacacactcaagtctgtaaatatccttcctcactgaaacctgtgctttggaaatcatttcttgtacagctgtgcagtttcttgtaacagctgaggacaaagctaagacaggcggacaatttagacaaagatcatctaaagagtatagtatctccctagcaactcatgaggacagacaaccaagtggcaaggttgactcccaatgggatggcagacttttcttctctcctttttgagtttgtgtttcctaagtgtttcttaacttctgagtgcaccaggctgtacccgttagatcctttcaatatgacagttttgtgcttctctctgacaggatgtttctccaccgagctgtagcacaggatgggagggaggtgggaatactccttgcctaggctggagtttacagagacactgcacagcttacactcctgttaagtgtaaatattcaacacttccattccatttgtgtaaaaaataaagcacacacgattataaaatcaagatgtatatttcatactcagtgtgtctgtgcatatttattgcgtttctagttgtcagcggtgggtggccccattgtaaaaatgcctgatagagtgtttataaacatgtcatggttttattataagatataaatattaaaacattttatactttatggcaaatgattttctcccaaagcataatttgtcttatttcataaggaatagaatcactcatgtctatttttatcaattttgtctctgattccagagctaaaatgcaattagggtgggtatgccctgagaagtattggcactgctgagaggaagtgaaagtgctgtttttgcatattcttaaatatttggttaccatcttgcctgcttttaatcgggatttttccaaaagtgaacaatgtattaaaagatagatttttaaagatgctcacagctatgtgaggggaaaaatcaatttcccagtgtcaaactgtgggattccagaagatattaaggatacagaaaaatgatttttttcttatctgaaacattatgcaaagaaaggcataaactggggaggaggtatcattgtcttatataccctggagctccaaagatttgaccatatcaaaaatgttgggtttgggaatctggatctgccagataatgttctaaatttttcacttcaggttaaatacatgccttgtcatattgacatttagccaggtttcacagctagagaaccaaaacaaattctactcatgaaagaggtgaaattttgcatcaaagcaattgctttggattatgctttgtttcatgataaactaccatataactgaatcagccatttgggaagccagactagttgttcataccatcctggccatcaggaatctgccaggtgtcctaaagctgtccttggtgctgggtagtgaacaaagactctcagacatggtataagaagacattgactgaggctgcaagacgtgtggacctcaaattttgacaattatgcaattttcaacatttgcacagtctcacctggtttaatattaatggtgacaactgtacacaaagccagattcacttcaataatggatgtgttcataagaagctagaagagcattcagcttttctctgtgtcctgtttcatgtctgcaaaacagtttttaaaccacgatcatgctagaagtctcaaaagctagaagtggctgacacatctctgaacctaagaggggctagttatgaacctgtgatctctgtagatactctgaggccatacacccagtgacagaatttaaaagcctcaccaaggcacaaagctaggtaacatctgtacaggcagccacagtgagacctgtcatctttaaagttgtcaagggaggatgtgttctatagataataaccccaatttctgttctctgtcacctttcccttagggacatctcagaaggcaccatagctatcattagactgatccccttccctctctagtgttacagccaaagcatcaagtccaggccttgtccctaatgccccttagcactcttaggacaaagctagaaaacgtgggtaaacttcgctaaagcctggggatagcaaaagggaaataaaagatattctgatttatggtaggagcttagtgcgcagcccctggcttgctgacatgaaagacacaggctatctttccccagcctcccaggagtccctcaagcatagctagaccagacgtcagaccctttcctctgttgcagcacacctgagaggcgctgtatccatgcttgactcagcacctgctacattaggtgcctactgtctccatcacaggctagaatacaaatggaaatgactcagtgtggctttgattactccttaattgtaaacttcaaaggacaaatgatttgcaacatgcttcacatctcaatataaggcatcagtagaacctcactggtctaaactgatcaaagcccaaaaagcaaggcccatgagagacactagttctctcccacccgcttaaggcctgtccttccagttctgggtccctgtcttgtgtagacgattgaattaggtaacaactcctcttcaagacttcagaaggatgagctgtgtgaattttgaacagcagaaaactaacatccataccataagccaaagatacagaacaggcttcattctagcaaaacataatcgactctatttcaatctgaaagacgaggaaaggaagaaaaatactttcttttaagcaggcattaaaaatttcaaattcttatagctcttcatagcaaattacaatgaacagtttcttagtaacagaattagtccctcagagagaacagttgatttctctaacaaaaatatgaaaccaacaagctaaaaggttggatcctaattggattgttggatttttgcaagccacacctgtgtctttgatatcattagtaacctttcagcagaaattgtgcatgccaccatgctccgtcatctggcccttctggtatgaataacccttgtggtgaggaactctctccacttggtttcccaactggtttcttataacatcactcatcctaatttacttgagccaacaaatctggcttctagtctgcagtccttttcctcaacatttggataaacactcttgactacctgaaattcttcagagtaaaaagttatagaggctggcccggcgcggtggctcacgcctgtaatcccagcactttgggaggccaaggcaggtggatcacctgaggtcaggagttcgagaccagcctgaccaacatggagaaaccttgtctctactaaaaatacaaaactagctgggtgtggtgctgcatgcctgtaatcccagctacttgggaggctgaggcaggagaattgcttgaacctgggaggcggaggttgtggtgagctgagatggcaccattgcactccaacctgggcaacaagagcaaaacttcatctcaaaaatcaaacaaaaaaaatttatagaggctggattcaagaccagcctggccaacatcataaaaccccatctctactaaaaatacaaaaattagccaggtggagtgcaactgtaatcccaactatccaggaggctgaggcagaagaatcgcttgaacctgagaggcagagactgtagtgaacctagatcgtgccactgcactctagcctgtgtgacagagcaagacaccatctcaaacaaacaaacaaaaaagtttatagaaaatgtgccatatatgaaactgggttcaattaattcattaaaactgggagtatttacccaacatttcatgcaaagaaagactaacatgcttaattaaaattaccacacaaggaaaacatttccaaaaagctggctttttaaattatttatttatctagttatcattccttacacatttggtcagcaaacaataaacacttgctaggagccaggatctattaagatggtaaagtagaaaatgaaataacaaatgctcagagcactctctgtcttttcaaggaatgtaaacctagtagcagaaacctattttaaaaagatagttaaaacacagatgctctaaaacagaccagtaagtgcataaagactccactccaaacaagtgacgttgacatccagaaatcagatgtgcagctgctcatttgctcatacccttggaagagcctgtatggcaaaactaagtctcttctgtggtgttcctgaatctgtcagcctcctgatacccctacccaatcccactggccacttgaattgtctaccaataacagttgggatcccaccccatccctgggggagaggtgaagatgacaggttagcacagactaacttgccaggtgaacaaagagtggtaggcaaggtaggcagaagatatggggaggttagtcatccagaaccaccattcctaacaagtggcaagaattatcaggaagcaagaaacaacttgggtaattggtcaggatgaaggacaaaccaggtactcacaggagaaactagagcaatggagagtttctgttttctctgcaatacacagactattcgatgcatcaaagatctgcttcaaagcaaaatggtgcaatgaggccttcttttctgatataatttcaagcattacacacattacttagaatcataagcagggttttattcccttggaaggggtagtttcctgacctggatgcttaaatcaaaaacatgcaataggaactaaaggggaggttaaactcaactttcaactttatgaggtaagtatgttcctattttatcaacccaggaaacatcttaacaagacttagaaagaggggtggttgaaagagaaaaattgatgtattgagcctataattgccttggtattttacagaacaacttctcagttgtttagtgtcagagatgatcttgacattgaaacccatagataatctccaaatccatttttagttaatcaccttactccctgaaattttgtccagcatttcagacaaaggtcaacactgtcagaaatgtggctcagcactttcctggagtgagggatcaatgcacagggataagttactgactgtaaaaggaaatgagactgaatagtgcaacaacccccgggctaccattattgaagttgtgcatttcacccaataatctgaagcaagtccacaagaagagacttctagtgcagtccctaatgactggtttgcctgactcccttatcacattataatgtggtgcacaacaaaagtatgttctgtgtgtcctgggacaggaaagttctgttttgtaattatgttccattggaaacagagcatcacagagcaggggcaagagtttggccttggtgccagcctaccttgggagcctgcagacgtttatacccacattctatgtccccttcccctctgttaactgctcacagagctctctgcaacactagaaacatcacccagtcctatgtctccatgaatgggcacctctaaatgtgatctgggaccagaggcatgagtatcacctggagcttgttacaatgcagaatcttaggccctaaccatatctactgaatcagattctgcattttcacaagattccccagtgattccacgcatgttaaaatctgcaacacatggtttacaaaactaaatcaactatgaagaaaatagattggagagaaatattttttgataagagagccactaacttcaatgatgaaaacaaaacaaaacaaaaaagcaaatagcagaaaaggaggaaaaggaatatctctgatagtaagcaaatagcttggtggcatcatctttaaacttaaaaacccagccaatctctgacaactccaaggtggagaggtgggttgcaaaattctataaaatacttgatcaatagacttaaacacgggactggttatttccactgtacagactgaggaggcaatccttggcttgcaatgtgaaggatgacaaagcgacaatacaatgtcacgagtcacagcactgacctaagagcagacctgggttcaaatcctgactccattctttactagtcatgtgatcttgtataagggacttaacatctcccaggacaaattttctcactgaaacgtgacactaacaacagcacctgcctctctcacattcagagagctgttgtgagaaacccatgaaaattgcatgctacacaggaagcactcagctagtctcagttgtcataatcatagttagtcactgatctttatgacaaccatttgaaagagacaaggccatttacttccccattttattttattttttattttattttgtttttggagacagagtctccctctgtagcccaagctgggctgcaatggcgggatctcagcttatggcaacctccacctcctggggtcaagtgattcttctgcctcagcctcccaagtagttgggattacaggcacacaccaccatacctggctaatttttgtattttcagtagagacagggtttcaccatgttggccaagctggtcttgaactcctgacctcaggtgatccacccacctcagcctcccaaagtgctgggatta

SEQ ID NO: 96811 - DNA, 15560 bp, Homo sapiens
tgcacctgcatttcagcagcagcagagtggaggaggggacagtgaagaagagaagcaacaaagagtgcatgccggctgcctttccaggaaggtgcctggaagctgccaggagagacttctgcatgcacacaccactgattataacttggtcatgtgtcacggcaaggcgagggttttgaggcaagagttgtggagaataaagagttgttcactttctatttgaaaatcagctagtttattcatttaatttttcttaagttcctgaaacaaagttatttgcaatttatatgtttctgggcctgagtttcctggaatagtaaagtcatgttaacagaaacagtggaaaagaaaattcatgttaatgtacacggtaagctgtgtgggtgtaagtagttttggttctcaatatctatcctaggacctcgcatagtgcatggcacatggcacgtgatgctactcaataactgtctgttgcctgtgtggtaatagctcacacttacccagtgctcactgtgtgctgggcaggatgataatgttctccttgcagaatctcatttaatcctcaggacagtcttttaagtggccactcttgttatccccactaccttgcagatgaggaaaccgaggcttacgtatattttcattcatttattcaacaaatatttattcaggacctgctatgtgctgggtactggagatatagcagggtttaaagcacaccaaatccttgctctcatggaatcagccttctgggtaattttctaaaatcacatagatactgggtcgagggtagcccttaaacctaggtggtctgactcctgaacttgcaatcttaaccgttgttttattggtagatgaatggattgatgagtgtggtgaacaaaaattgtgactatccatttcacaaacagcttcgtggttgccctttagctccagcttggatggttagattgccctgtctgaagctggatttattttattttatttatttttggagatggagtctcgctctgtcacccaggctggagtgcagtggtgcgatcttggctcactgcaacctctgcctcctgggttcaaacgattctcctgcctcagcctcccaagtagttgggactataggcgcacactgccacgcccggctaattttttgtattttaatagagacggagtttcgccgtgttgcccaggctggtctcgaactcctgagctcaggcaatccgccctcctcagcctcccaaagttctgggattactggtatgagccaccacgcctggccaagctgggtcttttgaatggctatgggtgctcagtgaggcaaccctaggtgatatcataacacctctgcttatccagaagacaattagtatatatgttatcttgttagaatccatgtgccaaaaatagaaataggaaaggcaaataaggatatatccctagattgtcaaaatggtgattcagaattgtgtgagatactggtttactgcctacagtcacatcaaatgtgttacaatgagcatgtgtctgggggttcgtggagtaaaggtagggattatggatcaaggacaatgttacctcaagagcaaaggtcagagacatcaaaaataggcatcaacagttttaccatccttttccagatagtccattgttgcttgcaccaagttgagactttctttgcaacaaagaatgggggaaacatttaaaaggtaataactttccctacatgtgatctagtcttctttaatgcagtgccacgtgccaacaaaagtctcataaagcaccagtgatacagggtcttgcccaggaaatatgtgtaaaagaggggagctgctggacttcggagagctggggtccagtgtaggttctgtcactgtgagatcttcaaagtcacgcaaactcaagtttcctcttgcggtttttttcttccatggagcataatggaagtaagacatgatgtcagcacgcatgaacaacctgtttgaactcagtgtgctcatctcagcattaacagaaagtgcctttacaaaagctttggagacattaaacacgggccccagctggatgtggaaacatgtagggaagtacatgccatttgacaagtacctgtgaagatggctgtgaacagtcttcatcaggtgtgaatcggggatggattgactgccaaggactttagacttgataagttagagccttggaggccatttcagatagaaactcttcaagcatctatctagtctggtagggttgcggggtggagggccaggaatgccctgccaagtaaaatgtgatgcccgagaaggttcccaattcaggattccacctggctcccacgagccccgctgtctctcaggtgtgtggagtgtttctcagtgctcattgcaaggccaccctgaaaaggcccagcgggtgactgtcaggaccacaggactctcctggctcactacttccaaagtgctgagcgccagacagggctgcagagaaccccggaaagtgtgcattgtttccacattatttggagtttctcactcccatgtttttttttttttctcttctccttctccccgtgcccaactagctgctcctcctgccctgcaggcactcaagcaagaggcccgccagaggacagcaacactgatgtgcttcggtcgcctcccgcccctcctgccctccccacagatgatagcaaaagggaaattattttttcttggggctggctttggtcccccgtgttttcatgagtttgtttttgtgtctctcgaagccattttcagaggctctctggtaccgggtgttgagcccttgtcctgatgcaaggtcgggaaggggcgtgctccaggaataaaccagaaggaagggctggaggagcctgggaaccttgggataggagtgtgggcctcagtagttgagctgttttctcctggcctgggaaagaaacaaggggtgagggggtggaagtggggtccatgctgaggaaggggtgcaagtgcccaacacgatggcggtctctctctctatttttatctgggtgatgggtactaaagagcctctgtaaggggaagagaagaagtcacgcaagggcagcccagagcccgcagtttctttaatgggggagaagggcacatgagatagtcctcacagtttgacaaatgtggtgtgttgtaaggacgggagccttggttgcatttttggccctggcagggagagcctcccttccattgcagtgttccccgagtgtccgccaaactgcagccgtccagggaagagaaggattgagtgaagaacatgcattttggggtttgggatttttgttattgttgttagaaacagggtctcactgtgtcgcccaggctggagtgcagtggcatgatcatggctcactgcagcttcgaccttctggactcaagccatcctcccacctcagcctcccaagtagctgggattacacgcacacaccaccacgcccatctgctcctagtttttttctagataagcaacctgagacacaaaggataagcattagcagctcatacacgtgacagagccagattcagccttggcctgactgatttccacatccagaattcccctcatatagggagatagaaatctcaggatctcaacaaggtacaaataacgcacattcccagaacatagagccagggacagtcccctctcagttctcttctaaaggtggttctggcacaacagttgataaagctgtgtccctgaagggctttttagccctgggtgcttcctgtaaaacttgtcagcttccactggatctgcgggactgtgtccctcacaggctggacacccggccctgcggagaggacttgattaaacaaggtataatgtacttctctttcccatccacagatggatctgtctgtagaaactctgttcagcttcatgcaggagcgccagaaaagatacgccaagtatgccgagcagatccagaaagtgaacgagatgtccgccatcctccgccgcatacagatgggcatcgaccagactgtgcccctgctggacaggctcaacagcatgctgcccgagggcgagcggctggagcccttcagcatgaagcccgaccgcgagctcaggctgtagctgccgcccggcctgcctggggctgggagccccagacaccgacaccctgaggacgtgtggagctaaggtcatatcatctgaccaggtctggaggctggcgggaggctccctgaaagtgggtgcgaaggagtccggctggcatgaaaatctgactttgcccagctcttttccttgatgcagtttcccggtgtggaaggaacctaaccagttctcggtgataactgaagctggaacgtgtgaattattaggaattctttgaagaactctgcattgagaattatttttatttagttttttttttttttaattgagagtatatagtccagtccaggtaccggaataaaaatatggagacaaggggaaaatattttacgaagctctgtgttctcaacgccctcatgaacttttcagtaggctgtctggtttatgtgtggtcaacttgaaaaactaattgaatctaggtctctgtattgttcctgtttctaccctgactgtttccgtcacaccaagcccttatctggggcgcgtcttcctgcccaggtggaacactggcattttgttgactgtcaggttaggtgtcccttagtcgtcatcagaagctgaagccttcctttccacaccctcatcagattcatctccactgataaccggtttccttgatgcagacatagtttagctttctttgactgcagagatgtctcattccacagacatttcttgaacccatttgatgtgtccaatattgtgccagggatacaaatatggccgtatagcctcaggccttcatttctgaaaagaaaaaagctcaaaaagctgctgaatttctctgggagtttaggaaaggaagttatttgagtaacaacaaaagtgcttagtgtcgtactttacacatcataggtgttctaatggaagcaaggactggagaagcaaagagtggaatgtgaggagcagacctaggcagacaccttgagactaaaagtcagagctgaagggagtcgctggggccaggacggcatgcaggcctgtaccctgttccctaagttcctgcaagcgtcgggaggtgtgttttcagataccagaaagagccttcagtagattcacaagattaaaattgatgcgcttaatttaatgtatcttggctaaacttgatctgattctaatcttggtttgagacagggtcttgtgctgttgctcaggctggagtgcagtggcgcaatcatagcacactgactcctcaaactcccgggctccggggatcctcacgcctcagactcctgagtagctgggattacaggtgtgtgccaccaaatccagctaattaaaaaaaattaattaattttacattttcaaattcaaaagaataatacaatgaatattcatatttctttcacctagattgacaaaaagtggtatatttaagacatcaccatcattgtctttcttctggagtatacagaacccggttctgaacacagggatatgtttgtagcttcgaggaatgaagggctgtttacagagctacaaaaatagcttaggtgccattatcctcactgcacttaatacaggtgacacatgaaagcacagagtgggtggcagttcaagcctgcgagggccgagcctttccactgctgcagctgttagtggctggcacagggcaggatggcagacctagtgcagcacaaacaaaccacgcagtcagccagctctccagccaactgtgtctacttctaaagtagaagttagacaaaacatggggttcacttagattggggtcctgagtaggtgataggctacttattactgggtggaagcggagaagtatggcagaagaacaataggcaaattcaatactcccggaaagaattctagttagtttaatattttgatggcatgttgtggtttctgcagtgtcgtgaacttggctaaactgaactgtgttcccagaattcccttccttgtttgtttctctggtgagggttggccacgagagagatttgcatgaggtttggaagtggaagtagagcaacagccatgygtattcactggaagtggatgtaggtcaggccctgttccatcacgtgcacgttaccatggatctcctgcacttgtggtgtgggcagccgctgggcccacggctcctcccactcccgcagaactctgcctttggcttttccagaccctgggccgggtatgagaaccagcttcttggtctgcagccacaaggatgaaggtttggggatgagagaccagcacgggctctgatgagagacaggtgcaggtcccagcttgtggcttgcaggtctcagtcgtacttgctctccctcaccatcctttccaaccgcctggcctgtggtctggtgaagaagaaacagccgaaccgagactttcaccagcccctcyaattgctcaaaccgctttcacaatcctctctttctacatcatycctagtggttcttttctgatggaacctctgactggtaacatggcattaccagtcctttccctctcatgttttgctatttcctgatggaacctgggagtctgagtgatttgtatttcaagaagcagttatgctggatctctttgttggttaataccccatgacctatctggccgttatgggatatttcagggataggagttgtgaaagagcccttggctggacgtttctagccttaatctttggcaagccatttcatttccctgagcctcagtttccgccttcctacagcgtgagcaggtctgggtgggctctcaagcccctttcagctctaagattccaagtctgtgattccgatacatcttgactacaatgagcgtgtttaccttttgtctctgagcagtggccctgggtcttggtagtgactaaattccgagctcccaaggtgcagctgcttttcttccttttaattataaattagctgttcattggctgcttctttctagagcctgttttgcttatcttgcaatctgttcatttctgttgatgaacacagtcaaataggcctctatgtgcagtctcctggtttccctggtcaaagtggaaggttggtagaaactggccttcatgtctttgtttccctcaaagttttattcttagtaacgctatatatggttttatagaccacacatatatagtttcctgtgtcttagatgataacatccttaaaatatgaaatatattttgaacctagatacctacccagtattctctgcacagagtaaacatttcattaaatgagtttcaaggactccataccctgatataggagtacattcaagaaatgagtttaggccgggcgcggtggctcacrcctgtaatcccagcactttgggaggccgagacgagtggatcacctgaggtcaggagttccagaccagcctgaccaacatggtgaaaccccatctctactaaaaaaaatacrgaaattacccgggcatggtggctggtgcctgtaatccccgctacttgggaggccaaggtgggagaatcgcttgaacctgggaggcggaggttgcagtgagccaagttcgtgccattgcactctggcctgggtaacaagagtgaaactccgtttagaaatgagtttagtctgggagaatctgctttttgagtaaaaaagtttgattttatgtatgtgtgcgtctgtatatatgtttctgtatcctgagtatttctttgcggcttcttcagttatgaaagaggttggtactgttacccttacgttataggtattacaaactcggttttacaaggttacataaactaatggccctggggcgaatgacgtatgccacttttgtgttgatttgtagaacttacttagctttggcatttcccctagtaattcccaaggcaaaaccaggaattgtcagagacgtgaccagacatgtattaaaattctagtgcaattgggaaacttggtcttcctgatttgtttatacttcagccaaacccagatatatagtgctcagcagaaattattcaaaatgttgatactcaagattgaaggatggattagggagaaatgaaaacttttcttcttgtggactttttaggtatgaaatttaatcacgagagtagttttgcttttctttccctgacctttcgcttcattcctttgttaagaactatatagtgcctctgaggaggtggcattattgttcactaacttaccataaatcaggggtctccaaaccccaggccacagactggtacccatctgtggcgtgtgaggaagtgtgctgcacagcaggaggtgagcggcggatgagcaggtgaagcttcacgtgttgttgttgttgtttattgagatggagtctcgctctgttgcccaggctggagtgcagtggcacgatctcggctcactgcaacctccgcctcccgggttcaagcagttatactgtctcagcctcccgagtagctgggactacaggtgcccgccaccacacccggctaattttttatttttagtagagatggggtttcaccatgttggccaggcaggtctcaaactcctgacctcgtgatctgcccgactcggcctcccaaagtactgggattacaggcgtgagccactgcacctggccagcttcgtgtgtatttatagctgctccccatcactcacatcactgcctgagctccacctcctgtcagaacagacccagcattagactcccctaagagcgtgaaccctattgtgaactgcgcacgtgaaggatctaggttttgcgctccttatgagaatctaatgcctgatgatctgagatggaacggtttcatccagaaaccatccccctgcttccctgtctgtagaaaaattgtcttctatgaaatgggtccctggtgccagaaaggttggggactgctgtcataaataacattgaatttcatgtgggttttttttttttttgacacaccaggcatgtctcttccattcaaatgctatggctacagagggaaagggtagccagataattatccacatgcttcaaaccaaaaagataaaaaagttggcaactagatctagttgcctgccaggatgaccagcgttatgctggtgtgtgcgtgtccatgcctcygggatttttccagggttatcaatgtcagtgtaagatctgatggaatttaccgttgactcaattttcttcacyaatcaaggctcattccttgaggcatgagttatgcgaaaagcttttctgcaccaagtactttcattctggtctttggaattgtcataattctgacagagaacacagaccattactgaatgctcttcaggttaccctatttgcctgtcacattgcttctaccggccacatcctgcatttcctgtgggacagcattttcaaacggattctagtgtttgagctggaaccaaaagaatgaaactgtttttacataagtgcatattgctgtctctgcaaataaagtacaacaatatgactgacttgtaaatatcttccaggacaatgctgtgattttccagttgattctgcaactttaaagatataaccaagtataattaggccgttcaaggatgaatgggtcccacagaagctagaaatagtttacttcccgcttccatttctagatgcagaagactaatattcacagaaaaattacgtagacaaattttgtttactagatctaaaacattcctgcttctcagaaaaacaaaaccaaaggagtatttaagataaagtaacagtgaacgtgttgagactaaaaagtttccatcaactagtcccatatgcaccctctacccttcacataatctctttggacactcggctccaattttgtcttatttttcttcacatctcaatctacaccttcctaatatgtccggaattggtggattcttggtctcactgacttcaagaatgaagtcgcggaccctcacagtgagtgttacagttcttaaaggcagcgtgtccggagtttgttccttctgatgttcggatgtgtttggagtttcttccttctggtgggttcgtggtgtcgctggctcaggagtgaagctgcagaccttcgcggtgagtgttacagctcttaaggcagcgcgtccagagttgttcattcctcccagtgggctcgtggtctcgctggcttcaggagtaaagctgcagacctttgcggtgagtgttacagctcataaaagcagtgtggacccaaagagtgagcagtagcaagatttattgcaaagagcaaaagaacaaagcttccacagtgtggaaggggacccgagcgggttgccaccgctggcttgggcagcctgcttttattctcttatctggccccacccacatcctgctgattggtagagccgagtggtctgttttgacagggcactgatttgtgtgtttacaatccctgagctagacacaaatgttctccaaggccccaccagagtagctagatacagagggttgattggtgcattcacgaaccttgagctagacacagggtgctgattggtgtgtttacaaaccttgagctagatacagagtgccgattggtgtatttacaatccctgagctagacataaaggttctccaagtccccaccagactcaggagcccagctggcttcacccagtggatcctgcaccagagctgcaggtggagctacctgccagtcccacgccctgtgcccacactcctcagcccttggctggttgatgggactgggcgctgtggagcagggggcggcgctcggggaggctcaggccgcacaggagcccacggagttcggggaggctcaggcatggcgggctgcaggtcctgagccctgccctgtgggaaggcagctaaggccctgtgagaaattgagcacagcagctgctggcccgggtgctaaaagcccctcactgctccggcggtggggccagctggctgctccgagcgcagggtccgctgagcccacgcccacccggaactcgcactggcctgcaagcactgtgcgcagccccggttcccgcccatgcctctccctccacacctctccacacctccccgcaagctgagggagccggctccgccttggccagccgagaaaggggctcccacagtgcagcggcgggctgaagggctcctcaagtgccgccaaagtggaagcccaggcagaggaggtgctgagagtgagtgaggggtgtgagggctgccagtgcgctgtcacctctcactaatttccccttagtttattttttgtttaaaatggagtttcgctcttgttgcccaggctggagtgcaatggcgaaatcttggctcactgtaacctccacctcctaggttcaagcaattctcgtgcctcagcctcccaagtagctgggattacaggcacccacacctggctaatttttgtatttttagtagagaagggatttcaccaggtaggcccggttggtctcaaactcctgacctcaggtaatccacctgccttggcctcccaaagtgctgggattacaagcgtgagccaccgcccccagcctcccctcttagtttaattcctggtctaattgtagttgtcacatccaaaccagtcctccaacaatagcctgctgaggctggtcatgaaggggctccgagctctgtcagcaactggcctgaacttcaggctctcccaagatctgcatcttctcattggaagcctctcactgaaacaactgttcctcctgttaccctctatctctggaggctgatttattctaattccctttattcctctatctcacttccacctctttttctgcagggtcctggccaagatagctcttctagtctagctcacccggcccaatctttcttataaattttcttaaatgtaacttcaactcaaccaacttcaaggtcacctgtgattctttctgtagtcaatattccatctgtttgcactgaagctttattccttcaatgcctaatttttatgaaactgatgagactaagtttctagtctcataagtcatcaaatctagtgtcatgagcagagaggttgttgagatgtatgtggcaaggacaaaggacagctcttcaacaattgcccttcctgtttttcctgtaggaatcgtaacatcatttacatgttatatcgaaatgggccatgagtgtgtagctggccttttttttcctaccatgtacttgtgtgttctggaatcagtcagctagaaaatatttaccaagtgtcttaggctttttcactgtagtgtgcatttaacgtacacagtaaagaatgaaggctggcactaaactgttagctaatcatccggtgttccatgtgaatgacagaacacggaataaacctgatgacaccaccactttattttgagctaaatcctcatttaagtgagaacaggacaggtttcaccactgcctcctttggcaacttgagtggtggtgttcccaccgagtttatggctgcaaagataggtcttttctcgtatttatgtataaacaggtaccagttttgattttatttaatcatttcatacattaacatacatgacacatcaaaatgagaaatgcacagtttaaccgttcaacagctggccttacttcaaaagaacactatattcatattaaacatttacagtctttccatctaactttacacatgtcctaaatcattttccagcacttctcacatagaagtctagttttgctctttaaaatcaccatctgtatcacccctagtagacgcgagggtttccccaattacatgctgaagagagccagccaccaccccacctaaagacatccaagcagctccagagcctgcctccgaggccaccccttcgccacggcagtctcgattccaagaactgattatctgacactagtgaaccagcactaaaggctgtaggatgtgactacatcacagttccagaaggaaggggaccatggccaagagaagccctaaatgacagaagctcattaaaaccaagtgccccaaacctcctgaaacatcgttagcaaggagctactgctttcctttcttaaacatgttttgggcatgaccacactctggaagtggtgaactgttacacatttggtgtgtgtgtacataacatcaaaaactactgtgtgaaacttgagaatgtctgattaaagatttcaatgtatatctaaaaactaactcaaatcgttgaccagcactttcccagtatcataacaatgcggctgaccctcttctgccttcactttacaccccatcatagcacattatttgtgcacaactagtgaggtctgtgcggctcatcatccccataaccaagtcggtctgtgttgagtcatatcattctgtgctggttttagaagtcaccataggaaacatgaagtcacatcctggtcaaaaaactgtccatttctcaaaaacagagaaaaacctgagatacgaggcagcaactagcgacacttacaggaagggaaagaacaatgacaacacccgcccagccccacccccaaaaagctgctgttgtgaattaaggcttcaaaagaggacccacattgtagctgataaaactcaagccaggaggatgtttgaaagccaatctgcactatcacttgttccagtgacctcctatgttcagctgccaggaccgattccatacagtgattgtaggttgaggactgaggacgcccctttgctctcgctccattttgatttgctttttccactgaagacacgccggccagcgtttccaaaaacagcttggccatggctttgcactctattcacaactgatcaaaactcaatggtcttctcagctttctcaaccgttttattctgaatattccttcctcactaaagcctctctcagccctactagtaaatgtgaaagtctgaggcaatcatagaaacatcagccccatcgcatgccgaggggataaaagccactaaggaaacaggtttcctgcttctcctcagcaatttgtacctttcttaatcttcccataatttacctccctaggaagtttcctataaaattctgccatattattacattttaccaactgtatccatgcagtgaagcagaaagggcaaaaacatctgctttggctgagaatttgaaggtgctgctgctctgctaccaacccaaataaattcacatttggcttgaaaccaagttcatctttatttaaaggattgacaatcccattttaaacaattctttgatttacaaagagggaggtagactcgttagcctcccaaccttagcttaaatcgtgatgttgccaggttcctggtggttcagctgaatcctagacagtttcccttctcttcataaagctgagaagaaaaaaaaattatctccatctaggcccacgggaattttgtgcatagacagtttgaattggtctgaaaagtgtgactagctacctacctattcacaatgcctagaaaatgggctaccagatatggtagtggtcaaagccccgactttcctgtctgaggtactgggtttgctctaaggtagaccttggcaaggcccctaatggtccgtccagcagagtgatgctcgtgtccctcggctgtcaggtgagcgtgggtttgtgaatcagctttggataggatcatttctcttggatttaccactaggctctgtccctaacagggtctacctacctgacccccaagctggctcagtctcagcgctaaggtgtactatggaagggtccggacaaagactaatatttgagatctcttagtagcacaacgtgaaaatggtaggggattttgtcctccaacaccaaagacacttgcttttttaagaacaagaggatgtgtaattcactgaataaaatggttttcctccgtctaggggggattctagcatctgcccttccatttttgttgagagaagtattagctgatctctcaaatgcagatgttaagagagtaacaactgggttgatccacctgttgcttttacaccatagctccattttccaaaaatatatatgtatgtacatatatatatttcagatttacagggaatttttttgtgaacaagaaaaaaaaattgtctatagaagtcacaagtgtctttcttctcaggagacctcaatgatttccatgctgcccgaaaagctagactgactgcccactttccccagctcttcccgtgacctgttctctgacatgatgctctctccaaattccatttggcagcttctgcgtttaaactgcttttcaaaggggctctcttcatgccagctccgccgcgagtcagctctgtcacttggcttctgccgcctgcgcacagaatagacttggtctccgcaagtgggcagctggctgcagctgtaggcagagtaactggcactgcctccgtagatggctgaggcagagtagaagtgtgaggactctgtggcaaaataccagctgctggtcagggaaggggtagaggtctggggggccaagatatccgagtgccagcccttaaggcccaggccag

SEQ ID NO: 96812 - DNA, 14526 bp, Homo sapiens
aggctggagtgcaatggcgcgatcttggctcaccgcaacctccgccttccaggttcaagcaattctcctgcctcagcctcccgagtagctgggattacaggcatgcaccaccatgcccggctaattttgtatttttatagtagagacggggtttctccatgttgaggctggtcatgaactcctgacctcaggtgatcctcccgcctcggcctcccaaattgctgggattacaggcgtgagccaccgcgcctggccaaattgtgcagacttttgatctttaagacagaaaagctagggaatggttgtttgcattgtaaaaggaatctttgctttgtaaaagggcgtaggcagaggctagtttagctgtaacccaaacaacccaaggaaggctcagggcactcaagcctatccgttagttacattgcagggtgttttcaacactgcttatgtatagagtgttgtccagatacacttttggctgtgtgaagcttacacttacatataatacattctgcttgtaagagtttcctcttcctgaaaatgagagattgaaaatacatcactcttgtgactatggtctgtattattaaaaaaaaaaaaaaaaggtcgttgagatcaagcaagctagacgtggagaaatacagttcctgctgactgcctctctctttcttctctttgtcagagttaaaaccttccaattggccatgcgcggtggctcatgcctgtaatcccaacacgttggtaggccacaacgggtggattgcttgagctcgagtttgagaccagcctggacaacatggtgaaacctgtctctattaaaaatacaaaaattagccgggcatggtggcaagcgcctgtagtctcagctacttgggaggctgacgtagaatcgcttgaactcaggaggcagaggttacagtgagccgagatcgtgccattgcactccagcctgggcaacagagcaagaccctgtctcaaaaaaaaaaaaaaaagtcctaatattctgtagtgctagaaatagatttgatggtggccctgccctgtcggaacttaagactctaatattcatgtccggcatgcacctgtaatcccagctactggggaggctaaggcaggagaatcacttgaactcaggtggcagaagctgcagtgagcagagatcgtgccactgcactctagcctgggcaacagaacgaaactcggtctcaagaaaaaaaaaaagattctaaggccaggcacggtggcttcacggctgtaatcccagcacttttggaggctgaggcagttagatcacctgaggtcaagagtttgagaccagcctggccaatatggagaaaccgtctctctactacaaatacgaaaattagccaggtgtggtggtgggcgcctgtaatcccagctactcgggaggctgacacaggagaatcacttgagcctggaaggtgctgggactataagcacgtatcatcacgctgggctaatttttttttttttttgagacagagtcttgctgtgttgcccaggctggagtgcagtggcgcaatctcagctcactgcaacttccgcctcccaggttcaagcgattcccttgcctcagcctccctagtaactgggattacaggcgcgcgccaccactccccaataatttttgtatttttagtagagacggggtttcaccattttggtcaggctggtctcaaactcctgacctcgtgatctgcctgccttggccttccaaagtgctgggattaaaggaatgagccaccatgcccagctaaaatttaatttttttttttttttttgagacggagtctcgctctgtcgcccaggccggactgcggactgcagtggcgcaatctccgctcactgcaagctccgcttcccgggttcacgccattctcctgcctcagcctcccgagtagctgggactacaggcgccccccactacgcccagctaattttttgtgtgtttttagtagagatggggtttcactgtgttagccaggatgatcttgatctcctgaccttgtgatccgcccgcctcagcctcccaaagtgctgggattacaggcatgagccaccgcacccggcctaaaatttcattttttaacgcatatttatctcaattgttttttgcattttccccatgtggctcatgagcacattattctaagcgtaagtggtagataacctgattcaggtattttgaagaggaaattttgatagcaaaaacaattttttttttttgagacggcgtctcgctctgtctcccaggctggagtgcaatggcgtgatctcggctcactgcaacctccgcctcccgggttcaagcgattctcctgcctcagcctctcgagtagctgggactacaggtgcccgccaccacgcccagctaatttttaatagagacggggtttcaccatgttggccagaatggtctcgatttcttgaccttgtgatccacccgcctcggcctcccaaagtgctgggattacaggcgtgagccaccgcgcccggccagcaaaaacaatttttaaggaaattttgaagtgagaagtcaggcaaagaggccccaaagatcaaattgcaggccaggcctgcacaactgagaaatgagaaagtaccactttcccattttcaaacattataacaaacatttctctatctgattctgaaaaccctgtaagaaagacaaggcagatggttttattcccatttcaagagattgatgatttacccaaggtatatagtttgcaggtacacgtggctgataaatgttggaaactggctttcccaactcttcttttccttgcctgaagctctgtcctggacttaggaatcccagtggtgatttggagtggacaagacttgagtcttgaaggacaggactgcagggagggctggtcctgaggaggaagcatcttcagatacctaggtcttgggatcttgggtggggaataggctgcttggggaagggctgaattggaaggaggagctagaggtctgactgagggaatggagagggggcctcaaaaggaagccaggcaggctgccttcttcccagctccagaatggcaccccctctaaagtcacactcacctacgtacatcctggagtgaaactccttctcctttctgcttccaccattactctaatcctcaaagggttaaccagctttcacacgattttcccatctcccaggtaacttgggcagctgctccgtgctggaaataactaaagacccagtttctcagttcgtgcacttagcaatgcaccccagtagcccctccaacccccagcagagaagcacagccctttgggtaaaagatgcctgggggtgaggctgcaagttggcaggtgcgggggaggggctcccagagagtagggcggggggttgtgggggcggcagggagagtgccccttccctgggtccctccactgggccccgaggttcgcctcggggccgctgccccagagactggggggaagaggaaagaagtggtgtgcgggcaagcaggccgcacacacctggcgccttgtggaatgagagcttaattaattattaaactgagttcccgcgggagggcgcagggccgtgacaggcagggcgggaatggctaggtgggggctggggtggggcaggggcagggaggaattggggatgaagagtgggcgcggggcgccggcccaacccctgggaccctgacaggaaggaaggcgaccctcggtgggcggggcgggggatgtagccgtgaggggtgggtttgcgggcgcgctcggggacccccggggtgagggcgggagaggaatgccggaggaggcggccggggtgaagggaaggggaccgggctgcgaggtcccctccccgcggggtcttgatcccagaacagtagctgcttgtcttcccaggactgggggaggaagcggccggaggagaggagggggcgcgcggagggaggggtcccattatttggcctcctccgcccctaccccgctgctaggaaggggagtgggcaactcggcccccacttctggggagggggagggggatgcccagacaaaaggagcttgtgcctttaaggcggggagtccgggagccagcggggaggggacttctggatccggggtagagggcggctgcgctggacagctcgggagggggcgagggccgggcggacggcggacggcggacggcgggcgggacggccaggacgcgcgggctcggaggaccgcgggacggccggccggccggccggagcccgcgggggcggcggggcgggggcccagggcaggcgcggagccgggccggcaggtgagcgcgctgagggctaggggaagtggccgctcgggctcccggtgcgccaggattggaacgcacccgagcggctctcgacaagagtttgtgggtgggggcgccgaagccttggacgggtcgtctcggcagtgttgcccgagggagttggggttggcaaagggaagtcatggaggcagtgggatcgaggactcctaggtccggcgctcgccacccccgtcgcccgccgcctgcctccctccacggggcgagttccaggctggcccggaggccaggaggatctggcacgtactgggggaggggctggcctgagttttttgctgcggggctgtggggtgtctccgagtttgggggagattccatttaggggagaggaaccggcctgggcagagggagggatgccctctgtctgcgggagtccctctccttcccctcacccaaaaccttgggaatgaaaggggtggggtcggctccccacatcccccaaggcctgccgcagggtgggcaggggagctgactttattcaaagcagactctggggctcgactgaaaggctagaggtggaatcaggcgtgggagcctctttgcccatatcctctccttaccagattacccctgtgagctggagggacctggtgggggttgcatagtaaagggtgatgtgggagccctctgtaatctttagggagagtgaggactggggatgggagaaggcggcagcgggcactggaccgacagatacaggccctgggtaggctcctctacatctggaaaggcccagaattgaagaattgaggcccatgtccgagtatggtgggtggtgctggcactgctgggccccgcctgggcagtgcctcttaccatgaactttctgaagtcgtttttaatcccctggagcctccttttgccaaggagggcaggggcagatgggccctggggatgggatagacaggaggtggccaggaaggcttggcaaggcagtgggcagagccatccttagggctgggccttggccttggctggttccaaactctggtctcagcctgatcagggtttgggagggacttgaggtctgggaggcactgagcctgggcctgccaggctgaatgggacatggctgtggctgtgggagccggtggtatgaagaacagcagatctgtgagagtgcaaatggaccaacactcaggggaggagaaggtagaggcacaaggcttaggagcctgactctggggaggagggaggtggtctgtgctcccagggctcatagtgatgggttgctggacaaagtgggttgggggaccatatagagaaattttgtggcttggaacagtgctctaccctgtttcctgccataccagtctggcatggggtgccagaaatgttgggaggccggcaagttctgcgggatgggcagtgcctggagtggagcccagggtgggatggttgcagttggttggacaattacatagctctgaagctatccccttggggggggtcagagtgttcctgggagggtcatgcattctcctggatagcatttgcccctttctctgtgagtatgagccagatgctaggatgtgtttccagggggcttggaacatggccagaaactagtcctttgggaacaggtccgggccagtgctggtgggggtggtgtgtggggggagataagaacagggaaggggactggtgaatggaggaggctgaagcaaaatgttgtgggtggtggatggtggtgggaaacctgctcactstgggctctgtctccagcagctctggggactgacagccaaggacacagggactgatagaaccaggcatctgactggctagaaagacgtgtgttcttgctcatgatttyctcatctttccatctcttgacgatgacagaggtttgggtttaaartgttgtagagtgaggagaagaactaatatttttcaagtgtgtacttcttgacaggcattattagattctttcctgaggaccattatcatttccattttgcagatgaaggtactgacacagagaggttaaataacttgcccaaggcagtgyggctagcaaataatcacgctaaggtttggaaccctggtctcatgccaaagatcatgcttctaatgaagtattttgaagagcaaggctttctttggtgaccttttccaaatgccagcctgaccaaaagtcttgtattcctgatctgtccttccagatggtgctgttggtgatgttaagaggttgaaggggccaggcatggtggctcatgcctatactcccagcactttgggaggccgagacaggcagatcacctgaggttaggagttcgagaccagcctggccaacatggttaaaccctgtctgtactaaaaatacaaaatttagccgggtgtggtggtaggtgcttgtaatctcagctatggggaagccgaggcagaattgcttgaacccaggaggcagaggttgcagtgagctgagattgtgccactgcactccagcctaggtggggcagagtgagactccgtcttaaaccaaaaaacaaaaggaggttgaaggacgtgctgctctgtgggatataggagaaggggtgcygacagawcttggctgagggtgactcagggatgggaggtttggggtatgcagagaattccccagcctgccttctgcgtgtgggtccctgggtgtctgcttcaagcgctgcccatctggcttgagctctcattctatggccacctggggcaagtgctgagtattcctccatcctgtccccgagtgagtacaaatgtcagtgctgstagctcagcaggtttaattacaagggacccctcagggtactctgtgagcatagaggagtgtggccctggtggggacacaggcatgcatggatgacagtgctgtcagcctcatcttattctgacctgggctcagccaggagtcacattaaaggtatcatcatggagtcctcccacctcagttcatgacatttcctccaggaaatgtgggatctgggactgatttggttaccatgatctctataacttgggccagccatataaaactgccatggacctcagtttttgtttatatatatttttcctttcaaatttgtcttgtgccccagggggcaacaggaccagtttctcagggttttggtgaagatcagatggaattagggatgtgaaaagatcttgaacagtttaaagcatagagaaagtgcatggagtatcattcgtccatccatccagtcatccatctactcaatgaacatttattattattattttattttttgagatggagtttcgctcttattgcccaagctggagcgcaatggtgtgatctcagctcactgcaacctctgcctcctggatttaagtgattctctcacctcagcctcccgaatagctgggattacaggcatgcgccaccatgcctggctaattttgtgtttttagtagaaatggggtttcaccatgttggtccggctggtctcgaactcctgacctcaggtgatccactcacctcggcttcccaaagtgcygggattacaagtgtgggccaccatacctggcctcaatgaacacttgtttaggtccttctaagsgttgtggatacagcagtgagcacagcaggtcaaaatccttgccttcataaggctgacattccagtcaggagagacagaaaatgaacacataagaaaaatatatagaatggcagttgctgattagagctatggagaaaaagcataaagctgggaaaaagatagagagctccaggaaagggggttgctattttaatagggtggtcagagggagcctcactgataaggggacatttgggatgtgacctggaggagctcttgttccagacagagggaacagcaggcactgaggtcccaggctggcctgtgcggggtgtgttgggaaacagcaaagaggttcttgtgactggggtgcagtgaggaagctgaagagccttaggattatcactgttagctggtggcagatcatgaggtcaggagatcgagaccatcctagctaacacagtgaaactccgtctctactaaaaaatagaaaaaatttccctgggcatggtggcaggcgcctgtagtcccagctatttgggaggctgaatggtgtgaacccgggaggcggagcttgcagtgagccaagatcgtgccactgcactccagcctgggtgacagagtgagactccgtctcaaaaaaaaaaaaaaaaaaaaaaaaactccagattttttcttctgcttctgttgagaaaaatcagatcgggacccactgggacccagtggcaacagtctacagctgctgggtggtgcctgccccatgcacagggtatgaactcttttcctcccagttctgaaccataagctgcttcactcattgacttgggcacttgagtttgtgaccaccaacaaacagtgccttttagggaaattttcaagtatactggctttggggtcagacaaatctggtttagaatcgtggttctctcacttatgtggctgctggatctttgggcaactctttcttcttttcttttctttgtattttattttattttattttattttatttccctcccttccctcccttccttccctctctccctccctccctccttttttccttccttccttttttttttttttttcaggctatggctattgcccaggctagagttcagtggtgcacaatcctggctcactgcagcctccaccaccagggcccaagcaatcctcctgccttagcctcctgaatggcccggtctataggtgcataccaccacaccaggctaatttttttttttttgagacggagtctcactctgtcacccaggctggagtgcaatggcgcgatctttgctcactgcaacctctgccacccgggttcaagcaattctcctgcctcagctcctgagtagctgggattacaggcgcccgccaccacgcccggctaatttttgtatttttagtagagacgaggtttcaccatcttggccaggctggtcttgaactcctgaccttgtgatctacctgccagggccttccaaagtgctgggattacggacgtgagccaccacgcctggcccaggctaattttttgaaattttaatagaggcagggtcttgctgtattgcccaggttgctctcacattcctagccttaagccatcctcctatctcggcctcacaaagtgctgggattacaggtgtaagccactgtgcctggttttgggcaagtttcttgtcctgactgtgtcttgggttctcacctgttgattggggatacccttgttgcctacctccaagtaattttatgaggatgaaactcatagcttgtcagtgggaagtgcttaggtaatgagctactagtggtggcagtggctgtgatggtggtattaataccactcctactggatggtctctaatactatctccttccttccctaccagcaacatgtcatggtttagtggcctcctggtccctaaagtggatgaacggaaaacagcctggggtgaacgcaatgggcagaagcgttcgcggcgccgtggcactcgggcaggtggcttctgcacgccccgctatatgagctgcctccgggatgcagagccacccagccccacccctgcgggcccccctcggtgcccctggcaggatgacgccttcatccggaggggcggcccaggcaagggcaaggagctggggctgcgggcagtggccctgggcttcgaggataccgaggtgacaacgacagcgggcgggacggctgaggtggcgcccgacgcggtgcccaggagtgggcgatcctgctggcgccgtctggtgcaggtgttccagtcgaagcagttccgttcggccaagctggagcgcctgtaccagcggtacttcttccagatgaaccagagcagcctgacgctgctgatggcggtgctggtgctgctcacagcggtgctgctggctttccacgccgcacccgcccgccctcagcctgcctatgtggcactgttggcctgtgccgccgccctgttcgtggggctcatggtggtgtgtaaccggcatagcttccgccaggactccatgtgggtggtgagctacgtggtgctgggcatcctggcggcagtgcaggtcgggggcgctctcgcagcagacccgcgcagcccctctgcgggcctctggtgccctgtgttctttgtctacatcgcctacacgctcctccccatccgcatgcgggctgccgtcctcagcggcctgggcctctccaccttgcatttgatcttggcctggcaacttaaccgtggtgatgccttcctctggaagcaggtaggtggccagggaggtagggatggagggcagcaggtggggaatttctcacctcataagcaggtgggggcttagtgaggaagggcgggtgagtcatgggtggaagctgggtgcagggatgtctggctgtatctgggaggaggagcaggaggtgggaggctagggttgaggggtctgcctccatgtgggatctggggtagaggacactgctgaggggagggagggccccaggacccaagcctgaactctgtcaccatgggccccagtctccggctctttagcccgctgaaatagtgcagtctgtagagacagaatgtggggctggaggcaggggtgtggtatatagccccagggccaccgtggggctgaaaaggcagtgcaggctgtgtccaggccttagcatctcagcaggcaagttgacaccagagactgaggcgctggtgctatccctgaagagcagctctaggtggtgatctggaggtatagagcaggttttggatgttgtcagcaagagaggagtcccctctttcctggaccaaggccacttctgggaggacagggaaggtgaagagctggggtcagttctctctgggctggatgtggtttgaatggggttggactgttgaagagaggagcgttaagtctgatcgtatcccaccttccccatgctgggcaccagggacctgggcgcctttccttgaggttctctgtccatgcctgttgctgcctccaggctccaagtgtgtgtgaggtgggactccacggctccgtgtggagtggctgtaggctgacctgcttatccagtgggctgtattcttttctgtgggatcttagacaactagcctcacctctcccagccttagtttcccagtctgcaaagctggaataaaaatagcatctagctcatgttgctgttggggccccaccctttcctagagtggagtagaacccgactgggcagtgttcacacctgggggcagggaggtttggggagtgctggaaggcatggtacccagtgaaggggtttctgggaagtccctttcagagagatgttagtttgtggatctgccatctcctgttacccccctgcccagggagcagaggccagggtccttcaggcgctgctgtaggcacagccccgccatcagcacagcgcctgggtcctccactggaccctaactagagagtgctgtcttgctcaaggttttgaaggcttgtggcctgttgcccaccctgcctcaggcacagagaggaagttgcctggggatcccagggtgagaagctaggttctctggcatgatgcccttctccacccagcctgtgctgcagaacagaacttacctgttttttttgtggtttttttttttttttgagacggagtcttgctctgtcgttaggctggagtggtgcagtggcgcgatctcagctcactgcaacctctgcctcccaggttcaagcgattctcctgcctcggcctcctgagtagctgggactacaggagcgcgccaccatgcccagctaatttttgtatttttagtagagacaagtttcaccatgttggccaggatggtctcgatctcttgacctcatgatccacccgccttggcctcccaaagtgctgggattacaagcgtgagccaccgcacctggccagaatgccagaatgccagaacgtacctttttaaaagtaactttatagcccgtttgtttgtggagcacgtgcccttagggcactgtcagacatcttaaagggccaggtccttctgccccaaagcttctcttccagggtggctctcaaccagggctttatggctggactgccctcctggggaaggagcttagaggtggtgtctcctttcccccttcctctctggccaggcatgggctgggtgggcatctgttccctgctctcgactggcatggtgcccagagccaggcccagtgcctgactggggaggtgcagtcccagggaggccaggactgtgcccgtctccccaggagtgtctggctacagcttcatgtagtggatctcgataggcacattcttggggcagtggcgaaattcactgctgcccctgtgccagtccttggggccagagctgcccatacaacttcctctgggctgagaaacattccctgtgcccatttgggtatgtgggtttctagacaggtggggtttgtggcctccttcctcgtctacttgggcagccccttcccagatccacccctactcacaatcacaggaaggagactttgtcccctaccgacccactcatttagacatactgaacagtgtcacccagtgacccaggcccagcttggagtctcctccggtcccctggcatccattttttctcatagtcagatagggatgtgtgtgtacagagttatttcagtctcgtcccccttccccttccctccaccgtgactcacattttcctcttgggctcctggggccaggaagggaagttgcctggtttgccccccttcccttctcccccactgggggctattcttagaaacccccaagggagatagtgtgcccctctcttcacccctgctgctgggagggggagctcagcctagttgatcctgggcctgtgagctggactgggaagggaagctaggaggcccatcccagaggctggagctggaaatggctaggggtgagccaggcctccccctcagttttacccaagaggaaactgaggtcccaaagtttaagtgacctgcccaattttgcaggactagttctagttcaagttagagcccagaacctctggcttccaggaagtgcttctgctgtttctctcccttctccttaaaccagagccctgccccatccaactctggggtggagccgcaagctccaggttaattcctgagtttccagaaacactgaggccagcttcccttagacttgctctctagccagtgccgctgatgatgattgggggctgaacattcctagggtggggccctaggcctagggcctggcagggctgagtgtcagagggagttacaccttgaggggtggccaggcatggtggaccccatctccaattaggggacatcctttgtatcagtagaactgatgactctcaagccagggctctgaggttgggcttgagagcttgactcagtagagtgagtaggaatcttggaaacctggaatgcactacaaagtatggaatgcagtagatagatagtaggattaggacacaggatttggaatctgattgtcctgggttcaagtctcacactagccactaacagctgtgtgatcttggggaagttacttggcctctctgtgcctcattcccttacctttaaaatgggatattgttacctatttcacagagttttaagaaatgtgttaggggccaggtgcggtggatcatgcctgtaatccatgcccgtaagcactttgggaagccgaggtgggcggatcacttgaggtcaggagttcaagaccagcctgaccaacatggtgaaaccccgtctctactaaaaaaatatacaaaaattagccagtcatggtggcaggtggctgtaatcccagctactctggaggctgaggcaggagaatcgcttgaactgggaggcggaggttgcagtgagccgagatcaggccactgcactccagtctgggtgacagagcaaggctctgtcaaaaaaaaaaaaaaaaaaaaaaaaaaatgtgttattcagtgtatagaagacacctacagaatcctggcatatggtaggcagccaacaaactagctaccataataataatgacaatggtgattattgttactaagttatgtcaagtcagggagaggctttagagatcttctcattcttcctctttgggttatagatgagcaaacccaa

SEQ ID NO: 96813 - DNA, 12421 bp, Homo sapiens
acatggtaagaccagtgaattccatgagcatgagcccactgctgcacttctttagtgagtgccttgatcagagggaatgctgtgtggaataccatgatggtggataaggcattctgtgagtccacggatggtagtcttggcagaagcactgcatgcaggataggcaaacctatatctggaataagtgtttattccaatgaggacacactgctgccctttccatgatggaagaggtccaatataattaacctgccaccaggtagttggcttgtcactccaaggaatggtgctatatcgaaggctcagtgttggtcgctgctgctggcaaattgggcactcagcagtggatgtagccaggtcagccttggtgagtggaagtccgtgttgctgggcccatgcataacctctatccctgccaccatggccactttgttcatggcccatcgggcgatgacaggggtggctgggcaaagaggctgattgccgtccacagaatgggtcattctatccattagattattaaaatcctcctctgctgaggtcacccattgaggagcactctcatgggatacaaatattttgacatctgacatgcaccttcttagtttattactacttttatgtatagaagttattttgtaatacaagcaaacagttaaactcattgtattcatatcttagttgaatttctttttaaaattagacctagatgagaacagagcttagaaggaagaccacacaaagtagaagaggcttactaataaaaatatggtgtaagatgaaaaggcactgattatttgagaaaagaaaattaatgttggtgtagtggtggcagcaggtggaatgccctggttgaaaggagtagcatttgtatgttgggtatgtagtcaaatcctggcatagatgtagtacttagttaatatgggtttttaataaatcagaatagagggatttactcaatggaataaaaaagcacagaaaacaaccttagtatctcttagagttgtaaagggcccaagagactttttctccttttaattcatttaagagttgttcctagatatagccaacctcaaggcaaagtgaggaaaccctggtggacttgctgaaggtttaggaagcagcctcaaattctggactatgagatcaaaagagcaaggacaaactgtgagtccagaatggcacatttggaagtcttaaaatatctaaggacagccattggtcatcattaagtatcactatatagtatggtcttgtctgatgagaggatgcgggttggaatgagtgtgagttctatattcagcaaggaaaataggaatttccctggaaaattaccctgaaaacattcctatttactcaaaaactccataatattaatgatttatgtatataagtttaacaataatgtatatgggtaaatggattatttgtataagtgtgtaaaaataatatatataaaatatatttatatatacaaatacaaacatatttctgaatctttaaacactaaaaatattcaaacattaagaataaagtgaaatggagactactgggagcaaatttacagctcttaactcactgtcattccaggtcgtgctcattgaaatgattaactcatttagctaggcctctctctctctctttctctgtcaccttctttccatttttctttttttctttctacttgatcccctactctactcctgcctagacaggctctgaagttctccctgctgtgttctgttacgctagagggccatagctaagattccctcaccaagcatgacccatagtgccagtgctatgctgccatgccatctgtttatctcattttcgcttttgtttctgcctatttttccttctcctcccctctgcattttgtctcctgttgtatctattaataaacattctggctttagttatagagattgctatgttttaccaaatccaatatatttcctgtgtctgggcaagcagttgtactcactattctgggtaatttatttgtattattttaacccctagtaactaacttcagcttttatcacacacttttttaatgttttctttatatttttagcttttctattctatcttgattactatagaaaataggcaacatatattttcacactggaaattatcaaatagagcatttaagaaatacctgaaaatatgtgaagtgctataatagcaacaacagaaggaacataaagtatcctcccaactgtgctttaatctggttataaaaacatgtcagagcgcacacacgcttgtgcacacacacacatgcacacgcacccacacacaccggtaccatgaattcaactggtatcaagacattgcaaccagagtttcatgtctagtgctgtaacaatggctgatgtttggagttatgtattctactcaaaattaataggcatgaaagaaaaaaaggagggacttattaactgaaggaaggatatattcaaatcaatatgttaccccacgaagttatcttcccagcgtgagcataattaaaaacacaattatggttttccattaccagaaaatatttttgggtaacaaaattaaagtatttaatttttagaataagcttatgtgttcagcatgaaaatacattttcaaaagaaattatacattaaatcaagtctataagtaatgcatatgttttctgagcattcaacttaaagaaaaaaggtataaatagaatggcatttagttgatgtgaataggttaccatttgtttctctgtgatccaaggggaaataaccagaggaagtatgcattttaacatagttttagcattccatgtctaaggaaacaaacatggctattgtggataataaaacaatagtagtgaaatataaaaaaaagacacttgaacagttcctgaatagtgaattttgctcccaagatgcatcctggcacactatagatggtaaggaacaataatgaattgacttttattgtcattgatttgttgctatggtgactttttgggatgacagaagtcagcatagtcaaagtgactctaattcgggagtctgtgatccaaaccagagacaaatgaacattgtacagaaattagggacctcattttaatctcctatagatgctgtttattataatattacatttgttttgatagtttttgttgttgttgttgttcacagaaatttacaaattcaccatgaatccactctggaatattcaagagctagtgttcatctagcacaactgataacactaggaaacaatgcctaaaatagcttttggaacatagaatggagaatatttattacaagaattgaatgaagtctggggggtgacaacttagtgacaatttgccctgttgctgtgcatgaagcttgcacattgaggccttgttcagttgctgaggtacagaaaggaccaaaaagaacatgctgatatataaaagaaaaaaggaaaaaaatgtgctctaaacaaataaggccaactatctggaaatatccccccgttgtcctaagatataacattgccgaatgtgacaggctgtgggtcctgtctcatgggatgtgttgcaaagagtagacaactgaaatgcttgcttaaaatcttcattaaaaacatctacattataaagcctccatgtcactagagaatggagacattatgtagctcattacagtttgtgcagcatactgtctagggaccccttgcccagtgggagctcttagtagcagaatccttggcaggcatttttctgcagggaaagtatttctgttggaaacactgtgaatcatgcataagcacttcataagaatcccctttcagaaatgtcacaaaatggacaacagcacagtataataaaaaaccactagcctgagaaccagaagacagtatttctaagtctggcaatgccattaaacagtctagatgaccttaagtgaccttaggttggcctcactttcctcagctgcaaaatgaaggctttggattaaaccatctctaagcaatttcacctcaaaaatcttacggttctttttagcattgctgtgtctttctttccccagagagtgattccttggactaattggaaataaggtaaaggtttatactgaaaaaggaattggtaggcgacaattcatttgtattactgtatttcttcagagacaatctggaacatatcttttttgtcaaatgtgagatttatttaaaagagatttagtgcaacacagatcaaccacaatttagccatcttcagggaaaagagaaaataaacacagcacagttgtgagtagtaaatggcatattgtaagtttcagcacaaaatgatccaacagaaagtctaatataagtatcaaactattacatatgatatgatatctatttacaacttttctctccataaaatacatttctattggggtttattcattataaaaattagtgttatgggaaaataatggaagggtttttacaaatccaaagttaatttggatttttcaatggtaaaataattctaacatgttttattgatttatacttttatttttttttgcattttactctttgtcaagaataccttttatttaaattatcagtgccaatggaaaatgacatgaaaattattttcagagtatatcatatgttcatatatctataatcacatacaacctacaattgtttgtttcaaagacaactcagtctcaatctacccacaaatgaactcaaattatccttcccaagcatcctcttacttatgtgtcctttaatggtgtcattacctacctgtcatctagtcagaagcttcatttagtcataagcctctctttttgctccattgccatttaaataattgacaacctaaggccaattttaactcttttacaaattttaaatatatcatctcctcttcattcataggggcattgacttactctagacattcataccttctcatctgaaataattaaggcctttacctagctgatctctctgcccctggactcaaccttctctcattgattctcagtactgctaccagattgtttcaaaatataaaatgatcatgccactatttggcttaaaagtgtttgatggcttactattccttcaggataagattcagttttatagtactgtccgcagggttctgtatgatctgtctgcccctctctactgtcctttcctcatttcctgtcatttcctcacaagtatctgcactctagttacaataatcaggaaatcctcaccagcttgtgagtataaataaaatcacagagacacgattgaggatgggctgtactagataacaataatcattgatggttagaacagaatggactcatacacagagtgaattatatctgagctacatcctaaatcaacatatcctggcttatcaccacaatgttccttgccaagtctttctgctcagctacatggctgtctcattatctgattattagctttcattcatgttcagaagacttatttctctggtagcttatgagcaatatgaatctctagaatctaaggttggcaagttgcaaaaagagaaggaatattcaacacctgtccaggatctatgtcttccaagaataattgagagaagagatgtttaccacagtcagtaaaaattctactcatgttgaacagaggtgtagctctcccatggaccccaaaaaagaagaatgtgagggaaagctcccaagcacatggcttaagcatggaagtttagtactgaggtgatttttcattcaacaactatttctgagcatcaactatttgtaaaatattgtcctaggaactgaggatagaagaagtccctgcgctcaaaaaactaacatttcatttttggagactaataggataaaaataaagcaataactctaatgtcaggtagtggtgagcattacatagaaaaataattttgggcaagggtttagaacctggtagggtaaaaaacaaggcatttatttttgaggaggtggttaggaaatgaagtgtgaaattaattttcctgcagtatatgaagtattgtaccagagtattaaaagatatgtaatattttattgataaatctattctttaaaaggaatacattttaggatgtcatcactttgatgtgaatcatgtaaatgttgataatattctgtgtattacacatttagtgtttcaagagattcacttaattgcctttttgccatgtatattatgtggtctatttgcaactgtttttttaaaaaagatattaaaagaatagttacatagagaaacattagtggatgttaattgtctccccacctatatttatgggtgttagcgcaactgctttgctagttgcaaagctgtattatcagagtaaaagtgtatttgtatactgtatgggaactaaaaattaagaataaaaccatttkcttattaaaaaaaaaaagcaaaaggaaaagaggcctgagcaaatgaagtttgagcagatgactgaatgaagtaaggaagtcctatgagactatttggggtggctggattttgtttggaatgaaaagttagtatatatttctgaaacagaagtaatctttgggtgtttgaaggatggttgtaaggccagtgtaacctgagtagaataggtcacagtaacgaaaatagtaagagaggtagtgaggaactacgtgatactgggtctgatagacgttggttaagattttgggttttattctaagttataaggatgtgtgtgtaatactttttaatatctgaaaagccatgcactctcacaatttctatttcaaaatatctatacattctctcatatagtttattttttatttattttttaaatgttttctgttttgttctttcttaaaaagttatggacagtttcttttactgtgcagaagctctttagtttaattagatcccatttgtcaagtttggcttttgttgcaattgcttttggtgttttagtcatgaagtccttacccatgcctatgtcctgaacagtattgcctagattttcttttagggtttttatggttttaggttttacatttaaatctttaatccatcgtaagttaatttttgtataaggtctaaggaaggggtccagtttcagttttctgcatatggcaagccagttttcccaacaccatttattaaatagggaatctttccccattgtttgtttttgtcaggtttgtcaaagatcagatgattgtagatgtgttgtgttatttctgaggcctcttttctgttcctatatatctgttttggtaccagtaccatgctatcatcagagtgaacaggcaacctacagaatgggagaaaattgtttcaatgtatccatttcacaaagaggtaatatccagaatctacaaggaacttaaacaaatttacaagaaaaaaacaaacaaccatatcaaaaggtgggcaaagaatatgaacagacacttttcaaaagaatacatttatgcagccaacacatatataagaaaaagctcgtaatcactggtcattagagaaatgcaaagcaaaaccacaatgagataccatttcatgacagttagaatgatgatcattaaaaagtcaggaaacaacagatgctggagaggacatggagaaataggaatgcttttacactgttggtgggagtgtaaattagttcaaccattatggaagacagtgtggcaattcctcaaggatatagaactagaaataccatttgacccagcaattccattactgggtatatacccaaaatattataaatcattctactataaagacgcatgtacaagtatgtttattgcagcactattcacaatagcaaagacttggacccaacccaaatgcccatcaatgttagactgcataaagaaaatgtggcacatatacaccacggaatactatgcagccataaaaagaatgagttcatgtcttttgcaaggacatggatgaagctggaaaccatcattctcagcaaactaacacaggaacagaaaaccaaacactgcatattctcagtcataagggagttgaacagtgagaacatatgggcacagggagaggaacatcacacaccggggccttttgggggtggggagcaaggggaggaatagcattaggagaaatacctaatgtagatgacgggttgaggggtgcagcaaacccctatggcacatgtatacctatgtaacaaacctgcacatctgcacatgtatcccagaacttaaagtatagtaataaaaaagttatggatacataatagttgtacatatttatggggtatatgtgacattttgatataagcaatatataataatccaattagtgtaactggggtatccattacctcaagtatttatcatttctttgtgttaggaacattccaattccactcttttagttttgtgaaatatataaaatatttttaactatagtcactttaatgtgctactgtacactagatattatttctatctagacgtatttttgtattcatttgtcataccctctttaccctcctctcccattacatttccaagtttctggtaaccatcattcttctctatatttccctgagttcagtttttcttttagctcccacatatgagtgagaacatgagatacttgttttcctatgcctggtttgattcactttacataaggtcctccagtttcatccatgtcgttgttaatgacaggactttattgtttcttatggctgaataatattttattgtgtatataccccacattttctttatccattgaaccactgatggacacttaggttgattccatatcttggctattgtggctagtgctgcagtaaacatgagagtgcagacatctcttccatacacgcatttcctttctattggatatatacccagcaatgggattcctgggtagttctatctccagtgtttttgaagaacctcaatactgttctccatagtgactataacttaattttccagttattttatatttctgttaaaattgtatcttttaatttttttctcatttcagttattttgttgcttctgtaaaatattcttggatttctttatcatatgttcaatacattctaatgcttatactatttctagtatttaacttattttacaattccaccatatagtctataagtaatgataaattggtctcttcttcattagaatttatcacttattttgacttggctctcagtttggacattgttggtgtacagaaatgcttctgatttttgtacattgattttgtatcctgaaactttgctgaagttgtttatcagatctaggagcttttaggctgagactatggggaacacaacggagttcacagtatgcacaaaaataataaaatacctaggaatacagctaaacagggagatgaaagatttctacaatgaaagttatgaaacactgctcaaagaaatcagagattacacagacaaatgggaaaacattccatgcttgtggacaggaagaatcaataatactgcccaaagcaatttacagatttattgctattcctatcaaactaacaatgatactcttcacaaaaatagaaaaaaaaactatttaaaaattcatatggaaccaaaaaagagcttgaatagccaaggcaaccctaagcaaaaagaacaaagttggaggcatcacattacccaacctcaaactgtattataagcgtacagtaattaaaacatgggactggtacaaaaacagacacatagaccaacagaacagaacagaacccagaaataacgccaaatacctacaaacatctgtacttcaacaaagttgacaaaaacaagcagtggggaaaggtgcttcaataaatggtgctgggataactggctagccacatgtagaagactgaaaccggagcccttccttatagcatatacagaaatcaactcaagatgaattaaagacttaaatgtaaaacctaaaactataaaaactctggacaataacctaggaaataccattctggacacaagccctggcaaagattttataacaaagatgccacaagcaattgcaacaaaaacaaaaactgacaagtgggacctaactaaagagcttcttctgcacagcaaaagaaactatcaacagagtaaccacacaacctacagaatagtggaaaatattatatttgcgaactatctatctagcaaaagtctaatatctggaatctataaggaacttaaacaaatttaaaagcagaaaacaagaaactccgttaaaaagtgggcaaaggacacaaacagacacttttcaagagaagacatatacacagagccaacaagcatatgggaaaatgctcaacatccctaaacattagagaaatgaaaatcaaaacggcaatgggataccatctcatattaaaagggatagggctactattaaaagtgccaaaaataacagatgctggaggtgttgcagagaaaagggaacacttatacactactggtgggagtgcaaatgaattcaaccgttgtggaaagcagtgtggtgattcctcaaggacctaaaagtagaacttattttgctgtctttttcttttatggcttaaaatcttcaacttatagtctgtattatagcaattgtaagtattattgtcttcttcttatttcatcgaggtgcactttagatttaagccatttcatatgtttcatgtttgctgatggtttctgatgaatactcttctttatgtcaaatattatagtaaaagagatttaatactaacatagatgaatcacagtttaggcatcttcaggtgaaagacaaacctcagcaaaattataaatggtatattttaagttcaatgcaaagttatcaaacagaaagcctaatataagtataaagctattagaattatgtgaaatacatgtaaacacttccttttgctcttttgtttataacttgtttaagtaattgttgaagaatattttgaaaagtgtttcttattttattgtatttttataaaaagatgtatcctctatctgttaatacattgaaaatgtattaaagttttatttgtgggctattatatattcagattttgtgtctgttctataaacatagtacaataacatgtacatgcagttatagattgagcttgttgagtttttctattaaaattgttcatgtctttctcctcctctatcccactggttgaattgtcaatgctcaggaaaacatcttaaaattttctattatgtttattgatttagcaatttctctgtttatttctaaagtgttttgttttgtttatgtcttgtcctgctgattatcttgatgggttgccctattattaaaattattcatctttttaccatttaagcttttgtccttaaatgacattatatcaaattgaaaattaataaccattttttttgcctatcatttattttcaagtcacattttgccattttgctttaggtgtgtttctccttggcagattttacagtttgtatttgtttagtcaaaactgagtctttgtctttgaataccatattatttacccactctttttcatagatgatgtagttgatttcatttctttgataacaggtatttgttcccatattttaaaatgcactataaacatattatttatttattttttctttcctgggaaaatattggctgattgatcgggttttctaaagttctatttatctctacaaatattactgctcacaaacacagtattctcttctatttgggattaaccaaaattttgaatatacaattataatatagaattgtaagtgttattgtcttgttcttaatttcattcaggggcactttagattttagccatttcatagaatgtttgctgatagcttctaaggaattatctgtttatgtcaaatattatgttaaaagagatttagtactaacatatatgatggtactaaacatatttttcatgccatattcataaagtttatgcatatattcatttaaaaactttataaatttatatttatcataaacactatttctcatactcagtgtattctaccttgagatatttcatcttatttaattttcatttgggtggagcaggtcttctagtaattatcacccagaaaattcaggagtgatatactttctgaataattttacattatgttgtacctacttttagcccttaaatatgtatgatatattggttgagtgtaaatattaatgttgcagtacttttctctcatgtttctgtaaatattctttacttttttctagattctaataccgcaatgagaagtctaataccagtctatgtattttttccagagtgacaggtttagttcaaggctagcaattcttttgtgaccatatatacctctaaacaatgacaatttactcacactctttcttgaaaacccaaagccacagtgagcttggacttcttc

SEQ ID NO: 96814 - DNA, 14421 bp, Homo sapiens
gccaaaagctgtgaattcaggaatgctgggggggtttcccaagaaaggaactactccagcagagtaaggcccatggcctctgggagacggtgctcttcgaggccattccagggggaaagagccagctgggtctggcagctcatcccaccacctgcagcctctagcccaggcaggggagtgagggtgcagcccctcccagtctgctggagccagggagctgccatcttgcttctttctgtttgagggcatttcaggagaggctggtggaggccagcgaagaatgcacgaaggcctcacttctggctgtaacgtctgccagagggcggcagcagcagcgtggctgttggaatcagccagaccaggttttcctgctccctctacccatgagtggtcaggcagccctgggccactttacatcatggagctttgggttctgcatctgtaacatggggatcaaaagactacttacttgcagggttatcatgagaagtaaatgaaagaattcaggaaaagtatttctcttagatcctgttggataatggtgatcatagtggcattattatagttattacaaatattactacaatcattactcattactattattagtattactattactgttatgaatttttactcactactatgattattactattgttactgtgattattgctcattactaagactattactatgattattgttcattaatatgattactgttactatgattattactattgttactatgattattgctcattgctgtgattattattgctattgttactatgattattgctctttgttgtgactattattactatgattattgctcattactatgatgatggtagtaatcatcatagtaacactgtgggattaatactatatttacataatatgtatatattatatataatacatatacataattatatattatacatatacataatataatatgtatatattatagtgtatatacatatatacatgtgtttacctatatacatatgtgtttatacgtatatataatgtatataatacataatatgtgtatatacgtaatactttagtaatgaataatcatagatcatttatgatcatttatcatagctgtggacagcagctactacatttataaccatgattactatgatcattattactcattactacaattattactatggctgtgatgattgttattcattcctatgatttttactctttactataatgattatgaaggtgatagccttgagtgttattagttgttactaccatgattactaacattgtagcctgaacacggggcattgctctcagggtgagttgtatgtgacaaccattcgttcatttcatcgtcttattctgtgttctcagtgatccttgagttattgccaacagatcatgaaaatgaatcacgggaggttaaaacagtgtctcccacactttttcatgacacctatagaaaaggactctgtgtttgtatcaccattgggcaacaggcaagcctctagtggtctggggtgacatgggccccactgagccatcccagggcctcacagtgttcacgtcttgacacatctgggatccattcatggccgtgctggaaacatgggactgggaaggcccaggctggaggaggcagccttctctggctgtgagtatgggaggttggccagtgccccatgggccaggtacctagttctggagcagagtccctggtgcccggctaatcaggcctgtctatttccctctaggtgttagaggagtccaaatgcctcgtgcggagcttcctgaaatcagtgctggaagacgtgaacgagaaggaatgcctcatgctcaagcagctctggagctcctccaaaggccttgactcccttttcagctacctgcaggacaaaatttatgaagtctgaggggccccagctcacgggcccccaacttccagctctgccctgtgtttcggaaaccagagcacagtgtctgccccggccaaggagtttgtcaaggtgtctctttatacgtagggttgtgtccatttcctcgtgtcctttggttgctcctccttggtttgattttgtgtaatggatggaaaacgcagcatacttggcctcccccacctccctgcccttcctggccagagagctgtccaaggctgtatcttcccagggctccgccaagcaccgctgtcctttccccacttgctgaaatgcaccatgacggtccaggaaggggaagaccactttcacattcttctgactcaggctgtgtctacacagtgcctctgacttggagacttggccatcatggctctctctggttgtatttagatcgggtgtcagaggacgaccaatcttagggaatttccagaccaatgagcaaaatgattgtgcacacctggcctcagtctcctttccgacgcaaatctgtgtgactattagggcttggtcttaaaacccaattgagtgatttgcaaacccagatattgtacatttagaaatgttttgttaaatatatatttttaaaacaatgtaagtggaaattctgataatttatgtgtattatatgtaaagctagttttgcaaaaacaaactactagggaaatgttttttctttccttggacttgttttatttatttatttttgtttatatattgtgatgtctgttgttcacacagatactattttcatactaccctggaccaaatcccacacaaggttcatgccgtttggtgcattctagcaatgaaccatgtagaaataaagtttagagagatgaaaacagaaggatttctgtggacaaaaggaatagcgctgcacctctgtgtaaaacggttctcagctgtaataatagaatactagttccttaggtttgtccttaggagacatcttgggagagttttttcttccctctgctgtctttaaggagttaaagggccctcttagcctgaatgatcctgaaacagacccagtcccaaattgcgtgatgttgggcaggagtggggataggccctacctgagaatagcatactgtctagaataagacttctttctttggggcaaatgactgaacttggatcctgcagtctgttgcttccatgtgatcagtgatttctggtattggccagggggatggggaagagttcccactctgctgagctgtctggaggtctgaatcttttccctccagaagctgaaatgactcatctgttttctagtttttttatgtacatagggagcaatgaccaggaatgagatctccttgcccctgtgcccctgggctgcaaggggactccagcagctgtgttagaccatcagattcaagtccctggattaactacagagaaggagggattgggggttgtggttttgagtggtgaggagaaagttcaggaaaacctgaagttgagagcagacaaatggaagggatgtgttctgcgtgaggtttaaaccatgggtcaagcacccagaaaaagctagattctcagattctcaggatggagggatttttttccgtttctatcacagcccctgcgtattcctggaggcccttggccctccccttcttcccctttcctgttgggcaccagcctttcttggcccttctttgaagagagtggaataaggcagcaagaagtgggcacagcttatggaggtgaggcaggcttagaagagagagttctggtgacagttctctaactctctgtggtcctttatcttttcctggcaatcaggtgcactgggcagggcaggtggaatgtattcgtggccctgagctttgagtttcaaagaacacgttgatagtctacaccagatctagagacatggtcctttaagcagtgaccctcaagttaatctggactgctggtccttctgatgaccttggttccctccctggaaagcgtgtctcctttaagagttcatgagggtcaggaaggaggggaaacctctccttcagccagaggaggatggaattaaagtcctgtgcaccctcccctttgtccatgtaggatcctgtaaggacttcggacctgtcctacagggagttactatagggagacacctgcttttgcccaaatgcctgttgtcacagctctatctggatcttatctcctcctttgagaaagcaaatgtgagctttccaaaacccttagatgaccctggttcttacatattgtggcagacagtgtcttcactactgctaaattttcattagaaagagccccctcttttctgttgaacttctgattgggcgcagttatattcagcatcggttgaagtggggtcaggattctccttggacatggaaggggatgtttagaaattcctttagatcagtgtccaccttcattccctgcttgaaagaactagaaatgcttcagctttggatgtactatcaaatccaaacttctaaacatttcaaggatctctgaagattaaggtaggaatgtgaaaccatttctaaggtggaaatcttgctgttaagtcacaggtcctgggtgtaacgggggtggtgaaagtctgtattttggttgtttccatacagtcagttccaccaattgggtgaaagcaggtgaaatctttttgctgcagggtggactgaatttttcactttctgggtagttgttttgatcatgtgtaggcgaattccaggtaacttacagcaaatagatttgggatggaaaataccagacctctggttgtgtcagggtttatcctaatagctttcctgagacagagctcagactttcatttttgatcttccaccccagggccccctctctgtctatgggatcctttctcccctctctctaccattttcccgtaccttcccccataagtcactcccaagagcctgggcaggtctttgaggaattgcggctcattttggcagccccgtcctgcaattacctttgggtttgaaagaatagctgtgggtgggcaattgaggacacctctttagtcagggacctttctagcaatccactccctcccatcctgttagccatgcagtggaactctccttccctctctgccccaaccccggtgatggctcactctcagcatcttatgggaccatctgagttaacaaccctgttccaagaagactttgtgcagaacttttgttagggtggtcataccttctcaccaccatttggaagacacagcctaatgctgatgtacttaatgtgccccttccggcatagaaataatgtctgggtaacagccatcaaaatcactaagaatgacattggatagctatgagaaagtagtagagaattgatttaaaatatcattcttgtttggtatagattaaactaggaaatgttctctctgaagcatgaaaatgtttttcccatgtgaagtttagtacaaggatggaaaaataataatcacagtagactttgaacaatgcaactgtatctctgaatatccacatttaaaaatagccttcactgaatgctgaattgcatttcccattaatttttggttttaaaaattttgtaaactttttttttatttggaatttagtcacatccattaaattttccaatctagtttctgtggaaattttttaacagagagaaacaaatagaaacatcttcaaatcttcctaagtgaatatttaaaatgcagaattgcttatcttctgtttttctgtattcagacacttatatctgttgtatatattagtttagacactctcactaatatacacagtatttaagactctaaatgagatttcttaagtattttattttattctctgtaaatggttttgtataatctttaaacatctacactttgcctttgtagatatttaagggaaaccatttggggttgtcttgcatgtatatttttgttgtagataagtgttgcttagttatttctgcaaattttggttgaaatgcttacagactttaatacagtatatattttcaaaatataaacttttatatttctgtgataagttaggatatgcrttttaggcaatatttttcattaatatcacttgttctttygaaaaatagcatactggtttggtgccaattttttcattagaatataatgctcttatattgttggagagcaggttaatcttttttcgaagtaattgcgtttgaagtataatttcaaaatrtattgaatttgtgaataagccttaccattaggatcagtaaatttttcaactttgyaactacataagtagtttaagatctccccgtaaattctcactgtgtggcagttgatggagtttgtgaacagagccttaagcttgttgcaaaaaaatttaaaaagggtaatacgggttgtttcctccatgcaacgtaagccatgctgatggactgaatgcagtctgtaattcatggctaatccgaagagtttgattgagttgatggcggcagggaccagatagacaccttggtgattgtstttggccataagaatagaccaaggataggttttcyagagacaccttcatactgtaaacatggtttagacacggtcatagggaaggctgctggtccatcatttgttctgaacaaatggcatttcctgctcctgaccctggcagttggccccagattscttgtcgatgacttggaaacgtccattctgggtaaggtcagcactccctgagagatgttaacaaagtttacctatragtcttactgtgtagacaatctgaagtcaattttagttacacaatcagcattcccatgtgtcctcagtgtcttatcaatgaactatgtgtatcaagccatactaaactggagtttagcaggacaaaggcaaactaaatgtagaacataacatatcagctgaatatgtctatccaggactgtttttctagaacataaatcatggagctccttgacagtgtatccactgtttttggggtttaataaaaccaactagaatttagacttaaaaagaaattattattccttttggttgtccacataaagtagtccagggctatcatatggctaaaatcaagttatttggttcatctctggtatgtatttataaagtcaacttatcagccattaagatggagatttgctttaaatttttgcagtgtgtgtggcagtcagaaaaacccatatctagttttcaacttcacctctggtgtttttatggcttaaccttatatcattgatccaacatctagcctgatgctggagctcttatttctagcctgatgctggagctcttatatctagcytgatgctggagctcttgaagctgactcttggaagtttggagggtgtagagtttcccatctagtatttaatttgtccctgtgccattagtcccagcttgaagtcatttgccagtgtcgatgttgacaggattgtgacaatattgcctttcataaaaccgagaaccaaagaattccattattctaacaaagcctgagtttcatagattgtgggcacatctagacagatatgtgcatgcttgatggtgcagagaaactgctgacttccaccaacctcatgctccccctggctggccatacagagggattcgttgtcatattgaaaaggctctgaaagatgagtttctaattgaagctcactatctcaggttggtgtttctactgtgyagtcccaagcctgtatccatatcataaaagtggaggcctggtactcctccaggttatctggccagtgtagactcctccatctgaatatgaacctccagggtaagaatttttcagacatgtctatactgaacagtaggatcctgcactttccaaatgtctgcctccttttgttcttcattgacccattctaattcctgttaggtgtgagaagaattgtcttcagttctctctccattctcattcatgatggaatcattgatccattgaccagttgagaaatgattgatgctgaagargtggtattctattggtaaggcttattaccaaacttccgataatgaagcaggctaccaaaaacttatccagcccaccctaggagtgtttggatttgatcatggatgtagcatacaccaaaatccaccgagacctttgcaaaattaggctacttgttttattttgccagattatcatgggagagtctttaactagttctgaatatttgtaagtctgagtacttcatagaattataaagaaggtacagctgaccccttctcaccatgttgtaaatatttactgagactgggtgcagtactgagggataataatcttctgatttatcaaatcctgactgtctagagcaaattgtacactctctttgtgaatggtcctgtaacgtgtatgaacacatttctgggtgccttagaagttgtatttttcatgtgtgctaatatgcagtatttatacattgtgagaagctgctttgaataaaaaggttgaaacttcgtctgcatttgcttgtgttccccgttttgcaggctgcacataaagttcatgagtagattctgtggtttctgagcagagaagtttttgggggccttctagcggttgagacatctgatatttctaggttgtgcctgtgtttctagggagcagaggcatctgaatttggtgcctctgctccctagaaactacccagatttggccaggaggcttcagttattcaggaagacagtcactaggtgggagcaacagcttgatgccagaggatcccagaactggggggcacaggagtgattttttggggggttgatatcagcatttatcccttccctgatatttccagaatgtttccttgtaccaggggctccctcctcaactaaagatgaacctctctggagctcgagcttggacaatcccagctgccacacctttgtcactatggacttacacaaagttctttcacatacatgctctcattgctttgatcatcacaatatggctcttaggagtggcaccctggtgaggacccttggtttctagggcctggcctcagaaacattgtgagggctgccgaaaagaatgataggaagtctttcagggatttgtggtaataggggattcttggaaaaggatttacacaagttcatctacccttcctcccatccatcctatcagtctgtcagtccagcatccaaccattcattgatccatccatccacccatccattaatccatctgtcctgtttgtccatcatccaaccatccatgcatctgccattcttccatccatcctatccatctatctgtccatcatccatccatctatccaccatccttctgttcatctctccacccattcttctattcatcctgtttattcacctgcctttccatccaaccatctgcccatctgccatccttccatccacccatcctatccatgtctatcatccaaccatccatccgtcattcttctgttcattcgtttgtccacccattcattcatccatccatccattcatccatccatcctatctattcatctggctgtctgttatccaaccatccatcctatctgttcatctgtctatcatccaaccatctgtctgccatccttttattcattttacaacccatatccatccgtccatctacccatccatccatccacccatccattcatccatctatcctgtccatttgtccatcatccaaccgttcatgtgtctgccattcttccatctatccatccatccatttctatctatccatctatccgttattcatccatcatccttctgttcctccatctgtccacccattcttccatccatcctgtcgattcacctatcatccaaccatctgtccatcggccatccttccatccatccatcctatccatccatctgtcaatcatccaaccatccattcatctgtaattcttttattcatctatttatccacccatttatccatcctatctgttcatctgtctgtccataatccaaatattcacctgtcattctgtcattcttccatctatcctatctatttgtccatctgcccatcgtccatccatcatccttttatccatccatccatccatccatatatcatccttccattcatccatacattatccttccatccgtcatccatccatccatctatctgtttgttcatccattcttccatccattcagtaatggctaatgggccccctgctctgtctcaggagctgcacaggtgctggggaatcatgagattactcagacagccccagtcatacaggagcttggagtctagtaatgtgagaagggtgggtaatctgccatgattcttgacatgtctacagtacagtgctggagagaacatcttacacaattatgaacacttagagtctagaagacggtgccacgttaatttttcatattctccatacttttcggtctgtggggaagccataattggatggagctcaggattttacctctgctggcctccctttcctttttgctttctgttgttcttggtgttatcattgttgttttgtgtgactgttttccccttctctaaagacctgattccatcttaagtagtgaaggtcaaagctgtggggtcctttgctcctagattcttatggcccctccaatagattggatgaggtctttttgatgtttcagagtataatatctataagacaaaccctccttatttcaattatctctcacttgctagctttgatgtgacattatgctgaaagaacccctcccccaataggggagataaaagttaagaacaaagagagtgaagtgggctgagaccccacatccatcagatatatcagtaattaaatgatcaagcagtatattgaataagcagtaatggagtgcaatcacaaaagcaacttgatttgcctctcactgtccctttaagtctgtttaatgggagtagtccttccctaaccctgaatgaaatcttgatgggtttcaggacctttctctcattcatacgtaagagttactagtcacaaacacagtctcaattcaataatcaaaaatgactattttccacataagaatcattgctcccaacttcatttaaagtgtctaatccttgctgccttttctgcactgggaaaagcaggaaagatcttctgtgactggtgctgttgacaggtggggcttttcactctctgagcctcataggtgtttatacctgactctctcacatagtgaaattgtatgaggttttagtgacctccctcagttgatggtgggcagtcctctataattgccagatgaaccctatgtcatcagctattccttcagctcctaggagtctggttgtccactgtcagcttttccagttcatctctgttgacccctttagggcaagacagtccccaggccagttctttgccatgccacaccacatgtggttcatgggaaacactcatgcatcctctgtccaaactgatgcaagggatttctcaggcatgagtcagacaccaatctactatgtcctccaagttttgggaggtatatgtaaggccccattcttcaacctgagatgaagggggagacctctttccttgctttatgggtgtgtgtgtgtaatagtgggtagcatagttctctgtaatggagtcctcttaacaaacccttcttaataaatgtgagatacacaaattacatctaaaaattatgcaggcattagaaagtggtgatttcaatgtggtggcattctccatatgagagacacgctgtagggctttgtaggctgtgacaatgacttgagctttctctccaactgagatggcagaccctggagggtgcagagaggagtgcctgggctgacttgtgctttaacaaatttcctccatgtaaatagacaaaagccagtgatggcaggagcaaggtcaataacatgagactcttgggattgtccatctgcacctcgacagaggcttgaatttaatcagaggtggggtggttgaggtggtgaaaaggagcaaaaccctgagtcttttgaaggcaaagatttgcaggtggatgggctgtggagtcagacagagagaggggtcaagggtgagcctgggactttgagtccgagcagctgcaaaactagaattgctcataactgaggcagtagtggctctaggatttgtgggagcaggtctaagtgtgatttccaggagcccagctgagacctggtgatatgatttgactctgtgtccccacccaaatccatgtcgaattgtaattcccaatgttgggggagggacctggtaggaagtgattggagtgtgggggcggtttttcctatgctgttctcgtgatagtgagttctcatgagatctgatggtttaaaagtgtgtgtcacaaccccagttgctctctctctctcctgccgccatgtgaagaaggtgcttgcttccctttcaccttccaccatgatagtaaatttcctgaggcttctcagccatgcttcctgttaagcctgctgaactgtggctcaattaaacctcttttcttcatgaattacccagtgtcaggtagttctttatggcagtgtgagggcggactaatatacctgattatcacaagtgccaggtgtctggttttgctcagcctttgaggataacagctgtgcctgcctctagggactttttgaagggttaacagagttacacacacctgtgtatatgtctgtgtgtctgtatatttgtgaaattatatatatatatatatatatatatatatatatatataaagtttaagtatataaatgacactgaaatctaaaattataatgtataatatagaaaacagttattggcctatagtcatttttaatgattaaatttgcatatgagatttatatataaatgagtatatatagtatttagaacagttgctaacatatagtcactgtttaatgattaaatgagattttcacgtgtatatatatatatttgcaagatcttttatatgagtcatgtaaattagatgacatgtcattattatacacaattattagtagagttgttggcataaagtcactatttaaagactgtgatttttgtatatgtgtgtgttaggtatattagatttatacaaatatatgaaatatacatttaaataagattatatacatatatacatgagatttttatctatatatagaatgcttagaagagttttgggcacattgtcactctttagtgattaaatggactttacacctgtgcatgagattatatgtgtattagatttattttataatatgagattatatagatagatacatacatgcatacatatacaaatacacacgtgtgtatatctttaggacaattgctggcatggtattaccacttaaccaatagtgaccacattaatacttatgctggtgaatgccatgggcagggcttagggcactccagtcagtgaactcagcacaggcgtcttgctctgaacacatgcaggcctgggcacagccgaagtggggcccaggagaaagctggtcgtgatgtgctaaagcccctttgctttcccagagaaggatctgcaagcagggtctttgctggtaaccaagcggagcattgtccccctagagaaactccctgattgaggggccatggcacgcccctgctcttctgtggccttctgtgtcctcatctgtatttggggctcccactacgtctctcaggattggtgacaagattaaatgagagtatatgagacttggcgtactttcccccagggattccataaagcagtcccattggaagctcttgcatttggagatttccagtgatgtttctacttcatcattcacatcccttcctggaaacatggatgtggtggcactggaccaggagtgtgcctacgctgggcatgaagccaagtccagaagttggcatccaagatcagaagacatgaccagtgcattgatctggaatgcctggccaagagcctgaactcagaacccagcagcagaatggacagtagtctcaagagccaacatggggaggttcaagatgagggcaggaggggtatcctgggcacttgtatagggcagccactgtcttgcccaaggaagagaaggaggctgtgtttggtaccaggtgagtgggaaacgccagtgtgtgcatgacccatgataattcctccaccaagattgtcaattggtaataaatctggggagattttgctgagaaaagtggccagagagagcaaaggcaagaatgttagagattcttaggttttagtagaaagagcatagtttgaagccagatgaccttgcgtttaaatctctgatttgactttgatgaatgacacagtcttgattatggtcactgtaagtaatctgttcgacgggcacgataacacctactacaagtttttgtaaaacttatgtgagccaagtgtagaaaatgcccagaagaggggctggctcgtactaggtggcccataagtgttcattccctgacattcaccttctc

SEQ ID NO: 96815 - DNA, 12761 bp, Homo sapiens
caggcgctcacttgcatatcttgccaactcttcgaactccatgcatctaaaacagaacacctcatctttgtccccgaaactgcctccttctcctgactttactgtttctgaccactgctctggttcataagcttatatcattttgctccctttttctatatataaaatgtcataaagattttgaaaacatgtttaagcaagcacaagttttactttgctgctttctgcctcgcaatagatagtagactcactgttttgtaaaatgttagtatttctagggaagtacaacatgccccccgtaggctcctaggtgttgaggaagcttacatctccattccatcttggacacaggcatgctgcagctactcttcccccatcaccacgtatttgatttttctcttccatcctcctgtcactgccatgctaatgtctttatctacctctctccttagtcaggtatgagaaacccgctgggctgctcgccttgccctttggtcttctacctaaagactccccacttgtggtggaacattctccatagatactatagtgattacagctatttctcttcatctcaaactctgtttctagattgtggtagtctgttttgcattgctatgagggattatctgagacgggaaaatttactaagaaaagaggtttaagtggctcatggttctgcagactgtacaggaagcatgttggcatcgcttagcttctagtgaggcttcaggaagctttcaatcatggtggagggtgaagggggagcagagcaggcacgtcacatggagagagggagcaggagagcaagagcaagagcaagatctcttttaaacaaccagatctcgtgtgaattcagagtgagaactcactcattatcaggaggacagcatgaagccatgacccaaacaccttccaccaggccctgcgtccaacactggggattacacttcaacatgagaagtggagggaaaacatccaaaccatatcacagatactgttttgtttttttctcatatgtactgcctgtctttcatgataaatgataaatctcccaatgcagatgcaacacttttgcttaatatatttgtattcctactctactcaagacccactactagagaatttcagagaaccaccctacagtatgtactggataaatgctaagtgacttgacttaatgggatagatgggatctctttagtatttctaacaactgcctgtgagtctataattagcttacattaaattaatttagacattaaaagtacaatcacaaggctgaaggccctggctcaattatccatctcctctcgcctccatttacaaattgccatgaagattctctgctgtaatatcatatggatgtttgtgaaatttcaagcagctctgtttacatgttgtcccaggtgcctcagatttctttaaaactaggcagctgttgggttgttgctttgggacacggagagtggtggagcttgtaccttgaagacagggcgcaaacgtgggaggcacattatggtgacaatagcaatgacttcagctacgagatgagtgttcagcaaatagtatcggagcttgtgcagttggaatcggagtttcagatccaggatttagccaggagccaggcaagcaaaggatttgagggcaggaacagtattggggtgggagagctgaagctgggagggtgaagccagaaggaggaagaattaagcatttattcacctctccccatatggatgatgctatgctgagtgttccggggggaacatatggctaatgtaagattattgccttccaggtagtatgaagaatgaagacccctccaccctgcctctcactatctgtggtgccctgtgaatacaatgataggttaagtgcaggagagaatggtagaaggaagccaagtaaggctaacagtgctttgggagaaatgtcatgagggtctgagtcaggatagtggaatgagaaggagaagctggatgtatgagataactgacaatccctgtccactcactgtgtgaacaataggagtgaaaaaaaaatcattaaaaccaaaaggagaaaacatgtttaagaaagagggaatgttcaatagattcaaaggtcacaaagaggttgagtagcctcaggatgagaaccaagagatgccgttatgactctcagaaggtagttccaggtgaggaaggacaagacagcaagcagtcactgggtggctgaacacaaggactggacctgctgagtgggggtagctttgggagccaaaaggcaggaggctgggtccctgggagcagaggttaaaatgaacagagcacagtgtaggcagggaggtccagggccctcacctggatgaccatgggtagcagcttcccaggaggctccatcttcagcatgacgagggctgcagcctggtactgcttccctctttggatcacattggctggaattccatccagcgggatgaagtcagcctgaaacagggatctgttctgtggaaaggaagagtgcgtggatggttagagttcaaagactacacctggagggacagggcaaagggcaagtcacttacattcaacctagcttcttgccatcatcctccatcagtaccagtgtcctagtggcagagctgaaggaagcatccagagcatcaggtccaagtcctctcatttcacggtgaggaaagaggcccaatgaggggagtcttctccagggacatgcagcttttttgtgatgaaggtagttttaggaccagtcctgtccaatccatgcatactaagctctcttcttgcccaagtgtccaggcctctttctcctttacatcccattgtctgctacccagtatgattgtaaccagccttgtgtttttttccttacatattttatcatctctagatttctccagcacaggaccctgtaccaaggtgcagtgggttactgcagcctcctttcctctgactcctatttggtctcttcccttcccacctctccttgccacagtcaaggagagaacatgaagggttggaggagacacctggggttctttctccaagtatacctgaagctcctccatcccagaggccagcaccagcctggagggcagacaggtggagcagtactgaaacattaacaggattgaaatcagtggagggaaatatcatgatatgaaccgaaggagtcaatactgtaacgatgttcattctcctccaattgatctatatatttagtataataccaatcaaaatccagcacgtttttcttggaagctgacaaagtgattctgtaatttatataaaaatgcaaaagaccaagaatagccaagacaaccttgaggaaacagaacaaatgggcaggacctgtactaccagatatcaggacttattgtaaaattacagtaattcagatagagtggtattttctcaagggtagaaaaacagaccaatggaaaagaatgaaacatccagaaaaagactcccacctagacaattgcttcactcatgacaaagctggtgctccagtgcagtgaaggaaggatgaccttgtcaaatggtgctggatcaattgcatatccatatggaaaaatgaatcttgacccctgcctcaaatcatacatagtaattagttgcacaatatttatagttctaaattgaaaagcaaaataatacagcttttagaaaaaaaaaaaaaggagaatatcttcatggcattggaggtaggcaaagattccttaacaggatacaaaaacactaaccacaaaggaaaaaaattgataaattgaattacattaaaattaagaacttcatcaaaaccaccattaagaaaggagaacaaggccaggcatggtggctcatgcctgtaattccagcactttggaaagccgaggtgggcgggaccagcctgaccaacatggtgaaatacatgaaaattatttcaccaacgtggtgaaataccaaaaatacaaaaattagccaggtgtggtggcccgcacctgtaattccagctacttgggaggctgaggcatgagaatcgcttgaacccaggagatggaggttgcagtgagctgagatcacaccactgcactccagcctgggtgacagagcaagactccatctcaaaaaaaaaagaaaaagaaaaaagaaagtatggctgggtgcagtggctcacacttgtaatcctaacactttaggaggccgaggtgggtggaggagttcgagaccagcctgaacaacatggtgaaaccccatctctactaaaaatacacaaaaattagctgggcatggtggcacatgactgtaaccccagctactggggaggctgaagcaggaaaattgcttgaatctgggaggtggaggttgcagggaggcagaggttgcagtgagccgagatcacaccactgcactccagcctggatgatagagtgagactccgtctcaaaaaaaaaaaagaggaaagaaaataaacgacaagtcacagaatgggaaggtatatttgcaacatatttattcaacaaaggaaaaattaactggaaaaagacagtcggattaatcaatatgcaaacatctgaagggatattacataaagaaagatatcctaacagctagcaagcatgtaaaaatgcccaacctcgttagctatcagggaaatgcaaattctgactggcatcattaagtgttgctgaagatgtgaaggaaatggaatattcacacattactggtaggcacgggcattggcacaattgctttggaaaaatgtctgacaacatatcttaaaactgagtatgtgcatcacctataatccaacaatcttattcctaggtataagcaacagaaaagtgtacatgtgtgtcccaaaacccatgttcgagaatgtccagagcagcacaatttgtaatagttccaaactaaaaataaaagctatcggtctagaatggaatgactaaatagaatgtgtgtacttatagagcgtgacactctagagtagtggttctccacctctggcatgcatcagaaccgcttggaggctggttaaactgattgctgggttccacctgtctatctacacagaaccgaccttatatttccccgctcagctgcctttatcaaaattaaggatgtctgctgatcacctcttgaatgttctctcctctcccacatcagcaagagggaaaaaaagaggcaaaagaggcccggtttctcgctattaggacaaacccaaggatatctcttatgtcaggtgagccctgtacccctggctttgctgagatgcttatgagcatttcctcacataaccctgacaatataatcagggcacaattatggtagccatccttatcaccattttatagaagaggaattgatcactggctggattaattgcaaagctctaaaattagacagtggggctggttgcacaactaatgtactaaagcccagcagtacacgatttttaaaaaattaatttatttttgagacagggtctctgtcacccaggctggagtacagtggcacaatcgttgcttactgcagccttgacctcctgggctcatgatcctcctacctcagccttccgagtagctgggactataggtgcacaccatcatgaatggctaattttagtttttgtagagacaaggtctttgctgtgttgcccagactggtctcaaatccctggtctcaagcaatcctcctgcctcggcctctcgaactgctgggattacaggtgttagccactgcacccagccaattctacaattgtagattcccattatgcctcctgaagtttcatgttaagagattccccttcacttctagggctaaaatactagtggactgttcatatgatggtttctgaatgacatgtgacagcttttcagcacctgtattatttcatcctgggtttcaggacatcatgagaaacacttatcaacaccagagataccataatctctatccccaaactaccttgatggttactgtttcaatataaacaattacaaatgcaatcatttagatttctaatttattattaaattacataccaaagcttcttctatacagtcagaaaatgcacatttagatgagaacaaaaattaagtacaaatacaataaaattggttccaagaagctattttaaaagcaaaaacttacaaagtgcatttggaaaacaataggttttaaaaatctgtattggcattttttcaagaggaaacatcttccatcacaggaaagtatggttggaattgatttccctcctcccttaagagctaacagggtgggaatggatgcaaataccttgatattaaagkgagctctcaggtatcttttaattttttttgcagagacagagtcttgctacattgcccaggctggtctcaaactcctggcctcaaacgatccgcctgccttggtctcccaaagtgctaagattacaggcgtgagccactgcacccagccctattgtcatggtttttcatattttttcagtgaaatgaaaagttttgagtggttacttaaaaggaccaaaaaggaaagattcattataataagacaatagttgagggggcataacttcccctaagaggtaacatttggatccagaagtagaaaattccttctgacctcctggctgtgactagcattaacaagtaactaactgttagcctctgaatctggtaactggtccgtaaggaggacagcaaaaaaggagagaaagccaaggtggttaaacaaaaaagttaaatgacatggagctgaaagagctcaaatcccttcatgggatccccacggagccccttcctgtggacacacacctctcttcccttgctggaggtttctttctgcaaagaaaccctaagaggaaaaagcactggcctagctgtctacatgtggccctgggtcaccttagtataggctgcagcacggagaggttagtcagacctatctgacaccaacatccataccaagccttttaacttccttggaagaactggtttattttcataaagaaaataaccaacataattccattacttcacataagcaaaaccctaatggaaaggcccatcagccatcaacagggtttgcttggctgcagtgagctagactagcttgtgtcccagttcactctcacacaatcagctttaatgaatgcacaaaagaatcagaccagtaaaaaagactggtagtataattaaataaataactttatttatgatacttcagattttataaatgccaactacatagcaaagtcccataaattttaaccgagacacaaccaccaatcaaggccctttgaaaaatcaaagataataaagtgtcaagggagaaaagttttgttctcccaacagagaatttaatcaatgaacttacttctctgatcatttaaggttcacaatgggaaaacttcttttcttttaagggtaccctgaatcaattaacagtcaatcaacccacatttagaaaaataaaccccatagttaagaaaaatatatcaaatgcccttcacacccataatgtaacaaaactttgacaccagaatgaaaaacttctcagtctctgtaccaaaccaggtgttagtccacccatgagcaagttcgcctgaataacagcatctatacaccatgatgtagctgagaactacagctgatatccttttattgcctgtggctcggactgaagccaatactataaataccacagtgaattccaatggtgaagagcagcagtgtagatgttggaagtctacaaaccaggctgtagttcagtaagacaagtcatgaatttacagaaactaagaaatggttaactcgaaaagaattctggtggctggcttaaaatctgtcactgtccagggatggtaacagaagacaggtgcagagagagacagattctgccacatgcaccctcaacagtgaaaccattctctggatgtttggaaatgcttaacagatttggaatgaacagattttcacagaactcaggattcctggtacatcaggcagtagtccttaaacttttgcccatacgttgtggagcatttacaaaagcaattctctggacagtgagccctcaatgcctttttatatgtggcttcttgaatagatcacattagaaattgagcagtccccttcctcagctaccagtgtcaatgctggtatgaggaggagcagtgggggcactgacagacactggtgattcgtttcttttatcatagtggaactgagatttcatttcttttcagtagaaaatattaatccaagggaagaattaaaaaaaaaatggaaacaatgactggtgccttaaatataagactgtcattcttgatgtttttccagcaatacagttaaccccagtgtacttgtaatttaaaagaaaaagacagttttacagtgatctccatttcagacaacctcaaacatgctgaagctggtccatcagcatctcaaagaatctatgaaaaacagaattttccccaaatatcaacagagttgaggagacagagtagaaatctatagcacagatcatcaagaaagaacttgtgatttctcattatgagtgtaaaataagaggacaagaattattattatattattttttttttaattgatcattcttgggtgtttctcgcagagggggatttggcagggtcataggacaatagtggagggaaggtcagcagatcaacaagtgaacaaaggtctctggttttcctaggcagaggaccctgccgccttccgcagtgtttgtgtccctgggtacttgagattagggagtggtgatgactcttaaggagcatgctgccttcaagcatctgtttaacaaagcacatcttgcaccacccttaatccatttaaccctgagtggacacagcacatgtttcagagagcaccaggttgggggtaaggtcatagatcaacaggatcccaaggcagaagaatttttcttagtacagaacaaaatgaaaagtctcccatgtctacttctttctacacagacacggcaaccatccgatttctcaatcttttccccacctttccgccttttctattccacaaaaccgccattgtcatcatggcccgttctcaatgagctgctgggcacacctcccagatggggtggtggccaggcagaggggctcctcacttcccagtgggcggcgggcaggggcggccgggcagaggcgccccccacctccctcccggacggggcggctggccgggcggggggctgatcccccccacctccctcccggacggggcggctggccgggcggggggctgacccccccacctccctcccggacggggcagctgcccgggcgtagacgctcctcacttcccagatggggtggctgccgggcggaggggctcctcacttctcagacagggcggctgccgggcggaggtctcctcacttctcagacggggtggccagacagagacgctcctcacctcccagacggggtcgcggccgggcagaggagctcctcacatcccagacggggcggcggggcagaggcgctccccacatctcagacgatgggcggccgggcagagacgctcctcacttcctagatgggatggcggctgggaagaggcgctcctcacttcctagatgggatggcggccgggcagaggcgctcctcactttccagacggggtggcggccgggcagaggctgcaatctcggcactttgggaggccaaggcaggtggctgggaggtggaggttgtagtgagccgagatcacgccactgcactccagcctgggcaccattgagcactgagtgaacgagactccgtctgcaatcccggcacctcgggaggccgaggcagtcaggcgtggcggcgctcgcctgcaattgcaggcactcggcaggctgaggcaggagaatcaggcagggaggttgcagtgagccgagatggcagcagtacagtccagcttcggctcggcatcagagggagaccgtggaaagagggagaccgtggggagagggagagggagagggaagaattatttttattcacaatccaatctggcagctaaaagaaaagcagtctttggatgtagaaacctggttttctgaagagcccagctgtaagacctggcttgtcattaggcttcaacactatcatggaaacacagaaaactctgtttttgattggtttacctgcctcctagggagacaaaagcaactgaaaaccttttttttttttttttaattaaaaacagaaaaatgtgttagaaaacacagcacagagaaactgtggcttcagctcaacctgaccatgtcacagagtccatcactgtcagtcttgcattcatcctgctggtcaggctaattatcaagacagtcaacttctccctccgatgtttccttattccagaccagggtgtgaaagcggtggctgtcaagagtccctgaagatgtcccatcaatggaacgcatacagcagcaacaggatggtacagatcccaataacaccccctaggatgagcgagtcccgccgcttcctcaggttgatcctctggatcaggctgtttacagcaggaaaacgatctttgggaaatctttattaaggtcatatttggaagaagcctctctggcgaaaagtcgtaggaatcacaaaaatagagatcagtggtgtctagaaacagtgatgaaaggcatggggaagaaactcacaccaagggaatctttagcagatgcagttgcccaaaccgggaacgcgctgcggctcaaggcccctaaccaatacacatctcccagtcttgtgtgtaacacaaataagaatagtaatagagagagagggagaagaaaaggacgatgacagttcccaagcactgagggcttactgccaggcttcaggtcagggtgggagccagcgtggccaggaatggaggaactctggcagggaggcacaggcatagccagctcccatcgccaccaccacccatttccctccctttcctcattttccttctcttttcctcttctctcaggagactggggagttctgcctgagagtttgaagaaatacctgatcttttcccgccttagattcaggcaattcatgggaaccaactctaaggtctatataatcagacactggtgaattattaatattttcaaagttacttcgcagcagaaggcagatacaggaggaaagtggactaaactttagccctgacccacacccattttttttgattttttttttttttgaacacattcttttggagtaattgtaaaattcccatgtgacttatttgtatgaggcgctatgctaggttccagtatactactttgccttaagggaacttagtgttgggctgggcagggtggctcacacctataatcccagcactttgggaggccaaggctgaaggactgcttgagcctaggagtttgagactcgcctgggcaacatggtgaaaccccatctctacaaaacatacaaaaattagccgggcatggtggcacgtgtctgtagtcccagctactcagaaggctgaggcgggaggactgcatgaacctgagaggctggaggttgcagtgagctgagatcgtgccactgtactccagcctggatggtaacagggtgagactctgtcttaaaaaaaaaaaaaaaaaaaaaaaaaaaaagagagagagaacttatgggagagatgcttacagagcagtagagaagaggtcacaaagaagagtggtggtaaattctaatgaacaattgagaaaggctttagtgttttaaatcatcagctatctgactcacacttctatttcaaagtttcaaaagtttcactaaatacaaactcttaaattcactgatcagcttttctggctggcaattgagttcatagtttagtaaaatgagataatgtatataacagcactctgtaaattttatagccctatctaaaatgtgattttagacatgtggttttatacttagggtgacaaggcaagaacaaaattcacagtggactggagaataacagcacacatcaggagagtcttttccttaggcaaagacatatcaaactaaaagtgaactcaaattatctaggactacaagatactcagcttttgaaaattctaggttcctccccctttggcagttggggaggaaagctttttgcctagaaggcttgtcttttcagaggttcgctgaatgaaatgactcagagtgccaggcttttctggttccctagtgggtttctgggaagtattaataatcctaatttaaaacagaaaactgaaacattttaaagtagaggttacaacaaacaagtggagaatgtatcctagaattcagcctgtgcatagagttacaaactccatcagtagctatagctcatctgcacgggtggctgtctccttccttcccccttccaagcatctgccactgacttatctctaaatgggaaaaacaacaaaggcatataatttatcatgtttaggtaagaataatgtatagtgtggagttctaacatgaatttaaaagctttctaaaatgtagaagaaattggtggataatttttaaattcacatttataatttttttcttctacatctagtagtaagaaacttctgaggtgcagtcttttaggaatggtactaaagagcataaactttcacaaagtaggaatgcacagtatattcatattatgcaattactgatgggctctactgctactgatgatggcaacctgccccctataaaagcacacacagacacttctcccctctaccctcaaaaca

SEQ ID NO: 96816 - DNA, 79273 bp, Homo sapiens
ttagaggttgtgtttattactctggttggaggacaaccctgggagctgatatagcaagaaaacctccctgaaaccagatcagagaatgacagacaggcgctgtgggccaggactttggccgccaaatctttaaaattgtgcccttccacatttgctcatgcatcctcagtaactgcatatttatttactaatgtaaacagctattactgtgccttcatgtaaatctaaaacataccccaaaatagaagttaaaaaatgagataaataaaaactgaagtcagaacattttctgtccccagtgcagtgactcatcggggtctttccccctggcaagtgcccctagtttaccagggtgctgtctagacactggagaggctggggctgcagtgaagttgctcttcacgttagaggcatgaggaacacagggaaggaaatagcgataagagacaagaccaagaagtagatccagaaatacccagaagtatttttaaacattacaaccataccttggcccatgctcgtttgtaagctattagtgggtcattttcctggtcccagagcagtactgcacaatgtaaatgcgtgactcagtaaggtggtggagctttgggtatggtgagaagcaccagcgaagccacagggaggggagcaaaggcatgtgagtcctaagggaagagcgactggaagttgggactccccagtcctccgaggaacaggaggggtgctcttggccaggtgggagcagggtgtgtgagcatctgcaggacctgagcgggatgctgcctaccttggcccattttggccgggcagttacatggggtctgagtagaaagcctcatcctatgatttctctctattccttccagagggctttggggacaggacaaagaccacagaagcccagctctgtttttccttcctttctcatctccaatgaggggcaggtggggtggctgttagagggaggtgggcaagagaatcagagtacaccagggtcaggtggaggtcatggagccagtcctcaccaactgagagatgccttcaacccagcagaggagtacctcctagggatgcagtcagtccatgggacgcatatgcagcttggcctctgggttgatctgactgaatggtcagaccacaagtatttacaaaggtcctgagcctgcctatgtcaagagatgattctccttgcctggctagtaactaacacttaataaacattacaatatggcagtcactatgctaacactttcacctactcattcatttactccttacatgaactcgaaaggagtggtactatttttatccccactttacagatacgatggaggcataagaggctatagactttcttttttttgttatttagttttttcttttcttttttttgagatggagtctcgctctgtcacccaggctgaagtgcagtggcgccatctcggctcactgcaagctccgcctcctgggttcacgccattctcctgcatcagcctcccgagtagctgggactacaggcacccgccaccagacccggctaatttttttgtatttttagtagagatggggtttcaccgtgttagccaggatggtctcgatctcctgacctcgtgatccgcctgcgtcggcctcccaaagtgctgggattacaggcgtgagccaccgcgcccggcctatttagattttatttcatattcataaacttaactctacaatccagctaggcatggaagggaacaaggaaaacatggaacccaaagggaactgcagcaagaacacaaagatgacaggatagtgtgagcaaatggggtggagggtgctctctctgagctacagaaggaatggtccagtggttaagataaagcgtaagtgaaacttattagagttgtccagtcagcaatggtgatcttcttgctggtcttgccattcctggaccgaaagcgctccatgggcttcacaatattcatgccttctctcaccttgccagagaccacctgcttcccattcaaccacgctgtcttggcagtgcagatgaaaaattaggaaccgtttgtatcgggtcctgcatttgccatggacaagatgtcaggacctgtatgctttagggtgaagtcctcgacatcaaatttctccccgtagaggcaccagtgccattatggcatgtgaagtcaccgccctgacacataaactctggaataattctgtgaaagcaggaacccttataaccaaatcctttctctccagtgcttagagcatgaaagttttctgccgtctttggaatcttgtttgcaaacagctcaaaggagatgcggcccaagggctccccgttgatggcgatgttgaagaacatggtggggttgaccacggctgatagtgtgttctagtgggttcttggtctcactgacttcaagaatgaagccgcggaccctcgcggtgagtgttacagctcttaaggtggcgcgtctggagtttgttccttctgatgttcggatgtgttcggagtttcttccttctggtgggttcgtggtctcgctgactcaggagtgaagctgcagacctttgcggtgagtgttacagctcataaaagcagcgtggacccaaagagtgagcagtagcaagatttactgcaaagagcaaaagaacaaagcttccgcagtgtggaaggggacctgagcaggttgccactgctggcgcccacagcctgcttttattctcttatttggccccacccacatcctgctgattggtagagcccagtggcctgttttgtcagggcgctgactggtgcgtttacaatccctgagctagacataaaggttctccaaggccccaccagagcagctagatacagagtgtcgactggtgcactcacaaaccctgagctagacacagggtgctgattggtgtatttataatccctgagctagacataaaggttctccaaggccccaccagagcagctagatacagagtgtcgattggtgcactcacaaaccttgagctaaacacagggtgctgattggtgtatttacaatccctgagctagacataaagactctccacgtccccatcagactcaggagcccagctggcttcacctagtggatcccgcaccggggctgcaggtggagctgcctgccagtcctgcgccgtgcgctcgcactcctcagcccttgggtggtcgatggaactgggcgctgtggagcagggggtggcgctcgtcggggaggcttgggccgcacaggagcccatggagcgggtgggaggctcaggcatggcgggctgcaggtcccgagccctgccctgcaggaaggcagctaaggctcggtgagaaatcgagcacagcgccggtgggctggcactgctgggggacccagtacaccgtacgcagccgctggcccgggtgctcattgcccggggccagcagggctggccggctgctccgagtgcggggcccgccaagcccacgcccacccggaactccagctggcccgcaagcgccctaggcagccccggttcccgctcgcccctctccctccacacctccctgcaagctgagggagtgggctccagccttggccagcccagaaaggggctcccacagtgcagtggtgggctgaagggctcctcaagtgccgccaaagtgggagccctggcagaggaggttccgagagcaagcggggctctgaggactgccagcacgctgtcacctctcaatagtatggggctcccggtggcggtggtatctgcaaaagccaagactttcttgagttatacaggaaggaaacaacagtgctgggatttgaacccaggaatgtctcgatctagaatctgtgctctaaaccagtaggcgtcactgcctgagactggtgggagaattgacatgtgctccacagccttgtaggtccaccaacaaactcccagcccacccacaggctcatcaacatcaccttggatcaaagatttccatgaatattggaaagacatatagtctggatattttctaaacactgacatgcaggggttttttttgttgttgttgttttgttttgcctcctttgttttgctggataggtttgctttaaatattaaaggaataaaatgtctaggactatagccccatggctgccttcattaccactacctcttcagtgttgagaacacacatgcgttgaatgtgtaatcagtatataactgtgggtctgtgtggcctgggctgtgcatgatgctgactcaaataaacagcggttttattggaccctctccttcttccagaagaagatcaatggaaagtaccttccaagttttggtccctcaagaagcccctgaaggtcagagggaggggaggaaaataccttcttgatgcaccagaaatcaccttataaacctcatcctccgtggagcacagtggctcacacctgtaatctcagcactttgggaggctgaggagagaggatcatttgaggctaggggtttgagaccaagctgggccaaatagtgagaccttgtctctacaaaaaaattttaaaaatgtgctgggcatggtggtgcgtgcctgtagtcccagcttgagcccaggaagttgtggcttcagtgagctgtgatcaccccactgcactctagcctgggccaaagcacgagaccctgtctcttaaaaaaaaattgtctttattaaaatgattctcagtatccttcatgctactgcagctgatttccaaagctgcctcatcttccgcgctctcaactcttaataaacccatccaaagcgcagctcttctcttccagcaactccttatttttatgttcatatccaagtaaatcttagccttgtccagaagcaaaagccccatgaccacgacttcaattctgcctctcttttctggccactgcctctgtgtcaccaaaccccagggacaaattggcaaagacaaaggtggctctgagaggaaaagggagggagaaagggtgtgaaaccccacacatcatagtcttgttcctgttgaaaatgcaggaatataaagcccagtaccagagcttcccattattcaggcctaggctcctggttcctgggctgtctagtgggtgagggcccagggcctggaggtgtttcaggatcctcaggcctgatttggtggacaggaccatgttcaggggaaaatgtggggatagggctgcatgcttgctctcaggagactgggctcttttttctgagtgtccctgagaaaccatccttaggtattggtactactcacagggttgtgcctagcttcctggctttggaacttcattcacttcctcccacccttcccagcccttccattccccctcccaaaaggctgacacccactcctcctagaaccctaccataactcaccatcctacaagagcttccttctgtttgggatagaacttcggtggcctgcatgctagccatgaagccttacgatggccttttcctaaccataacaaccacttatttccacttcatttactttacatttccctctcctcataagatttcagcaaaccatatacttataagtcaacttgcacagaatctcctgctagcttattttggtgaacacaaaactgaatgcaaaaatccccatccttcaaagaatttgacattctaatgtcaccaatttttcgacatgctaatgccagcaattttttttgaaagttgaaatagaacataataaggcaacaaaacgagactaagagggttctgcaccgtgttccaacaatcttcagtccccttcactgttcatgtctaagcactgaggcgttctaaagcaggtcaccttttgcctcaaggacttttcttgaaatatcatggtcttgctctgtcgcccaggctggagtgcagtggcgtggtcacagctcattgcagcttcgacttcctgggctgaagcgatcctcccatctcggcctgtcaagtagctggaaccacaggcgcgccactacacctggctaatttatttttattttattttttgtagagacggtctcgccacattgcccagactggtctgaaagtcttgggctcaagagatcctcccgcttccgccttccaaagcgctgggataacaggcgtgagccgctgcccgggccatccctcgaggaagtttcatcaggtagacattaattctttcacgaggatcacggatcgagctctttactggaaacctgcgccccgccttagttctccacctcttcgtgcggctccaggcaactgccaacagatggcgcccgcccgcctatttctctccttgcggctttgggcctggaggggaggtggggagagtcccaatagcagaggaactggtgagcccgggccaaaatttcatctggcatccggaatgcattaaaaacaacccacaaatctgaagctcctcgcaggagagagagagagagagagagaggagagagaggagagaggagagagggagggaagagagtgacggagaaggagagaaagwgacgggagagaggagagagaaagagagagagaggagagagagaaagaacgaacgaacagggaacttgtaaaactaaggggaaaagggcagaagagaggcagcagcgtggtccctgcaagcgtccgctttcctggccaagcagcccccagcacgcctgctttgtggggcagggccatgcggccccgaggaaggatgcggtgagccagagggttycagacaaaggaggggatccccaaggctctgggccagccagtccctgttttactggcaccacggtccctcctaggcgaggacgaagagggaaggggtggagacctccaccttctctgcgtgtggctgcgtccctttacagaatgacaggcccttacttccgagggcggggactaatgtgtaaggcttaacagatccaattccagaaattatctgtgtttttttcaatcaccctcttgtgcccccccaccccccattaaatttcatcttttatctttttttgggccttcgtaatgaaaagtggttttaaaggttgaccagttttactacttagtgcctaacaggctgagtgattataccgttgaaggaggtcacagcgggaaggacatggagagagatggggggtctgaggcctggggagtgaggtctggttccctctcctccccttggagccagagggcaccttcgtgactaagaagggagaggatctggccttgtgcagctctgcccactgagaggtaacacctgttctccagctgggtggcagctccctgaatcaggccagtttgtactttttcacctaactcacatgatttccacttcagtcgcactaccgctggctgccccattgtggacagcttcattaacctccgttgctcctaaaggcagtcttttgatggaaatgagtggcggaaaaggctgagagcaaccaggccaggctcagcccacttacttactatagttagcctctctgttatgcctcacttaccccaaggactctctgaggagtggccattagtcctacagctcctgagtgcatattgtggccagtcccacaaatgtgaagttctcttctttcctccgtgagtygttgggtcaaatagaactcttgttaatagctcaccaagtcagttaaagattgggaaggtgggcattgtgaatttgggattaaataatgtccaggtggttagaatggacttaaagagaaatagagaggaaaaggatctagtggtcatagtgaatcccaagttgaaatgagtcaacrggaagggacagtgatgaacaggaagggacagtgggaaaaccctgacagaaatgctttagctacatcctgtaccttcccacttttattagaagatgcttgatttttgttctaagaagggaaatatgtattctaggttcaacaagttataaattccttaagggcagacatcttttgcatctctcaccaggtttaaaaattaataattgtggccaggcgcggtgattcccacctgtaatcccagcattttggggggccgaggtgggcagatcatgaggtcaggattccaagaccagcctggccaacatggcgaaaccccgtctactaaaaatacaaaaattagcctggtgtggtggcgcacgcgtgtaatcccagctactcaggaggctgaggcaggagaattgcttgaacctgggaggcggaggttgcagtgagctgagatcacgccattgcactccagctctgggcgacagagcaagactctgtctcagggaaaaaaaaaaaaaagagtttacaagacattttcacacatgataaattttcagcaaattcttagtgaaagaatgaataagtaaattatagaattaaagtgatctcacaagttcaaagaggtcaaataggaagtctaccataataataagcatatattgcatggcctgaattgtcaaccttccatggctgagatcactcacttctcctctttatttgctttccatgtaaccacctctccttggcttatgtaatttttctctccccctgatgaggcagagtgaagtgttaatagctgggatttggagtcaggcaagtcctaggttcgaatcccagttgcttcagtgatcttgaccaaattgcttatgttctgttctttgtgcagcagttctgtgtctatacaatggtggagggagtgggctctcctgggacagctataagggttaartaggatgtggaggtgatagagccttgcaaagtgttccagggtgggctggtcatatttcataatatgcggcacagcttaacactttctgcccattacttccaatacaaattggttaaaacaggtggtaacatggtgggttgatatgtgggacagtttttaaaaaatcagaatgggctgggtgtggtggctcacacctgtaatcccagcactttgggaggcctagaggcagatcacgaggtcaggagttcaagaccagcctcctaaccaatatggtgaaaccctgtctctactaaaaatacaaaaattagctgactgtggtggcgtacacctgtagtcccagctacttgggaggctgaagcaggagaatcgcttgaacccaggaggttgaagttgcagtgagccaagatcgtgccactgcactccagcctgggcgacagagcgagattccacttcaaaaaaaaaaaaaaaaaaaaaatcagaatagaagcagagaaggcatgcagctccttctttcctggagctggggcaatagcccaggctggatccctgaacaaaatgtgggctccgatcctcagaggtttttctcagaaggagagttaatagccaccagagcagggaaggtctgtgatagggttcgggtggcctctgtgatgttcacaagcatcctggcatgtggcagagaccggcttttcatttgttaaaggagactcctggggcacctgcatctctgagggcaaattacaaccccacrtatcctagaggaagatttgtcatccagccacctggaaaaaacactcagcagtgttgaagacacacaaaactacccagaatttctttgggggcttgagtcatcacatttctgagctacttttacggtggggaaactgaggcactgggtgatttgctggaggtcaaagttatggcaggagcaacacaagaatgcatratctgacagagtctgttttcttgcccatgggcagactctgatcacgttaaaaggggagccagaaccgaggttgttcacccactggcttagaatatgatgcggtgacagtggggacggtaccctggagacacccactgagagtttttctacctgggtaaattaggtccgtttggtgtgaagaggacaggtggactccttagaaggcggcccaaggggctagggcatcagaagggccagagtgagcctggaggacccagcacaccacaggggctgttgcagtgctggtgayactcrgaacctgttgccagggcaggcgagtagctgagcttgtcctgggatgaaacaggcatgagctctgggagcagttgggatgtgggcaggccatggccacctctgtggtgctgacttcttcccagttgtcattgcaagtttaatcaaggacagggaccggcgtgcaaggggctcctctgggcattgggcactacctgggctctctgagtcctccatgctgcacttgcttcctgaatggcatggctgagctccaatagcctgactctgcaagctcacttttcttcactcccacttaccttgtgcccacccttctatccctgtctgactctgctttccctgtacagccccactcgtggcacctacccacctcagccgcagcctgctgctcttctgtcctgtctttacctggtgtggaaagcctgcagagctgggaattatctcccattttccctctagactcagcacaaggtagtgatggacagcacagactctagagccagtgatggacatcaaattccatatctgacrctgtgtgatttggggcaggttactcagtctccctgggcttaagttcatttcctcatctggaaaatggggatactaatagcatctacatcactgagtttttgctggattaaatgagttaatgcgtgtaaactgcttagttggtgctggacacagggtaaattgtcagtaatgctagctattattaacatcttcccatctagccctaaatctggctctcctcaggaagtcctgctctgtgggagaggaataggggctgacagggtcagtctatgcctaatcttccaggctaatagtttccaaatgggaaaccttgcagagtgctcaaaaacttttctgggatatggggagacttgaatttctgtgtcagagtttgctgtgtattgactaaacctcattgccttttccttccaagcatgagctagactacatttcccagcctcccttgctgggaccacatgactgcctttggacgaatggagtcagggcagccatgatgccataatgttgccccttccaggtctaggtcttaagtccccttgcaccatgcaggcctcaagtcttcctctctttctccattctttggttaaaagaagaggattccaaggccttagaggatgaaagggccatgagatggaaagatcctgcatcctcaaatgaatgcaaggggccaacgccctctctaccaaacccaacatgagaaagaaagaaactttattctgtcaagccactgaaatttgggagatatatttgttatagagattcacctgtatcatgtcaacttctattaaaatttattttaaaaatatcatcttttaaaattccctatcttttgctatgtttctctctctctctctctctmtatatatatatgtatacacacacacacatatatatatgtttttatatatagtggtttccaaatgttttgatcacgtcattaaaaagtttaatgcccaaactttttaatgacttgtgatcaaaacatttggaaaccactgctccagactattggaaccaacttaattcctcactcaggggccagtgcccacctgactgaagtctcttgtccacttacctctttccaattacactgttatgttttatttccttgctgtgtcctgctgtcatattggagaaagtcagtactggacaaacaaacagcatcaccagtttttttttgtttttttgttttttgttttttttttttttagaatgatagcaatggataaaagtggtctgcactaggaattagaagaccagagttttattttcaattctaactgacttggtaacaatgggtggggcacactgtctttgggtgtctgagtccttatctgcagaatgaggtccctagactggataattttggaaacacttctcagttctaaggtttgatgagctctgtagttgatttatgtgagtggggtgtgtgtrtaattttggggtaagctttaaaggatggctttaaaaatgatgggaattgtgtagttacgccctctcccccttgccaggagaaaaagacttgctttgactatagctatcacttgttgggattaacttgctgctttctgggaacttgcatctgtatggaaatttcaagatagaacttgtctgaaactgcttattttcttctattgaaaaggatccacaggcttctcagaactccagcttcttttaaccacctcctctttccagttcctgccttcaccctggtttctgtaaaggaacttctagtgcttctgaagaccccaacgctcaaatgatctgttccaaggaaacgttctaaattacagatgtttgttctcggtgctctccaaatgtctctgaggccaaagcacttcttgcatagtcattgagcacgtgcttgtatggtagttagaatgaaagccaaggcaaaaatagctgtcctcaggttttggtttttaatcgtctgatgttggtgactccagggtaagtatttacgcacttgagctttgtttgccccatctatagaataaaaatccacattttattttcagcctctacatttctgcacaaatttggtgtgtagggtgggtgggggttggctcccattttcaagccttgtaacttggctttgcaagaaaggaagctttgtttattataatcattatagtattactatcattgctagagactagagtctcaatcctgaggttcagtttcacttaataccagaaagcacagtcttaccaattgagaactcagtcacttcaagaattttctgtgtttctttcttaaatttaagtctagaattcttccacctcccagtgtccttcaggaaaggtatctgagttcggacacccattatctaacagtggggcaggggtggagtggggtartggtgagagatgtcrgtcatagggatgtaataggtctgcactggtacccagtgatgtgtccttatccctgtctggtcttgagtcatgtggtccccactgtatctgctttggcatcctggccttcacacatcaggtctgctggctctcagctccatccctgctcccctctgtgctacatgggagaacaaacatgtggctgctccctaaccctgaagggtgtgtgggactctatgaagttacttcaggctcagaagcctggataccccatgcaggattgtctactccactctcctggtggctggtctctttcccattgtggggttgaaatattatcacttgagattagaagcttcttatggaggagagaaagatgaaggggaagcaaaagagttgttaaaagataaactcaggcgcattaaaatgttaacaccgttatttgagcattcagcagttcatgaactgggcagcactggatgacaggtgtttgggtgctacacagcagcggcttcaggagaacctttcataaagtgtttaagaaagcaagacaaagaaaatatttgattggttaaagtggagagtccctagatagaggttagttggctgtttctgattggttaggcttacgttttatttcactgcttgcattgagttgggttctgatttgcttacgtaggaacccaagatgctgcagctgcctcagcctgatagcctcccaattaattattttaacacagttaagctttgttagaaggcctcctgccccctgctctctctcacaaggttaactacaaagcacgaagttaggaggtggataagagagcccccaaatggcagcaagcccacctctgaactccattccctcccagtgggaatgttgcttttgccttgaaaaatccatcttcaaaatatcaatgtgatatatcacccacgttaagctaacttgaagtggtaaaaatggcctttcctgacatagctttcatcaagaaaaaaaaattaacttgagttctcctttcaaaaccccaagtaagtacttttccctttgagtgactgcattcttctgagtgggaaaggagaatcgtgaacttgggctcatttcttcgcaagagaagtttaaaagatgaactttcagtgaccacaatgtgaccatatccccagttttcatgatttatttcgacagtcagttgttggcctaacctctgctaatcaagcaggctgtaccaatatctagcttttcatcatatggagggcaagatgccttctgagcttcatgaatcagaaagtaatcattatcttagctacaacaacatctcttcttctacagcatcaattttaaaagaacaaaaagtcttcaagaccttcatttatcattttccctcctcctctcctccaccccccccatcccctcctctgtctctcctcatacagctggttcatgttctgtgtattagtggttgagatcagagtttctcaacttcagcaccactgacattttgggtcagaaaattctttttgggggttggctttttcactgtaggattttagcagatttcctggctttgacacacagacaccagtagcactctcttgtccctcttcctcctcagctgtaacaatgaaaaatacttctagatttagccagatgtcccctggggggcaaaattgacccctgttgagaagcactggcttagacaaattacagatgaaaacatctgcagtcactgtcagtagtaagtgctcttatacgtggtattactgatattatagtatccaacaatatcatctgataaaggaatttgcctattaataaattagaataaaagccaactgctttatgctaagctcaacatttatcatggagtctctttttccagcatcttacaaacagtgtgtactgtttttgctacttgggtataatttagaagatgtgtctatattttggtttcttctcttagtgaccaaattaatgagcttttttcttggtaagtattattttgcacttgttctacagaaaattaattgacttcycagggagtggtttaatataatttctttcttttcttttcttttcttttttttttttttttggagacggagtcttgctctgttgcccaggctggagtgcagtggcatgatctcggctcactgcaagctccgcctcctgggttcacgccattctcctgcctcagcctcccgagtagctgggactacaggcgcccaccaccactctgtatttttagtagagatggggtttcaacatgttagccagaatggtctcgatctcctgacctcgtgatccgccctcctcagcctcccaaagtgctgggattacaggcgtgagcgagactctgtctccagaaaaaaaaaaaaaaaggactactgggaacacactgtttgcatacgcttttcaaatatgtgaaaatgtagtgaataattggacttgttaccttttctttggatagcactatcttgcccagtgtgggctgctgtaacaagatgtgggttaaacaacagacattcatttcttgcagttctgaaagatgggaaggcagagatcagtgtctggtgaaggccctctgcctggcttgcagatggccaggcatctgcagagggagagagagagaggaagggagggagagagagaggagggagggagagaagagggagtgagaaaggaagggagggagggagagagagaggaagggagggagggaaagaggaagagagggagagagagagggagagggggagggagagagggagggagagaggaaggaaaagaggaagagggggtgggtgagggagaaagggaggagtaggggagagagagcaggaggatgggagagagagggagggagggagagaaggggagtgagcaagcacacttgctctggtctctttatccccttataagggcactaatccccttcatcaagctccagcctcatgacccaatgacctcctgaaggcccacctcctaataccaggaatgttggtggttttcacacccatgtaagaaaggctaagttagtgctgttaacattaatttagatgagaatgacagaccccaagatagacagtactgcaaatgcctatgagttccttctccaggctacacagcaggctccctgagggcaggagcaggtttctggatccctgtgagtctccccaatggactcccagcacagggctctgtcccaaagcggacaaagctcttggcatgacagggtgagactgcgtggcgtttctgttctggctgcctgtgccgctggagattcacattcaccaaagagtgaagcccagagttgaaatgcagacagacaggtccacaatggccaggccctgtggggtttagctgcacaaatccattcttttgacaaagattggtgctcccagggcgtagcacagctcagcaatggaagctgaccccccgcggtggccctggcagcagcctggggcaggctgtgcatgccatgccttgctctctgggagggcacaaggctgtgctttctgttcagcagctgttcctcttccagctgattcgcttctaacctagaaccaggcttggactagggggcagggggcaggtagtctgctccttcctgtgaccagtctctaagaacacacctgtcttcatgtcccttggccctgcttgctctctgatcagcccaagacttcacccacgttcacgtccatttctctttgggagtctgggggtccttctgtggggggcttgagcatcgctgctcctttgggtgactccccattgccctgccgcagaaggagcaggattgtaattgatggttttccatctggagcacaggtacgtcttggggaaatggggatgtgaaaaatagaagtaggctcatttaagaactattttgttttatgtccatttttgaaaagtcttactgaagggtgcacagcattggttaggaggatggtttgggtgtggttctaggggacaacctgctgctgggagacctgggtggcaggaacagcagctgtagtgatagtgagatgatgatgatgatgatgacgatgatgacgatgatgatgatgacgatgatgatgatggcaatgtaacatctattgcacacctactgtttcaaaatcgagtaaatatactcattagttccccacaatcctactgtcatccttgtttgacaattgaggaaattgagacctgagaggttgagaggcttgtccaatgtcatgggctatgaagtcaagataccaggtattactcctggctacgggaccttagagaagatgctcaaggtggtggtctccatagttgagaaatcaaagatggattggttgactcccagatgtttttttttttctctagcaaatgttaacaagtttagcccaagctgcctccttacatattttaagttccacctaaacattccgctgtgcagatgataacctaactggatgtgtacagagactgtaaccgaggcttgtagccactagcccagtgtcagcccatcagagcagctgagtgtcagctaatcacaggcgatcaactgctcaaactgtgttcaaatcaggcagacacggagccgtaagcagcctagctgtttctgttttctgtagatcactttctttttctgtctataaatcctctccgaccatgcaccagagtcactgtgggtgtgctgagtctgtctaattcttgaataattttttgctcaattaactctattaaatttatctaacgtgttttttttaaacacaaatattctcttataatctctgaaagtccttttatttaggccaaaccctaaaaaatatgcgtgaagtggaatcttctctctgtgcttcttcccttcccacgactctcaccagtcttactccagcccctgaagggaaccagtgcctttgcataatttactgttatttttgcttccataagacgtttcttgaatccttcccttataccaaggagtaaatgcatgacaaaatgttggagcatttcttttctatgtaatgatgaaatgacaggcagcagccagcaggtagtagcaaataaatgtctagcatcattccagttttaaaaagtctgtttttccaaaagtttcccatcctgcccccatccccagttaaaagtatgagaacagtaaggcctagaaaggggcctcaaccatgattatgagttgtctgtaaacctggaccagagttcaggtctccggatcctccatcaggaaatcacagggtggggtgagtaacatgaagccggcttccactctgggatgtcagattcctggcatggggtgatgcagggggcttggaacattccagaggaaacaaaagcgagatgagcagagacaaagagctgtgaacaccagkttcaaaatgcatgagtgagggtgttggaaaacttcccaggggtggtggctgcccaagtcaaaggacaccaacaggaaatgcaaagtcccagggtcccagggctagcaggaagctttgcctccaggctgtggtgcttgcygggcctctatgcttcgaagagccggcccgaggtgactcagatttcctgagaagcctcttatcacagccagcacagacatctgtgcctttcctcgcctgagatgtcaccagctcagggccactccctgccccagccagatcaatgggcctttcacggcttctgagggtggatcctaggagtgcccctgtgacgaatgctcagatgactgcctctctaggatttctgtttgtttctgcttcgcagtcttccctccacccagaagctcccgaatgtccaggaagaattgactaattctctccatgagtttcttgcccacaggacgaatggagccattgctgtaacaaccttattttccactaagtcagaataagagacctggacagaaagagagtaatggctgaggcacaaggagcgagtattttaaatcaggcttatgaatgtgctctgtggatacggtttgcccatagggaggtggttttgggggttgcgaatcatactcaagctgtccctgaccgactcaccagtattctacaaacttactacaaacctctcaaaggaccatcttggaagacactagcaagggcgtgaacaatcccctctgacgttgctggctggtggtggaggccacggagcctccctgtgtgagactgtactatgtggtcactagaacgttttgaaagacagttctctgcaggcccggcaccgtggctcacgtctgtaatcccagcattttgggaggctgaggcgggtggatcacgaggtcaagagatcgagatcaccctggccaacatggtgaaaccctgtctctactaaaaatacaaaaattagccgggcgtggtggcgggcacctgtagtcctagctactcaggaggctgaggcaggagaatggcgtgaacccgggaggcggagcttgcagtgagctgagattgcgcaactrcacttcagcctggcgatagagcgagactccatctcaaaaaaaaaaaaaaaaaaaaaaagaaaaggaaaaagaaagacagttctctgcaaatagataccccaagggttattctttttaagttgatctttagtcttagagctgtgaaggatccctaaaattcttccactttagaattaaggaactagagttttggaagagttagrtgattgccctaaacctttataatgttagtgacattgttaaaactcaaatgtgagcttcctgactctcaatctaaggtgctttccactccccccaacccccacagcagatcgaccctcttcccacagagaaggcagtttttattttccaaacagctcctttgccaaccagtaagttaacagaagatgccagactcaatatgacaccatcatagccaggccaggttaattccagataccgggtcctctgatttaaacacagccttttggctggatgcagtggttcactcctgtaatgtcagtgctttgggagactgaggcaggaggatggcttgaggccaggattttgagaccaacgtgggcagcacagtgagaccccctcctctacaattttttttttctaattagctagagtgagctgtgattgtgccactgcactccagcctgggcaacagaacgagaccctgtctttaaaaaaaatacaaaaaaattagctgggcatggtggcgggcgcctgtagtcccagctacacgggaggctgaggcaggagaatggcgtgaacccaggaggcggagcttgcagtgagccaagattgtgccactgcactccagcctggatgacagagtgagactccgtctcaaaaaaaaataaaaatgaaaataaaaataaaaaattaaattaaaaaacagccttttaaagaaattccaaagataaagagaacagctaagaaaaagacacccaagatcctcacccctaggtttccagggactttctgtccctaggcagagatactgagaaggggaagcggaaaggatgctgcatgaagctcctcgccggcctgcttgctgggctgctcaccccaagaagggaggcccacctgcctccaaagtggcagttctggggcataaacattcccagagcccagcatcacaccatgcccttgggaaacccatgtggaggaggccccattgctgcacccgaggggcttgcagtctggtgttgaagacaccagttgatgacagctgttgatgacagctggagcaatgaccatgataagagctttcatcatagatgtgatgttctgtagaaacacaggggaatgaggggctgagagtagagaaggattcctagatagggcacaagcaggactgtcttgtgaagcatgggtagagtttctacaggtggaggaggggagaggattccaggagcttgggctgctgcacagccaagtgtcctgtctgatgggggcgacgtccctgggacttgttccttggaactcgagtccttggagatgagccagtaaaagaggaggttctggggtcaaatatgtcagggtgggtatcccactatgtggccttcttagagttccacgatgtgcaaagcttactgcaggctcttagcaaaccaaaccaaacacgacaaaacctgtttaaccatttttaagcacagggaattctctctttttgtttcagagaacatctactttcatctcggggaaccaggactccactggattcattttgacctagggcagtggaaagggaggggaggaagagctttgactttggaaaagccagcgcctgctaaggagttcaggattgcatcccacaggcagtggcagcagtggtaggacttttcccccttatataacattttttcctgactatctaagtaatgtatattcattgtacaaaacttgcaaggccccaaaatctccccaaacaacaaacaacctcagaaaagaaatctggttgcccataagacagtgcacagaaataaccacataaccactgaagatagatgtctattgagtgccttctgggtgctggcctctgttctaggtcctgtggattcgacaatgaatacatccagtgaaaattcccacccttgtgcaagttaccttctagttggtgttgcaggtaatagacaaaatgaataagtatctagtggcctaaataatcagaaggataatgaagaaacatgaagcaagaaagtgattggggagcgtataccaccaccatgggcagatgtgggctgccaggagggccgctttggcaagtgacagggtgatgtttggatgatgacttgagagaggtaaagtagtgacatatgtcatagtaatgacatagataaatggagggagaaggaggagcaggtgcaaagatttgmgtctgtagtgtgcatgtttgaggcacaacaaggaggctacagtggctggggcaggaggagccaggagggggacagtaggagaagtgaagatcagagattggggagagagcgtcggtagaatgtgaggctttgaatgatgatgcttctgtctgcatagtagggggagccagggcagagttttaaaatagctctacagtggtccctccccttattgacaattttgctttccaaaagttaccagcttgagttaccagccatcaactgtggtccaaaaacataaaatggaaaattccagaaataattcatattttaaattgcacctcttagccacttagtagctgactcagttatcaaatccactgtggcagcattgcagtgcatgtgttcaaggaacccttattttacttagtaatggcccctgggtgcaagagtggcagtgctggcaattcagatatgccaaagagaagtcataaagtgcttccttcaagtgaaaaggtgaaagttctcaatgacggaaaaaaaaacatctgctgacgttgttaagttctacagtaagaatgaaccttcttcaagcctgtaatcccagcactttgggaggccgaggtggcagatcacgagttcaagagattgagaccatcctggccaacatggtgaaaccctgtctctactaaaaatacaaaaactagctaggcatggtggcacgcaccggtaatgccagctactcaggaggctgaagtaggagaatcacttgaacccgggaggtggaggttgcagtgagccgagactgcaccattgcactccagcctgggtgacagagcgagactccatctcaaaaaaaaaaaaaaaaaaaagaaaagagaaaagaaagaaaaagaacgaatgttctatctgtgaaactgtgaaattgtgaatcaggaaaaagaaattcctactagttttgctgtcgcaattcaaactgcaaaagctatgaccatgatgtatgacaagtgcttagttaagatggaaaaagcattaaatttgtgggtagaagacatgaacagaaacatgttccacgttctgactaatggcaatcaggtttggtgctatccacagtttcaggaatccactggcggtcttggaatgtaatccctgtggataaggcgggactactttatggagatagaattcatgtaccataaattcactcatggccagtgtaccattcagtggttgttagtatattcatagaattgtgtaatttcagaaacttcatccctattaacagtcacaccccattcctctctcccctaacccttgacaaccatcaatgtactttctgtctgcagatttgcttatgctggtcatatcacgtaaatggaccacaggatatagggtcttctgtgactggcttattttatgcaggataatatcttcagggttcatccacattggaacatgtatccgtacccgagttctttttattgacaaatatgatcttgttatatggatgtaccacatctgcatgccccttgcagggtttgagcagaggagtggtgggatctgattttgatgggaccactatgcctgctgtgtggagataaatggagatgggcaagtgtggaaccagggaggctggttaggaggctgctgaaatgtagttgaggatgttttgggcctgggtgatagccgtggaggtggtaaatgttggagcaccccaggactcagattggtttctctttatctatatatacttcctaggtgacctcacccagtctctaagtttcaaatatcttcttgcaatggactgaatgctagtgtggtaggagttattaagaaattattttagggtgagtgtggtggctcacgcctataatcctagcactttgggaggcctaggtgggcggagcacttgaggtcaggagttggaaactagcctggccaacatggtgaaaccctgtctctactaaaaacttcatctctgcagcccaaatgccctctaggtgtttgcttattcttgcttgacctctctactcaccaattctctggtagacactacttttctaggctccttggctgggctatgaattaaattgacataagacagaatagcaggagaaaaactacgtttaattatgtattaattaattaatacattaattatgtgggacatgggagtcccacaaaatatgagacttgagaggttaagtgattgaagcttgtatagcatcctcagctacagaaaggaatagggacttggaacttctggggggtggtagcggaacaagttatgggagggtgaggggaggaaatgagtggcaaataaatgttgtcttgttaaacgtctctcaggtaataaacgttrcctgagaggagtaagtgatggtctgtcagtgctggtgtcaatcttatctcctttcctgtgttcttccctggttgatgagattcctggggaaggaattcatgacaattgaattccttttggaggatctgtccttaggcagataaggggagctcagagaaagcctctgcctgcatctgctgctccccaaatgccctcagttaaaagtaatcggcacaccaaagcatcagctttcaggtggcatttcctgaacttcttcacctcacatttgatgcattccaaayagaactcctaatccaatcccaccccaaatctgctctccctgcatcctttcttgtttcaatgattgcaagtcaaccctttcagttgctcaggctgaaaacattgcagtcatctttgattcctctctctcttacatctcatatccaattcatcaagaaatttgtcaatctcatcttcaacatatctagaacacagcccttatcatcccttgcttgaatcagtgcaaatattcttaactgatcttcttccttcatccttctcaagggaccaaagaggtcctttacaaatgcaaatcaggtcatgccgctcctctgctcaaaactctgcaacaattccccacatcgttcaacatgagtgcaagtccacacattggcctataaagctctatgtgagttggcttcctgtgaccttggacctcatctctcactcttttccccgcttgctttctctgtttcagctgcttggccttgttgctgttccttgaacttccaggcacttctccgtctcaaggcctttgcacaagctgttctctctgcctggaacactcttctctctgatacccatatagttattccagctcattttttaaaagatatttatttcactgttactttttaatgaagcatgctgtgttttgcctgccaaacatcacaaactggacactttcctgaacttgctttacattttcttttctcttagagcttgacagtacctttaatatcctatataatttacattttaggtttgtattttatcaactatttccccttgcttggatataaactccataagagccgggatcattatatgttttatttctagctactagtatggtgcctggcacataatagtcactcatgaaatatgaatgaatcaataaatacctgttgattggatggatgcacagatcccttgtgttaaaatgtattccagataccttcgtgtgtttgcatgtttggcattcagcctccacccgctgtttctttggtaatgatatataattggtaatgattttccacaaggaaaaatcttcatccctctttcagaccctgtggtgtggtggaggctggccccttccccaagattcaagtcactaaaacttgattycaggtcttttgttggaactcctgggaagagaagccctcctccaagagaggacttgaaactgggaagttgtaagtcaggggcttctgggggctaccacgtagtgaccacttccaccacatagtgaccacttgctggggagtggagcccagactgmggaaagcagaacttacagaaacctggatgaactgagtcctgatgctgctgctttctgtgcttaagccagtgcttatctgtattatgctccttgggctgctatcacaaagtacsgcaagctggatgtcttcaacaacagcactttattgcttcatagttctggaaatttgagatcaaagtgttggcagagttggttacttctgaaggctgcgagggagaacctgttccatggccctctccttgctgctggtggtttgctggtgagttttgacattccttagcttgtagatgcttcaccccaatctttgtcttcatcttcacctggtattttccctgtgtgcacatctctttgtccaaatttccccctcttctgactccataccagattaggacccaccctgatgacttcattttaactgaactagctctgtaaagaccctgtttgcaaataaggtcacatatacacaagtcctggggttagggcttcaacatcttttctggggacgcaattcaacttatagaactctctcttgcagctgagagccttacatgcttaacgtttcagttccatgtagaaaatctcatattttatgggaagccattcaaataaagagaaggaatttccatttttttcatataattttttcactggccagaaacaaaacaaatgatctgaggggaagaaggcaacattgtatatttcttgcattctgtaccatatatatcttcatatacgtacacatatacatatgaatacatatatgtgtatatatatgaattccatctatgtaattctatttacccatcatctttcgatcatctctgcatttctaatttagaatgtctcacagtttttatgctttcttcctcacgtgtttatcctgaaataaaaaccrtatctaacctgactctggctggtctccccagaagtgattctccttgtttacctggatgccgttaaaacctctccagaagatgctggtttcccagcccagcagcttcagagttacgcagggaggggcagaggctggagctggcggctgccccagcatgaggagctcatgtccccattggcatcttctctgtgacagatgccccaggtgccgggtgaataaatttatgtcttcacttctctgtttatttggtttcttagcgagtaaacaaaagaatggcaagtacctcttttgtgtcaggcacttttctaggtttgaggacacaacagtgtgcaaggaatacacagacatggatattacagagcttatattccaatagggttagcagagttcctatttcggtcggggaagccagtccaatactgtaaagacgcctgaccccatcatttttagtgagaagtcactaaagggtggagaagcgtggagacagccttgctttgatgttgcttatggggtgatggggctgggctctcagactggcatggggtaattctgattttctccatcaggaagcctccagcctgtgtacctccaaattaggggaagttgtggggtccagtcctgcgtgccctctacccggctgtgggtgtaaatgtcatccttctcatgccgaggcagtatttcctgtcaccattgtcatttccactcatcataaacaggggttgggggtctgccctggtgtgcctctttcttaccaggctttctttggatttcatttcacctagacactcttccaaaaggacacaaaacccagtgacaaggctgatttttagttttcttctttggttgctgtggttcctatactcttgatggtttaacctatttctagggctttctatgcctggaaccagcatagaccatgaatatytctgttcctttatgttcagcagcttctagctccatggctgaagaaaaaaattcagtcattaaatgtagtacagacatatttggaaatgtaatacatgcttcaaacatgggatgtttttgaagttttctagaaaaatctctttagctttcaggctgggtggaggttgattcctcagaagggagtgggctattaggaaaatagaaatgatgtgtgcctgttccaggaaatgcgagttgagagcggcttctcatccgkcattgagcaagtttattcgtggtgagagtggacagccccaggcgtctcaaaggctctgtctgggatgggggtgcagtaaggtgggaaaagactgtggttctagggaagacctggggggcagtctcaccgggctcagcttcctcatgtggaaacatggatttaaaaaaatacctattttgtggggttgttaggggtgacacaggaggggctccacgagagcgcgtggtgtttgagtgggttcaggcaggggccttctagaatcagtgcctcccagggcagctgttctgctgagcgctgctgcatccggttcccaggtgggcttcacatggtagaagctcaatctggagatgctccaaaatggcttatccattgctggatgaaaatcaaattgaaacgatgagtggtatgttagtgagtttgttaaacctctcagagtttagggattcaaagcctggctctgccatgctctagctgtgtgtctaagcaaataactttccctcttatttatttatttatttatttatttatttatttatttatttattgagacggagtcttgctctgtcgcccaggctggagtgcattggtgcgacctctgctaactgcaacctctgcctcctgggttcaagcaattctcctgcctcagcctcccgagtagctgggactacaggtgtgcgccaccatgcccagctaatttttgtatttagtagagatgagcgttcaccatgttggccaggctggtctcgaactcctgacctcaggtgatcctcccacctcggccgctgaaagtgctaggattacaggcgtgagccaccctgcccggccaacttttcctcttttgagggggcatcaggtctttcatctataaaatgggagaagtaagaatatggatctcatagaggtgctgctagttcctgagttaggatttgtaaaagtttagaaatgggcctgacacatatacatttgtaataagtgttagcttgtgttataaatgcctcatctggaaacaagatagctaataaccccaaaagtggttttcagctggygagggagagtagtagggggtcatcttggaatcatgatatttaatgattatgattattttacttatttggaatttcaaataagataaaaggaaggaacgagattttctttttttcaaaagatggattgcgttataaaaaaggttgcaaaagcctgtcctactagacaatgcacttgggcgtgcctmcacctctgtgcattattaattctagcttcatttcgtagggagtatatgctgtgtcaagtgtttttggcatgcaaacgggactattctccttggcaagcyaggctcatccacttacaaaggagaagctaagagtaaagcttttgcatggcccttggacagtttatgaacctctccacaactgttatttctctagtttaatactaaaggcattcttgcaaggtgactagggcagacgttattataatttcctttctataatgaagacattgagctcttagggagggaaagggagcttcctaagggtcacacattgtaaaaggcagaacctacttcctactgtgccataaactgcttggaactggaatacttactgcctgggtctcacaggtggttagtagccatgggagaaacatgctaggaaaaaatcactgcagagtggctcaggaggctgggacctgccttatgggataagtatgggcatatggtgccctttcatctgggctggaaaagacagggagaagtatcaagtttctcttcctgtaggaaaaccactggcttctggcattggtccatcttcaaggaattttgcattgaggtagcaactgatcagtggttatttcctgaacattttctgtctaggactttgatgtatgcacaggggttgttggagatcaagggagccacaggccacttcagagttcctggaactgtgaaaagcagaaacaagaaaacaaagttccaagctcactgagatattcacaatgcttacattgaaaaataatgcttgtcagtctactaaaaatgcagtgtcatattatcatatgatcttaagttaattgcaggatttctaaaaattaataatttartagtgtatggcaggaggcctgccagccctgtgtgccttggatgtggggcaactaaagcgcactccccacttttaagaagccattgacccagtggagtaaacaaacatgaacaacmaacaatatcacaatgaaataagtgtgagtggtatgtcaggagagccccaaagagggaagatcagaaaaggcctgacagaggtgaagctgggctgggaggaagggaagtgcctcttgattgaggctctgctctttctcctcttcccttcttcctgtgtctcctcactttccttccaccagatcctttccacttccccagccccgctattgtctggtcttagagggcaggaaaacgaggtctgctggtctgctttcagattttgtttaactatagaagtgctttggtttctttgtggtttctttgagcttttcagtgagaaagaagaaggcagtgggaatacattggaaataaacttatcagtgctttgtagcatcaccactgtggtgtgattgccccttgaggcgtgtgagaggaaaggtggaggaagatgaggctgacaaggttaagtrgggcagagtgctctggcactactgggattgtagggaggggaaccgagggacatcatggcacaaatctggaacccgagcaaagcgagttttctgaaagataactccagcagtgatgtggagaattcttttaatggcaagagaccagatgctgtggttaccttgcagaagcaaggtggatccccaccctaaatttagtttggatgtcaagattgacgccatcacacataccaagagagcatgcacatgtttattacttacatcaagcttgtccagcccacagcctgcgggtcgcatgtggcccaggatggctttaagtacagcccaacacaaatttataaactttcttacaacattttgagattttttttttttgctagttgttttttttttaagctcatcagctatcgttagtgttagtgtattttatgtgtggcccaagacaattcttcttccagtgttgctcagggaagccaaaatattggacgcccctgacttacatgatgaggctttctggggaagaacagggaagacatcccaagctagttcaaaacagcttgggagagcaagaaaaaagactggcttgggatttgattttcatttatttttatttttagagatgaggtctcactatgttgcccaggctggtcttgaactcctgggctcaagcaatcctcccaccttggtctcccaaagtgctgggattacagacatgagccaccatgcccggccaaggcttggaattttttttttttttttttgagacggagtctcgctctgtcgcccaggccggactgcggactgcagtggcgcaatctcgtctcactgcaagctccgcttcccgggttcacgccattctcctgcctcagcctcccgagtagctgggactacaggcgcccgccaccgcgcccggctaattttttgtatttttagtagagacggggtttcaccttgttagccaggatggtctcgatctcctgacctcatgatccaccygcctcggcctcccaaagtgctgggattacaggcgtgagccaccgcgcccggccggcttggaatttttaatagtggttacaatgtgggcaggggcttgtgtggtttggatttcctgcttgcaccaacaaagagcatccagactttcacatgagcttgcccagatgcaaggcacaagggggtgagggaaagggaaggcttaaaagttgttagcaggccgggtgttgtgactcaaaatactgtaatctcagcattttgggagacctaggtgggtggatcacttgagcccagaggtttgcaaccagcctgagcaaaatattgagactcctgtctctccaaaacaataaaaaataaataaacaaataaataaataaatggctagacataatgrtgtgcacctgtagtcccagctgtttgggaagctgaaatggaaggatcgcttgaggcccagagtctgaggctgcggtaagctgtgttcgcaccactgcactccagcctgggtgatagagtgagaccctcgtctcaraaaaaaaaaaaaaaaaagttgtcagcagtcaaaaaaaatagatttagactattacagcagaaggaggaaggccagttgggtgctgttrtggtaatctargccaatggttcccagacttttgttaaagatacagcttcctattcttttagcacatttgaaatgtacaatacgttattattaactgtggtcaccatgcagggcaacagatcactaaaactaatgaattcagtstaactgaaattgcgtcttcatcaatatctctcctttcccggcctctttcctctatccacccctgctgcccccaccacagcctctgatatcagctttctactctgtttcagtgagatcaacgtttttagattccacttataaatgagaccacacagcatttgtctttctgagtctggcttatttcacttagcataatgccttccaggttcattcatgttgttgaaaatgacgtaatttccttcttgttaaaggctagctagtattccgttgtgtatatgtaccacgttttctttatccattcatctgttgatggacacaggtagattccatatctcagctgctgtgaatagtgctgtaatgaacatcagaatgtggttatttcttcgatatatgaattttagttcctttggataaatacccagaagtggaattgctggatgatatggtggttctattttttcattttttcaggaacttttgtaccatttttcataatagctgtgctaacttacattcccaccaacagtgtaaaagggttcccttttctccatatcctcaccaacacagcaagtgtgaggtgataatctcactgtggttttaatttgcatttctctgatgattagagatgttaaatattatttcatacgcctgttggctgtttgtatctctttttttgagaaatgtcagttcaaatcctttgccsattttttaatgtttttttaccacaaaaatgtaagttggtgagctgaggatatgttaattagcttgactgaatctttctataatttatacrtagataaaaacatcacattgtgccccataagtgtacacaattattatttatcaactaaaattaataaataaatcaatacacttaaaacatttaagaaaacactaaaaaacaaaaactaaccaamcaaacaaacaaaatacagcctcttagacttcactccagayctattaaacctacattccagggtgtggattatggaaataggtgtttgtaaatagctcccaagtaatttagaagtacctttcatggaatgacatttgggaacactgggctatcataatgaaaaagagagcaaggattgagaaacactggacaagagagtccaagatataagacccaggggaacctttaaaaatttgcacattttgggactgggtgacatgtggttggaaggaacgctggcttatggattttgcggagggaacggaaaatcttatgggtctatctagaaagctgtgtggatgtgattgtgaatctccacacacatttctatgtgcattacccaccgtatgcactcaaagcgtggaaaacatttcacagcctgctcgactcctcccgtctcagcaggctgtgtatctccagagttactttggggagtgtgaactcatactattagttgccaatgaaaaatggaattaactatgagactctcttgcaaaataaattacgtaatgtgttccaaagatgaaagaaattcctaagggattgcctgcccttctggataactatattgccacattctttctctcttgagttgagagttaagggttgactgggtaaaatctgtcttgtgctccatcatgaaaacacaactcagagctggtttttgatgtacatctaagagaagtaacagacaactcaaaagatttgggccaccagaactggtaagaaagtgctgaaggagccaatggagggagcacttgtgtatatgtggcttggtgtttaattctgttggttgtttgccatcttcttaacaacttagtaacttacataatttgttgatcgatctctcatcctctcaggttgctggtttggaagggacaacatgagaaaatcaacaggaaactgatgtctaaaactatccatcatctatctagatatccacttagctaagcaatatagtctatcactgtgtgttcttttcttttcttttcttttcttttcttttcttttcttttcttttcttttcttttttcttttcttttcttttcttttcttttcttttcttttcttttcttttcttttcctttcttttttgagacggagtctcgctctgtccccgaggctggaatgcagtggtgcagtctcagctcactgcaagctctgcctcctggattcacaccattctcctgcctcagcctcccgagtagctgagactacaggtgcccgccaccacgcccggctaatttttcatttttgtatttttagtagagacggggtttcactctgttagtcaggatggtctcgatctcctgacctcatgatccgcccgccttggcctcccaaagtgctgggattacaggcgtgagccaccacgcccagcccactgtgttattttctttttgtatttttcatctattttctttctcatcttgctttcagcatttatttggaaaaagaaagttcattagatatttctcttttcaaacacctttatgagatataattcacattccatataattttacaatttaaatcatacaacttaatggttcttagtgtctttacttaagttgtacaaccattgccacaaccaatttttaggacattttccccccaaaaagaaacctcttagcctttagcagtcactttccaaatatcctattctctcccagcactaagaactctactttctgtctcaatggacttgtctattctggatatttcatataaatggaatcctacaatatgtggccttttgtgaccagttactttcacttagcctaatgttttcaaggtttatctgcacagtagctatttttcttgaaaagaacccttggatcaggtaagacacaaatgaacacaactctctgtattgccttaatggaagtagagaaggaaattttgcattctgtagttgcccaaggaagtactgttgaattaattttgctttatttaaactaaggtgctagacactgaatctcccaataggattgggacacaagtcctgtctttcaaaataaaatgctggtcaagcaggtagactgcggagccaaactgcctgggttccaatcctagctctgtgcgcccatcctgttggtagttgtatgaccttgagcaaattattcaacctctctggggctcagtttcctcatttgaaaaatggggattaaaaattgtacctagcttcaagggtggctgtgagggccaagtgagatcatggatgtaaaactcttggcatgttgcctgcccactgataagccctcaataaaggctggcaataattaccaaagttcttattcaaagaactatagtccgatacrgtataagtgtgtcaaaagaagtatgatcaaagggccatggggcacagcagagggaacatcagttctatactgggtgggtagtcagggagaagaatcctttttatgtgggattgtaatctggagcctagatccagatgtggtctacaaaatatgtttgggggctactgttgtgttttaaagattttgaaattcaactcctttagacaggcagtcacccctaccacaacttaatggaccaaactggtttgttagggacattaatgttgcttgagttctgtgccccacgatggaaggtgacctttgacctggaacttaaaggttggctttgaattagccagacagagagcaaaaggtgattggtgtcactctttctctcttttttttttttttcaagacagagtttctctgtcgcccaggctagagtgcagtgaccatctcggctcactgcaagctccgcctcccaggttcatgccattctcctgcctcagcctcccgattagctgggactgcaggcacccaccacggcgcccagctaattgtttgtatttttagtagagacggggtttcaccatgttagccaggatggtctcaatgttctgacctcgtgatccgccttcctcagcstcccaaagtgttgggattacaagcgtcagccaccgcgcctggccggtgtcgctctttctcatactttctttttaatattagttcttctgtaatcaatatgtcacataggcatgtggtaaaacattcctacaatgagcaagcctcccatttcttcctcatcagttactgtgagtggaaaagcacatcacccaaagtgatttttctattccctgactccataacaacgatcaacatagaaaatacctgtgaccaaacatgtgggggtttctctccacacaccaagcaagcagtcagttccgcagtggccacagctgggagccctccaattcagtttcagcactgtctacttggaaacagcgtcagatcccacagagtgaggggctggatcttacaagactgtctccctttcagacaccagtcacaagtctgggcctttggaacttctggctgactggcttcaagctggggttcccaagaactcttctttgggtttgattaatttactagagcatctcacaggactcagggaaacatgtaaatttaccagtttattataaaggatattacaaaggacagagacgcatagggctaggtatggggaaaggggaggggatcttccatgccctccctggggcatcctccaggaacctccatgcattcgtttgtctggaagctctctgaaccctrtgcttttgggtttttatggaaacttcattacttaggcataattgattaaaccattggctaatggtgatcaactcaaccttcagcacctctctcctccccagagactgggggctgaaagtcccaactgtttaatcctgccttggtctggtgaccagtctcatcctgaagctacctagaggatgctaaccctcagccagctcattagcatacaaaaggacaacacttttgaaatggtaagggttttaggagttgtatgtcaggaaacaggttgaagaccaaatatgtatttcacagtatcacagttacagctggaatttcatagcattccagagacctgtcttctatgaatatccaaacatttaaatgtaggtttaatctcccttccattattcacaagggatgaattttgaaatattttaaataaggaatgaaaacaaaatgaaaaacacactaaaaaacagggctcagacaagtggttttgtttttattttcatttttattacagaattttctcaaacatacacaagaatagagagactggtacaatgaacatctacatacccatcactcagcacactaacagtcatccactcttgcccatcttatttaatttgccatttactttctttggctttgcttgttttggggggtcctgtagtattctgaagatcttgctgtttttacttaaatatatattgtgatcattacgcatatagatttgcctcattagtttagagacatcgaatttccattatatggatattccatattttaatcagtctccctttgatcagcatttagattgtttccagattcttgacattataagccatgtcaccrggcacattcagttttataccattatattaccttttttattttttgagacagagtctcgctttgtcacccaggctggagtgcagtggcgcagtctcggctcactgcaacctccgcctcccgggttcacgcrattctcctgcttctgccccctgagtwgctgggactacaggtgcctgccagcacgcctggctaatttttgtatttttagtagagatggggtttcaccgtgttagccaggatggtctcaatctcctgacctcgtgatcagcccacctgggccacctaaagtgctggaattacaggtgtgagccactgcacctggcctataccattatattactatttgaggtgtccattctcctgcctgggctttcagccatctggtagaattagcatttctcgccaatacctacaagttctagtaaaggctcatataatccattttcattcattttgataggtctaaatggttgtgttcttgtctttaattcagaaaatgtttatcgagcatatactataagctggatatccctgtaggctctggagatgtgagagtgactgggatataaactgtgttcaaggaacacctagttcagtggagaaaagattgcattgcattttgcctcttttcctcctttacctgtgttgtatcagctaggattaaatttagttgtgagtggcagaaaatccaatagctgccttaaaccagttcactacaaaaatcctcaataactttagctacttttggagtttgcgaatatccaatatattcttttgaaaacctgccaataaaggagaaaatattcaacatttgtgttgcctttctcataaactgcaaggaaatcaaacagttgatgagaagtgtctcctttagaggtgttccaaataaaaaatgaaaaagaaatgatagcttgagaatattaccaatctgcaactgttaattaaatagtgtttctagtcaataaatcattaatagctgctaacaccgcaaaaggagagacarccctgtattctgtacctccaaatatttacaccatcatttatggaaagcaaacctagagctgatcaaggctctagatatgacagctgctttatagggggyagaggygcttgctaaaggacactatgaagatgtaatcrgttcagtccagaccatgggaaactcagttccttctgcagataaggacacattattggagagggaggggcaaactgtacaggcaaagagacttaagaagtttatagaccaatttgcatcgaagtttggtttgtcaagacctctcgtggcctttgtgttcctcagarcatcctctgtgctttggcttctgaggccaattgcctgttcgtttcctacctccttttgcrttcctgagagataattggattggcccaggtcctcttttttgttctaggctgtaggtcagaggtcagccggtggactacctggtttgatcatatgtcctcctttgacttactcagctggaggtaaagggccaaggggacctcatgaggaaggggtgatgtgtgcagctgctcaacaccctgaaaggcaatttggggaccaagagggagagttaataaactgacctaacgcattgagttttttctgtgtttttttattttttcatataaaacttgagcgtggaggccaaagggatacacctgagtccatttggccagttatttggggttctggggcaaaaggaagagcagccaatgtaagttgggtaggggtgggggctctgggcaggctcaccatggatttcagggggattctcaggtggggagagctgcctcgtggccccttcttagtggtgtacgttctggaatttgcactttgatttttctacttatgaattgtgtatccgtgggcaacttactgaactgtgtgcctcagtttcatcactttgtaaaatggggattagagtagtggaaactgcctcgaaggtattcctgggagttttgagcccagaataagctagtgtgtgaagagttgagagcagtacctggcatggggtgtgtgcatgggtgacctggagccaactctggaaccccagctttttaattcattctgccttgaatgaaggggctggctgcacttagtacctgcctgtggggaggttaccaagcagcccagtgctgaggccagcaagatacactgagggaccccagaagcactgaggtcaagtccctgagtcccatggggcatctctgggttggtcagcactggggtcacattgcatgtttgctcagcttgccccttctcagtgccagtagaagcccatggtgagcccagatacaggrtctgytgactcacggggaatttgctgcccacagaggagggagaaatgcacctccccaaagccaacaatcaaaggccaggcaagccctgtgggaggaaaataacttgggctacagattttcttttctgggcttggagtcttgccatggacaacacagaaacagacatgattagcatcatggcttccggaaacactgtgagtgcgcactagcaggtggtgggctgatgtcactctcaaatggctttctcgagtccgagggtctggctccctgccgggccctggcccattgcacatcagcgctaggtataagcagctcagagagtcacttcaagctgcagaagacttctggggtgagtctttggaggttcttgtggaaccacaggggaggtcccctgctcatccgctacacttcacacctggcctgtgcactcaaagatgtccactgtcttccccagacttgctgggagagagagcagaaccttgtcagactggcccaccccaactcccccccatccccctcacctgtgcatttcccrtagcatttccagacgcccaggctgtcccgcacctccgtgactttgctcagatccttcccttgtctagaacttgtttgaagaactgaatggagatactcagggctcagggacactgagccacaaaataggggcccatggaaaggttgaaggcatggctccgctgacacgggagctccagagcragaatgaattcagggagtttagggctggagttgaagaggaactagagcctggagagaggggaggatagagaaaggctttttgagaaccgcagcaatgagggctctgcctgaggctctaggtactgactcgtgggcagtgaggagaggtagatttttgttggggatccacttgatgtatgttttcttacaactaaatgataaaactgaggctgaaacacaggtgttttctgcctggcctttttctagaatgcacctctctctgaagattatagagaactatgaagaaaaggagatygtgggaaatatatgattgagtcagtatgatttggaggaagctcaagtgcttgctgtggttgcagagaagtgaggggactttacattcctggctggacaggttgaactctgggattggagaggtggtgggggagtggagaggagcagaaggaacagacacagggagagacatttcaaaggattgtcaacagggcatgatgataacacagggagagcaagtccagcctgtctcctggtgctgccccgagttgatgactgcaattaaactgccagactttacagcctgctctgcactgtgtcctcctggcatcttggggactttttcacggttggggccacaggggaggttagaagctgctcrctctctccattgccaagcactggccggtcaatggagttggggagaaggaggctaattctcaacagcctgttagtgacagccattctctctccagcttatctaaagaggattttatttcagaagaaggctgagagcttgttagaaaggcaagttcttgggccccaccccacatatactgaatcagagaccctgggagtgggacccagcaatctgtcttaatagaccttctaggagattctggcactaaggaaagagaccacaggtcttgtctatctctgtagttggctgcgtctgggccagagtaactgcttgttgaaatgatcagagatctcaaatgaggtcatgcatgttggggtgtgtgtgtgtgcatgtgtgtgtgttgtgtatctttatgtgtgtatgtgtttggtctagggtccagcacatagtaggtgttcactcttgggggtgggaataatcactctaatgtccgtgtttgaggactgcattgctggtgaccrctgagcctgcagaggaggaagagagcagggcagaagattcaggagggggtgcatggcaacttctgatgtcacagtgccccccttcactcctgacttctggctcatgggtcactttggggcaggggcaagaggatggttagctgcagcaaagagagagccaaagagaagtgggattgagagcacaggggacagctggagacaaaatataaacgccgggcaggggaacagccaagatagtgcaggaaggatggggaatcacagaaacttctcaggtaacagtctgggccagaacactgggtgtccccagagagggaagtcgagggtgaaagtgaaaaggctcacactcaacttccaggagaaggtcaggtccttcatcaaagaataatcctgccattaaagggtccccagagtccccagcattacttcccttaagtggatcccaatcctggtcacccaatcccctcaggactttgtaaaacgtactgatgcccaacccttgccaacaagctcgtcccattcctaggattctgatttactttgtctgcagagggcttgagctcaggtatgtctataatgacagccaggtgattctattgtacacycagggctgaccactctacttaagcaaaacacacacacacaaaatatacccccgttcccccccatcccctgggggtgatgggttggggatgagggtgatgatgttcccacagatgcattacctctccacagagctcaggaccaaaggaatgtttagccagaactggtaaatacctttaaaaaattattaagcacctatagaaacctatagggacaaaggtgactaagaggatttttacaaaacaataataatcaagtcacttatttaaaaataattaatcatgcttgtaatcccaccacttaaggaggctgaggcaggaggattgtttgaggccgagaactcaagaccagcctaggcaacatagcaagaccccgtttctacaaaaataaaaataaaaataaattagctgggcattggtgtgcacctgtagtcccagctactctggaggctgaggcaggagggccccttgagtccaggtgtgtgtctgtattgagtgtgtgtctgtgtgagcccaggagtttgaggctgcagtgagccatgatcgtgccactgcactccagcctgggtgtcagtgagactgtctctataaaagtaaaaattaaaaaaagtaatttagaacaaggaataaaagacaccagtgaatgaaacaaaaaattagtaagaaaccttgcgatccatgaatgcaccttggtgtagataggggtggggagaagagaacagaagagactcgtttctgcagatgaggcagcccwtcccttctccccatctgggtggaagctggcccagcgcccaggctcccaccccaggcagtgtttctggaggcctgagcccgaagcccactgtttgtgctggaagctcttgctttacacttgtttgagctacattgagtcagtatgagagaggcagataggtgaygcaggttaagaacatgggcagccgagtccctgggttcaaatccagactctgtcacttgtcagttcacccactggcctgggtcagggagctgacctgggtcccaggtcgcaggcttcctccaggcttcctggtaggctctgccctccctccccctccctttccctccctctccctccctttctctccctccttcagggatgtcttctaagtgcttaccacttgtgcagggcacaaagagggtttccccaccagctgtagaatgctcaggccctgtaacaactggatctgcccccaggtgcagcaactctaggatcctctgttgccctcctgctgctaccaccctcaggggtctggagtcctcacgatgcgcgctgcatgtcctccccacggtggatggccaggctccctccccctcttccctgaccacagcaagagccccttggctgccatattggaaggcgttagcatgcgtgtctgtgcatgtgtaggcatatgtgtctccgtgtttgtgatatgactgtgtgtttgtgtgttttgtgtgttgtgtgtatctttgtgcgtgtgtgtctgtgttgtatgaatgtcttggtgtgtatctctgtgctggtgtatgtgtgtctgtgtgttggtgtgtgtgtttgtacctaagtgtctttgttgtgtgtgtttgtgttggtgtgtctggtattggtgtgggtctgtgttgtgtgtgtctgtgtttgtatgtctggtgttgatgtgtatctccgttatgtgtgtctgtgtgttggtgtgtctggtactggtgtatgtctgtgttggtgtgtgttgtgtgtgtgtgttggtgtgtgtgttatgtgtgtctgtgttggtgtgtctggtgttggwatgtgtctgtgttgtgcatgtctgtgttgtgtgtgtctgtgtgttggtgtgtctggtgttggtgtgtgtttgtgttggtgtgtgtgttgtgtgtgttggtgtgtgtctgttgtgtgtgtctgtgtgttggtgtgtgtctgttggtgtgtctgtgttggtatgtgtgttgtgtgtctgtgtgttggtgtgtgtgtgttggtgtgtctgtgtttgtatctgtgtgttggtgtgtctgtgtgttggtgtgtgtctgtgttgtgtgtgtctgtattggtgtgtgtctgtgttggtgtgtgtctgtgttatgtgtgtctgtgtgttggtgtgtgtctgtgttgtgtgtgtctgtattgcgtgtgtctgtgtgttggtgtgtctgttggtgtgtgtgtctgtgtgttggtgtgtgtgtgtgttgcacccacttgcactttcttgaaccctgcttgatgtctgtgcctctgttcccgtatccctgctggttcctttctgtgctggctgtcagcagagctgcgagtgtggatgccaggctggagtgagtgaaagagcaaccgctggtatgggccattcgctgggggattttggcagagaaaaggagcaaaatacaagtaacggaagcttgggggtcaatggaagaattgtttagaggaggggagacttggcaaggtttgaaagcagaaggggaagggtgcataaggagggacatttggaaaagtgctggagaggggagcagagggaagctgccagggaggtgcaccagcagagattggggtgagggcacaggaaaggacacagaaaccccaccccaggacttgttacccagctctcagattgctaatgcccagcatctagtgctgcctctcaggaatcagctccaactagcaaggggtgggaagggaagaagcgagctcggaaaaggcagccgctgctgcagtgagggtgatatgtaatgctcatggacccgtgctaatcatttcctcctttgacttgtgccaggggccaagcctagggcaggtgctggtctctgcctttgacgggctcaaggtctatttggagtatggatgcatcagctctcaaacctgaaggcttgcctggcgtaggggtctccacatctacccattggcatctccatccccatccctggccctatccccaagctcagtgacacatcaccagagaaaaacgcggccagagaggttaataagttacccaaggtcacacagttggtcagaagcaagactcgaacctagcactgcctaatgccaacattcgaggtctgcccctccatgccatactcctagagggcattgggttcctggtccccgtgctctgtctgacttctgactctgttacttgcttgacctttgaatatcactttgccggctcctctgcccgcctgacttggacccttgctgatttcacccagcttgttagtctcagctcagacttccccaccagctactgatccctggccagaccccagccttgtatcttccctaggaccttctggggctccctcagaccccatttcctcaggccacccacatctctgatgacagacgggcaggcgggaggatgctcagaagacggtgttaaggaggagatactttaggttggaatcagctagcatagcctctggcacatggcacagtggagagtggagagcccaccgcagagagggcagctgggagcagcttcatggctcacagagggtggagctgcatggaatgtgccgggaaagtcaacgaggaaaatttggccaagttacagtgagtgcctagctgaaaccggacaccaagaatttgtagcaggtcaggcctgctgcctgggaaatagttggcctactttgcttttcagttttcattgtttatttctaaaataaatgtttattttacctttgtatttaaggtttttaggaacatgggaaagaatgattttgttctggttttaracacttacttttggccttagagagacacgagccaacttgctaattacagcctaaaagtcagtgtttgatggtggagtctttctttgataggtgcagctgcctggtggcacatctccaggctttgcgttctccaccccggcccagtgatccaaaatttcagcccmactcataaaaaccctagccctcccctacccacttccccattgtttcccaacacgcctgatcttctctccttaccctgaatccagggctcttgactgatgctgaagagaatggcacactcacacccacacacgcatgcatagccctgcagtcatctcgacaatcttcatttccctccttctagcagtttttgttccattcctgtccacctcctcccacccccatctcctgctcaactatcttaatatctttatctttaaaaaaacaaatttgaaatatgaagtgctcaaagcgaggcatacagcttacatcttggtgatgtgtctaaagtgaacactcagtaacagtcacccatgacaagaaatgcaacactgctagcttctagaaacctccctccttccttctcccatcgataacccctttctctaatcctcagaggtcactactctcctgaatttatggaagtcacacacttgctttacactaaatgtatttctaaaccctatattttgcctgtttttgaactttatgtaaatcgactcatgtttactcttttgtgcctggcttctttcactcagcattatgtttgtgtgattcattcatgtggctgcaataggtgtagcctgttccttttcattgctgtatagtattcttctgaatgaatgcccatatatatgggcaattctgtctgcagtgtccagctaaggaaccctctgtttccccataggacccagccccaaagtagggtcccttcatggtttgacttctacttttctttagaatctttttttttttttttttttttttgagatggagtctcactctgttgcccaggctggagtgcagtggtgtgatctcggctcactgcaagctctgcctcctgggttaacgccattctcctgactcagcctcccgagtagctgggactacaggtgcccgccaccacggctggctaattttttgtatttttagtagagactgggtttcaccgtgttagtcaggatggtctcgatctcctgacctcgtgatctgcctgcctcggcctcccaaagtgctgggattacaggcgtgagccaccacgcccggcctagaatcttttcttgctagagacctctcccctgacccttgagcaccctctgtattagccatttctgcagttccctaagtgtgctgtgctcacctggcttttatgcagcctggcctcctgctactaattttttaagggactcgaatctgctgtttacttcagtctcaccttcggccagtctttgttttatgctttatgcttcagcaatattgaaatatattttaatttttaagactacatactactttgtccttttcctcaagttttttctgtttttcatcccttcagtaatgcctacttattattcaaaatgaaacctaggttccagctcctccaagaagtacctactgataccttttatctgtagcctatatttatatatagcctatattcctatcaaagcaaatggcgcacagcattgcactgagccatactgatggtgatctgtggcaagaaaatggtccaatctggtggttctcaaaatgtggtccctagatgacactggtcttcacctggagacctgttagagatgcagattcctggtgcttactccaggtcttactccagaattagaaactctgggcatgagacccaggagtctgtgctttaaaaggctctctaggtgatactggtactaaggaagcagaccactggtctcatccgtcactgtaactggcaggtctggtccagaataaatgttgaaataaaataaactcaagtcatctaccccaggaagtcttcccagcattcctaggctgggtgaggaatcactcctgtccttgtggcagcccgcatgctgtagcggaactgcagaggccgacttccttaagggcagggattctgctgccttcgccttgctatccctatgcctggcacagagctctgtattatagttttaggtcctgggatatacatgacagaaaagacagaacagttccttcctttcatggaattcaagttctaagagggcaggcagaaaataaatcataaacaaacaaatgtaaaataatttcagatagcaataagtgctgtcggggaaacagaacaaggtgatgtgatagatttggattgagtggctagtttagagtaggaagttagaaaaagcctttctgagaaggcaacattgagctaagatttaaatgatcaaacaccagctatgtaaaaatctgygaaagtcaatctggagggagggaatggttggagtttggtgagtttgaggactgacaggaggacactgtggctggagggtggttggcggtggggaaggcgggggagggagggagagagacagaaacagagagatctaagaggtggacagaggcagccatggaaggagtttggatttcatcccaagggctstgaggaaacccttggaaagggatgtttgtgttggggagtggtgtgtactggtgcaggttttagaaagatcactctggctgctgtgtggacaaaacagattacacagggggcaagtgtgggagcagggaggccagtttggaggctgtgggggcaaccaggcggatatgggggcagcactggggcaacatgtttgatcacgtggaattctgcttccactgtattagatgtgtggctttcaggaagtcactgaacatttatatgcctcaattttaccctctgtaagagggaataatccagcacttaatgcacaggtttgctgggaaggctcaatgggttaataagtataaaacataaacacctatagtgtgagttatttttatattattattagcagcagtagtagttgtcataattgtagaataaagagaacgaaggatttaagacaattacaggttgagttgacatgatttgataataaattggattttgaagatgagggaaagaggaaaagaagattcctagttttttggcaacaggttcattaggggtgctggttaacaaactggaagaaggccagtggggaagcaggttttgaatgtggtgggagagagaggtgtcaggagctgtttgaatgaggtaggttgaggtacctataaactatctttgaggagatgtctggcagggattggatataagagcgtgcagttcagggaagagcccatggctagaaacacacttttgggagttggggcactgtgatgagtttgcagatgaagacgtgaagggtgcctgggacaggggctccctcaccctaagtggagcagaggagcaggggccagcatggggcctgagaagagaggcctatgaggtgctgggactcaggagaaaggggcctgctggctcccttgccaacaggtcagatgagataagcagaagaggcaaaggagatcattccgtatggcagcatggaagtcatctgctgagtgaatgaatggaattctacctcattggttggtgcatctctttagaaatgaactcagtagaggctgggcacggtggctcatgcctgtaatcccagcactttgggaggccgaggcgggcggatcacgaggtcaggagatcgagaccatcctggctaacacagtgaaaccctgtctctactaaaaatacaaaaaaaattagccaggcgtggtggcgggtgcctgttgtcccagctactcaggaggctgaggcaggagaatggcgtgaatccaggaggcggagcttgcaggaagctgcgatcgcgccactgcactccagcctaggtgacagagcgagactctgtctcacaaaaaaaaaaaaaaaaaaaargaaaaaaaaagaaatcaactcaatagagaagcctggctgtatacgttcsttgacacctatcaagagtgagagaacagtgtggggaggggcctgaagacaacagtgcaaatggccttctcagagccaccttcaraaaggatggcagagcccctgttggggtgggtgctacaagtcaaaagaagcyccatttgtcttgttgttcatgagtggaggggaggttcctgcctcttctgcaaaaaaagttttagaaatcaccatgaaacagtggccaaactgaggtagaaaaagtgttcctgaaactggaaccaaaaatttccaaatgacagcacagtttggcatagctgttctgagtctaggagcataggagccctcacgccatttctgtgacctccccaaggcaaatcatgaaamttgcagattttctttattaccaagtgaggcagtgacagacctgctcaatggtccttaaattttcatgagcaacagaatccccaggaaggcttgtgaaaatagattgctgggcccagcctgcagagcttctagttcagtaggctaaggtgggatccaatgaattgcatttccaacaaactccctggtgttgctgctgctggtgatggtgatcccagaaccaccccttgacagcctctgtctggattatacaggctcccccacagcagggacagtatccctcctgctcacctggctcagtaggaggccctcaataattcagattaaatgagtggattaataagccttcggtggtgtatccctcagggttcaggaatgggtgaacaccgtggctgtcacggggakacaggagtgaaggccaggatgagacagactgtcatgctggacatttagtggtttgtttcttgggcctcttcacaatgacccracttgcctctgctgccgcccagcagccccgctactgagtaggactctactcagagcttctggtggccaagtggtcatctttggactctcttcattcttctccttgaacgttcctaatgtgaaggttcccccctccactctgactgtgagaaatcttccaacaattcagttcaggcctgcatcttcatgaatggaatttaggtggaattttaggcagagggacacagtgacacaaaggtgacacagtgacacagaagtgatttaaggggcagtgtctttccaagattccttatagacccctgggtaaagcaagtccttcctctccaccctccagagccagaggaaacagggtgggaccctggcatatggctattgagagatggaattcgttaagtcccagtaaaagcgaaatgaatgtcggtggccacatcccatgcagcacacacatcttttggttagaaggactgtacccttgccctgcacacagagccttctttcttcctcaaggaaaagtgactctttcacggcctgctgggaggcaaaggaaatggaaaagtctcacagcgtcctgagcccctctctgtttccttcgggctttcacaagttcagcggcctttgcacacaagctgggtcctgtgggggaacagagggttctttagctggaggctgtggacaacactgcccatgtttccctgggagaggagaagccccgtgcactgacctcctagcctcgtccctgtcttggcagcgtgtggagcatgtggagcccctcctggccctccctgtctgtggccccaaaagcaaagcagctcaggggggcttttttgagaagctgctgagctcagaccctgctggctccacattcctggatgatgagggagggattccagtgtttactttgaacaatgttttcctgtgtctgaattgactgggtgttaaattcttccagatttctggctccacgttgcagctccaacgggacagaaacaggtttacggcagttggcaagagaatgaaagcagggcccatctgggcaccttctgcgtctagaatatccactctgtggttgcaaaggctgtttagcgcccgctctgtgggctccatgcccaggcagggtttgttgtggtctcaattcacagagctctgcacttgtgcctttcacatttcccaccctagagggcaaaagttagcttttctcttttgaaaacgcatccgggaatgagaacaagctgagtttttggaaggtcagggcttgcagtgttttcttggtgagtacaaacccagaagtcgggctcataaggaattcatttggtgggacattaggaaacttcagtacattccatttcctggggactgctgtgccaagaggtttcagagacatgcaggaggttcgagctggaagggagacagggtgcagcagacctcaatcctcatttttacccaggaggaaaccgaggtacagaggcaaagtagcgcgagggctgagatgttggactggaagggctcgtccctagtgcatctggttcgatctcttggtgctgagcagtgcgtaatcccatctctgaccacacaaccttgcagaggtttaggaaacattctcctctttattaaatgttggtaaatcaatggctttaacaatgcagagagcttcagaaaacaaacaggatcgattccaaattaaaggcactctttgggtccaccatgcacaatagtttctgcgttcttgtgttctggattggtgagcaattcagggaaaactcccataggaccccatgatgaccagggctccacagagtctttggtggggcgccagtctctaggcaggcagctgtcagcctctgaatcagaacagcccaaatccaagtcaggcatgtgacaggtgatggccttaaaacttactccattctagaccccgtgctgttggattctggaaacctactcctgagccgtgtgtgtgtgtgtgtgtgtgtgtgtgtgtgtgtaaaggaagattagcggcaatcttcctggcttcagtgcctaggtggagtccaaacagtgtttatgtagtagggttgaataaaatagtcctatgacagaacctgacactttgatctggctactttcacaaagtcattttggtgccaagaacatttttacttagttttcaaaagaaaccatgaaaatgtcagatctctatacctctccagtaatgtgtaaggcaagtaccctaactccatctctgagccttccccccgtatcttgccctacatccataccccacctgcaacccctctagtcatattagtatatccactgtgtcaaaatgaccttgtcaaaatctgctttgttggaagggcagcttcatttttgtagtatgttataggcctaaattctttacttacataggttcccttactttagtagaaatggtgtcctctggagatggaatggggaagaaggaattatgcagtgaaatttctcccactgctgccagagtagaagtccttctctgtctcagttttgtgggtgagatttttccttgataggtctgctaggggctttttattggttatcccttggtgggtaacaaagcactccaaaggttagttgctttaaacaaatatttgttatctcagtttctgtgggccaggaacctgggtatgccttagctgtctgcctctgtctcagagtctctccatgaggctacagtcatgattttggccaaggatgtggtctcatctgaaggctcaacaggaggagaatccacttccaaattcactcacatggatattggcaagattaagctcctcacaggctgttgaactaaaaaccctagtttcttgctgcctcttggctggaaaactcccttagttccttgccacatgggcctctccatagggcagtttgtaacatggcagctggcttcccttaagatgaacgagaaagagagtgtaagagagtgctcaagatggaagccaactttttttgtgacctaatctcagaagtgacattccatcacttagaccatattctgtttattagaagtgagtcattagatgcagttcatactcaggggaggggatttcacaaggatgtgaataccaagaggtgagattattggaagccatcttgcagcctgcctaggataggccttatgggcccaattgccattcatcctattggctctgtcacctttgcagttctgttaagaygtgagttgtgaggggcagaggaaaaygatttccatgtttacccttactcctcttgggaggtagatagctttgttggcatagcatctagagacttctcaggggcaaaaaattctgagtttctaagctattaattgttacatttaccctccactctcccatcccatcccagctccactccaaggaaagcagatgagcccaagacagcatccacacttgttttccttttctctgtggtccctgtcattctctgaacaacgtgacacttttgttctctctagagttcatctagtcctcacgttgcatgccattgttatctagttttcttgtttccagaatgaacccccagtcataaatcatagaatagaatgtataccaatagttcagggttcttggtgtttaccagaaaagctaacggttacaaagctccttatggatcatggaatacttttacttacatcaattggatcatcataacatactatggggcaggatgtttcccaccttggggatgaggaaactgagcttcagaaagactaaggaacttgctcaagatgggacataccgaggtgaaggtgggtttcaacgtgagttctcctacctccaaattctgtgctctaccctacagccccttgatgctgttggcagatctaagtctccagattacttccagtaggaatctggcgagacttcttggctcagttttgctccttaagtcattctacaccagggctgcaatgatctgagaagagaaatagaactcagctgggacaagggatgtcaaagctggggtgagggagagcggacatggctggtgacttagggagttacacaggagtgtgcctgtatgtgtatgcatgtgcctgtgtgtgtacacattcatgcaagcatgtgtgtgtggctcgtagactctttctcatgccagtgactatacggatgttctgctcagggctgtgtatatatgtgcacctgtgtgtattgctgcctgttggctggaaacatccctcggttaacatgtgtatgtatgtggctgcaggtgggcctagatgcctgggacccacctgggctgggggatgagctctacagagtgccttttggtgagcagatggtataaacaggactcttgggatgtgaaaagtagtgtggctggggagggatgggtgagatgtagggacagcactgtggcagcagttgtgttgaagggtcccctgagcatgtcttctgacctccyatgacttcagtcccttccctgatcttcaacrtagtgactcagttttggcaagatgtgtcttggtactaatttctccagcctgaacattggactgcattgttttggcattgcagcagacattgccatcctgcatattaatgatgataacagtccagccaataggctcttaccatgtgcctgtgccctgtgccctctgcccagtgctgtatatgaattatctcatgaaatcctcatggcactccaaggatagtttctcttactgcctctgttttacagataagaacacggaggcttctgaattttaactgtcttgttccttgttcctggtcacgcagctaagtcactgacctgtcttgaactcgtgctctgaattccatgctacactttccccaaaacaattgtttaatacgcagttttactgttttgggaactttggtgaattctcctatcaattgccgtcttcagatactgaaatccatacacaataatattgcagaacctcactagaacagtaaagagagggtggtttttctgcaatgctgcacgagggtggtttttaaaggccaggcctttgttggggagaggatgccacagaacacgctccatgaagggcccgttcccggattttaaaagtatttgacacatccctccaccatgccaagaagacacattaaaaccctttttgtttaattggatttctgactcarcaaaaacttcttttgtcagaacttcaggatttcctggcatgttacccacacatattttctatgtggatagttatgtttcattgtatactattggggtatctttgtgcctagaaagactcatttgaaatgaataattaaaggtttctgcccaatttcaagaggcctcttttgtgacgtctggggaatggacaattgctatttaatttttaattataggcaacaattttttatgtatttaagtgtcaattctccctccactcccaaatcattcatcttagttacattatattaaaatgttgccagttaaccttcctcattctgtgtttctcaggaacccagtgaaatgagctgcaccaggaactttaagagagagttttcagctgggagaagaggaaggcaagatatcagaacaagttaagcaaatctggccttgggttttgaccacagtctatccttccagtgggccaagagttgcttggaatgtaaggatttcacttctgagccttaaaaacacaatttaaggagagagagggagagagagaaagagaaagagaaagagagagagacacatcccaactaaataacacataatgggatagayggccttgatagataaggttcagataagatacttgggagcagagaggagggcctgtctatttcacctagaggcctgggccagcctctcaaaagaagtatcactggagccgtcctggaagggaaggagatatgaagggtgtatagaggaggggccatgtgtgtgaatttataatcattatgagggaggcaactccatgcatttgaaagagcagctaacatccgttaacaacatacagaagatatccctggagccatatttggcggtgatgacacctggccctggtaaaagcacatattggacaaggtgagactagaaatggagtttcgaagggaaagcagagtagagcttgagttagaatttggtacatttaggtcccatggactttttcatgttagacaaggtttcatttcttctttcaacaaagtgtgaatcctggactgtcacgggtccatgtgcttgaattcttgctccttaacaggcaactgcaatgcygcactcaatcttcacaataaacctactgggacatgtatcattcccattttatggatgggggaaaactttaaggctcagagagagatagggcaagggatttgcccacttaaaagcagtaaagagcagtgctaggatttgaacccaggcctttcccttaatcctatttgtttgtcatatttttcaggataacgtcccaccttttgccattttaccttctctagtagtggctactgccaagtgagccagtctgtgtttttcatttgtgtcccatacaagtgtgcagctgctggatatttggatttccagcgatccctggrgattccaggagaagttgcttatggcaattgcagtaacgtccatttatctgatgattttgacccaagagcctggggacagagcaatgaatgtgatggatgagatcaycgctgtcatgtggcttatagtctagttggttaagagaaaataaatgagtaaatcataagaaatgtcaggcagggatagtgttagacagagtattaaaataggagatgtgatagtgactggtggtgatgttacatagtcagggaaggctgaggagttgacatttaggctgaatcctgacttctaagcaggaacaacccatgtgaagatcagggacacatgcatcccaggcagaggcagtagctggggaaggaccctgaggtgggaacaagcttgatgtttttaaagaagagaggcaaggccagtgtggccgggcacagtgggtgatgtggggagctgctctggccaaggcttgtggggaggcaggggccagatcaaagaggatttgcaggccaacataaggaactggcattggcttctaaatggaggggggaatgttaggcagggggatgatttaatctgatcatgtttaaaaataatcactctgggtcctctttggagaaggagttgtagggtgtgttagtccattttcatactgctatgaagaaatacccgagactgggtaatttataaaggaaagaggtttaatggattcacagttccacatggctggggaggtctccacattcatggcggaaggtgaaggagaagcaaagcacgtcttacatggcagcaggcaagacagcatgtgcaggggaactgccctttataaaaccatcagatcttgtaagacttattcactatcataagaacagcacgggaaaaacccacccccatgattcagttacctcccaccaggtccctcccacaacacgtggggattatgggagctacgattcaagwtgagatttgggtggggacatagccaaatcatatcataggggaacaagagtggaagcagggagaccagtagcaggtgttcagtagttcagttagtagatgttgatgtcttagaggaggctggtggtgtagagaagttaaatcatgctgggtttggggaggataatgggctggagatattgaatgaagaagaaagagatgttagatgtttgaactgggcaattcgatgaatgatgatgcctctttctgagatggaagagaccagagaggaacattttatggagtaaggtcaagagtttgtttgaaccatgaaaagtttgagaggttattagatatacaaataaagatgtagtatattggcagttggatatatgtatttggactttgggaaagaagtcagtctagttagatgtggcaaattgatgagatgtagagccacaaaactgattgccatcactttggggatgtgtggaaataaaaaaaaaaaaagaagggaactagaaatcctcaatggagacagaaggagcttgctgagtgatggtgggattccactcctgtggcatcatggaaaccaggtgggagaacatttcaagaatgtgagagtgagtgctcaactctatccatgaccattgcattttggaaggtggagggtgagaggcctgagytgcaagtggagaggtgttctttgacaggaatacagatgcctcattcatagtagtgggaaggaaggcatagtgcaggggagcttatggtggagagttggtacgagtgatggtgggagatgagggagttcttgatggattcttggatttttctcaaagccgggcaagacaaagacaacctacaatggaaggagaaggaggtgaagaggaggtttgaaatagttgcttggtgggaatataaaatatttaacttctattgaaaaaagtatgaaaatttcttaaagaactaaacatagaactaccattggacacagcagttccactactgggaatctacctgaaggaatataaatcattttatcaaaaagacacctgcactcatatgtttatcccagcactattcataatagcagtcatggaatcaacctaagtgtccaccaatggttgactggataagaaaaatgtggcatatatatgccatggaatactatgcagccatgagaaagaatgaaagactgtcctttgcagcaatatagatggagctggaagccattattctaagtaaactaacccagaagcagaaaataaaatatcacatgttctcacttatgactgggaggtaaacgatgtgtacacatggacataaaggtgaagataacagacactgtggactccaaaagggaggaggatgagaggagggtgagggtkgaacaattacctgttgggtacaawgttcaatattttgggtgatgggttcaccaggatcccaagcccaccatgacacgatatacccacgtaacaaacaggcacacggacccttgaatctaaaataaatataatattaaaaaaagaaagagttgcttggggagtggaaaagtgaaaagagtaggaagggagaagtgttggttggactacctctgttgattgacttggagatagaggagcaagtgtgtggaattataaagaaaaggattctgcagctagactgcctgagggcaaatcctgttttttgtcacctaattgttgtgtgaccttggacaggctgcttaatgtccctacaggctccagtttacttgcctgtgaaatggggttaatacaatagtacctaatgcatatgggttttgttaggatttaattagtcactataggtaatacacttagcgtgtgccctggtcacaccacacggcatagaaatgttagytgttactccacgtgggaccaatcggcacagtggcgttttcctctcaccaagtttagttgctgagatgacagcacccaaaagagccccacaggtggattgaactggtattaaggctttgccatgcaaatatgtgtgaaataagagtgagatgcttgcagcttagattttggatgtagcatcgttattggggatgataagaacagtggcctgatcacagaggcacgggtggtggagactgagaggaaracctggtgattggaaatgagcaggtcaaggactgctgggctggargtctgcacagatcattcagragacaatgaagaagccacggtgatgacagggaacagcgcaaaggaggacagtgtgcctggggctcaagttgtcagggactgaggggcagaggacagcgctcaggagctggcagcaaccgggcaggtgaggtggtggtgtagcctgggggcacaagcttcagaggaggaggaaggaaggaaaatggtttgaggatggcagtagtggggaaggaaagtgactgcctccaggctccggaacaacctttccttgagaggcctgcaaaggcccaggagagagagcgcgtctcctgatgatgacctgacaaagttctcttggcagaaagtcccaggggtgtctgcggcagaagggagagagggtgtgtgtctccacatttcagcttcttaccctcagcttttcagattttgaatgcaaggtcatcagtttacstgaggcctgaagtaaagccctacaccttttgctttctggcaatttctcaatgtaattgtgacacacactatttataatacagtcactttcaccttcctctgagagcacatgagtgattcccttcctggaagggttaggaaagtgttttctgcatggtcatgctatgggctgggatatttggaggatgtgcagttccttagaagtggagactggggcttcttctaggtaaaatctcaaatgcaagtcaccttcttcaaaacaacactggcctggattcctagtgctttgagcgtttgaaaaggggtggcttggcccattgattgagcgcagtcctgggaaatgccgggctgtttccctgaagtgttctccaggttcacaatgtccctattgtttcaacrgagcaggacttcctttttctgattgattagatattatgaggcaacacattttaatagtcacactgctcaggagctgtcaggcagagagagggtctctgagcacaaattgcttaaagcctttcatgtttgctttcctgaatatgagtttgtagggctatttcttgctgcttgtttctccgtatctttcttacttgtccagtctgccagtgtacaagcctaccccaaaaatgtccatggaagaaaaaggttgaaaagctctcctctgattatgcctgcttggctagttctggaaattctatttttaaatttggaacttgatctgtagataatagatcaatagataatgaccacatgtgttttatgcttaatgggccttccaatgtcatcttaaagtgggaatttaatatttgtaattgaatattccttggataaatataaaattcagattcatggttgtacctgataagtatacagtgcctaatgcttcttcccgcagtgaatttrtaaagtgtttcttcagccaattcagcattataattcacatgcagaaaacacactgtttggaaactgcctatattatctgcatgctggaagaagaacatggatcccgagtggggaagcacttcactcaggatttggaagcaatgaggctggcatttaaaccatgcccactgcccatcatttcctttgccytttgagatccagcataaccattttctcttcttgaacctccttcttgacactcctccccacccaggttgaattaggaaactggtggtctgtcttcctcatggggctgtgagctccttgaaccaagactcagtgcctgcctgatgtatgagatgcttagtcagtacctgactgcagagtggttgrtggaacatgtattgtcctatgtactgggaggcctctgcttttgtttctcgtaacacagatagcaatgattagtctggatttatcagcaygggaaacctggattgcggacccttgacattgagaagggtagatcccaaagtaagaggcaaatgtggaaaatccacagtgggtcctgggtgagtgcaggacctgtccctcttagaagagtaatgtttggagctcaggataggttttttgaatgtgtgcatgtgtgcatgaatgaatatgttgaatggccataggtacttgaactgcgttttcaccattggaaaataaaatgccctcaacgtacacatataatcgttacagaaaataaagtatagaagcattatcaagaagcaacatatcccctccttcccatcataagtgatgaatcagtaatgccaagtctgtgttagaagatgagcaattctgatcagactcccacctccccaccctgatgtggttagagacagctgatccaccagaaagaggcacggtctgtataagaacatgctaacactaccaaatggcccactgtatgcaacgtgactttttaaagatagtgcggtaatggacttgtttctctcctttgtgtgtgtgttcgtttctggggagrggcgctagagaggaagacgtgtccagcaaattattgcatagggagagggagagagatgccttctttcccgaaagaccaattcgcccctccccactcccattgccctttgccttaacatttctacgattcccaagggtccccagtgtctgtgtcactaaaggcacaagaaatggtcatcttcttgtgtgcaccccgcagaacccatttgttagaggtggggcaatggtgacagtttccatgggataggggcggggtaaagaagtggagagagtcagaagggggcgccactgagaatccgtaggtgtgcactcggtgcttcccagcgtttctgtttgaagttcagggagtcagcacatgtgctggtcctgtgagatgggcagttttgtgggtctcttgtcggcccattcgggtggagatcagcatggaaaccgcaagttctgctaagtggatccttgctcaggagcatctttccagatctcagagataagcttttcaagacacttctggctttagtggyagcttcctctttagccaaamataaatgaggagtggctagagggaaggaaaaaaagaaaaaagcagagggcagggaggagatggaaggtcaaagaggataaaatgcagaggtgaaatgagggtttgcatcaggctcctgtttgagaaaatgtgattctccttctggggccaggcaagacacttagggatggctcaggaagaaaagtgggaggtgagacaaacaaaagaagccttgyagattggagcagagaagagaagaaagaggctgaacagagtgaacacaggtcttgtttccagtggagctttttcttctgcatagggacagttttggggactctgcagctgatttcagggaaggtgattcattgaagaccctgttataccctgagcaagttcatcattctatcctcttactccataacattctctgaggcttgcaattccaaaacaagggcaggagaagaacattttttcactggttgctagttccatgagatgacccacgcattaaatgaatgaatgaatgagtgattccttggtcaaatgagattaggggatgctgcatattcagtctyccttttggagaattacagaacaagttaacatatatcagactctgaaaatcctgctccaaaggaatttttttaacatggcattttttttctaacttagttgactgaggacaggcctgaaatcttgcagatttagaagatgtggcgactcctgggttgaacaatctgtatggctttatagggcagcttttgccatgggccccttctttttctttaagtaatacctattaacatcttgaggagagattcttgcattctgtsggacacagtttaggaaacactagattgagataataatccactcatcatgactatgtaaatggaactactttcacagccttagtagggcaaaaagtctgagtggggtcgatttgtgccagagcactaatccatcaatcctgcctggaacccgtaaaatccttttgcaagatggtttcctgagataaggatgcagcttgcggccagagagggtgagatcattagatttgcatgagagtcccatggcggccacagtttccttagctctgtactttaaagccactgcttcttctttgatctaagtcaattttggtattggcaggtggtggttgtggaaatacttcatggcccttttaaatgtttaaaggcccttgagatgcagtgctgactataatcagggattcttgagtgaaagcatgtgtcttaggactggaaagggactraaaagatcttctggacctctctctctctctctctctctctctctctctgcgcttggctaatttttatatttttagtagagacggggtttcgtcatgctggccagactggcctcgaactcctggcctcaagtgatccactcaccttggcctcctaaagtgctgggattacagtgtgagccaccgcgcccggttctttttctgtttctaagtagttaataataatattttataaatcttcaatttgtttttgttttagattctagaacagcagttcccaaattttgctgcacagagaaattgtctgggacacttttaattccagtgcctgtactgcatcccattccaatcaaatcacgatgttgggagtgggcrcctacatttgtatttttccaagatccctagtaattccaatgtgctgcaaagtttggggaccactgggtttagaagcattttaatttccagacattttttttccaaatcaataggtcttttattgcatcttttaaatatcacaagtaggtcttaggaatcatccggcatcttgtttctgtagctggacatctcttagatcttattcatcggcctgctgaacagttcctttttcagagacatatataccatccaaaaatttcctgattgccttgtttttaactgttgtggcttgctgaatcaaagtcgctgaatttgaaacaagctcaatgttgtttccttcatctttctgggtttgagatactgaacargcaacacttggtctcatccaaaccctgtggatgtatttttcacccaagaaattttggatttcgacaggagacccattctcctggataacaacattgatggggaagtgagcatacacagacctcaacttgtagtggaagcccagtgtgacacccttgatcatgttctgtacatgagtaaaatagtccaaacggtagcagttcctttccgttaccccaccmtwtgtcaacccggagccttttttgttttctgtccgagaagactgggttctacactgatgtgattgaagtccctctggggcccttcacgataactgtgtgtcccttcagagtaatgttgacattttctagaatgttagcagtctgattgctgagaacggtcttcattctcgcagcagacatggcaaagaaagcaattaccagacatttttaaaacaactgtgggctaggtgttatgattcacacctataatcccggcactttgggacgcagaggtgggaggatcgcttgggcccaggaacttgagatcaggcaaaatagcgagacccctgtctctactaaaaaaaaaaaaaaaaaaaattatccagctatggtggtgtgtgcctgtagtcccagctacccaggaggtgaaggcaggaggattgcttgagcccaggagttcaaggctgcggtgagctacgatcgtgccactacactccagcctgagtgacagagtgaggccctgtctctaaaaaaaaaaaaaagaaagaaaaaaagaaattacagaactgtgtcttctgggacaggagttcatcctcttcctcattttgtaagtgacaactgaggtcctaagaagttaaggaaggtgatcaaggttgattgtttcacgttccaggtaattgaatgatttaggccaaacctagtctgtcagactagattctgaaaatggtgggatgagagattgagcgggggagtggggagctggcyctgaaagcccagtrgtctgaacttgggctttgtgtctgtaggaaaaacaagaaagccgcttcaacgctctgcctcctgcccctcccgtcaatgctgtttctgtctgtagactgctggtttgcatttcatttacagggacacaaaatggaacctttgtgctggaattgaaggaaattataaaagcccacagcttctcttcagacttaatgtcaactatttgtctcctgttattttcaaacaaacaagtcctccccatgagttttgaggcagtctcaaacactccctcccttggttctttttatcrtttcctagttcctgcttcagcaggtacgagaaaaacccaccattcgtagacttgtcctatcagccacayggcacagctgtaggggtcaggtgagtcctggccagaggctctgagcaggatggtgggtcacacagatgcacacaagtctggaaacaaatgtttgtaagactgggctttcctgaggcktcagggttcatcaactagaaacttagaagcaatgatgaaaggaatgactcccaatccctccaaatactgccagctgaaacatatttccaccatctggcatcctatttacagatgagaagatgaagaaaaatttctttctttyttttttttttttttcttggagacggagtctcactcctttgcccaggctggagtgcagtggcacgatcccggttcactgcaacctccgcctcctgggttcaagtgactcttctgcctcagcctcctgagcagctgggattacaggcatgcatcaccacgcccagctaattttgtatatttagtagagacagggtttcaccatgttagccaggctgatctcgaactcccaacctcaggtgatccgcccgtcgtggtctcccaaagtgctgggattacaggcatgagctaccgcgcccagccaagaaatttctaacaatgctaaaatatggaagaagtaaagagttctattttcactagaggtggacaggcccaagttgggtggccacttgcgtgtcatgtgctgtgttatgggggacttggaatgggtgactttagattctgaagccttatggtaggtcttagaaggagaactaagatgctttaccttacaattaaaaaaaaatgatgacatgaaactttctctacgttagatgactatttgagcattatttcttccctagcctcagaataatgacattgtgaattcttctagaactgcactgctgtggaagattggcactgatacccacagcagggactctgtaagatctgtctctaaataggtttgacaaaaagagcatttttttgggagtatgaatgaatctccgggatgcyatcctttgttagatgtgttataataaaatgctggaatgtgtgaataatttactctataaaaatagtggaatttaaagttgaccctgtcaatgacacactcactaccattccacaatagttccttgattagggaaaaagggggatgaaaaacctgggaactgcttatctcggaggagtgttccatgcagaaatgagtcagccctcacgtacgtggcagctgataaaaaaggcttaacacccactactcagtctaaaccagggctacgcagagtatgaaccacaggccagcaacatcagtatcatttaggagttacttagagatgcagattctcaggtcctcaaaacagacctactgaatcagaatctctaaggtgggacctgggtgtctgtggttgcacaaggtctccaggtgattctagtacttggtaaaatttgagaagcactgccttcgacccatggttctcaaagtgtgatcgccagaccaaaagcaccagcatcatctgggagctgttcagaattatctgagactctttctcaatgggcttttgcaggtgatagtagaaatgcttcatggcacttttaagtgcttaaaggccaaagagatggcaaaatcgaatatagaaatgtaatgaactcttaggcatacgcatgtgtcttagagctggaaaggaaccaaaaagatctcctggactcatttcttgtctctaggtagttaataatataaccttacaaatctccagtagtttttttttctttcccccttttggcttaaaacagcggttgctaaatcagcagttctggaggtgggctcagcaatctgggctttaacaagctctccaggtggatgcagcctcaagtttgagaaccactacactatggtttccatcagatttcccccctgcatggttgcatagagcattagacttccatgtttcagcctgggcttggggccctggtagctgactcctggccactgcccatctctgctaccttctgtcattccaggctgagaagtgcaggttggatgtcgtgcttgtagtaatgtgaccactcttggactctggtagaggagatagaaaggttttgaaacggggacttttttttttcacttcccctctgtggaccagcctccacacagcccccagcctacccagcctctctcctttaaagttaggagactggaaagcagaacacccagagacyatcatgacagtctacagctcttgagcaaggccatgcctgcaggcctttgyggggctcacttggcctgtctccagctccacaaaaarcatgtcctcttctcagggggtggmgtcatcttagcctcatgcagtgaccatataggacttagaaccacccccacccagggtggctactaattgctttccagtttgaggaggctctggctaacaagtgtattttcccataggaatctgaacctgtgatgttaagawatcagtaaatattaaaaagaagatggatgcaagaaggatgaagaaagaagaaggtagggttgggagtgttaccagtggaagctcctgcactggggccgtctagggttggaggattcgcagtgggaagaggccactgggcggccactcttttttttttttaatatatatttttattatacttaaagttctagggtacatgtgcacaacgtgcaggtttgttacatatgtatacatgtgacatgttggtgtgctgcacccattaactcatcatttacattaggtatatctcctaatgctatccctcccccctctccccaccacaaacaggccccagtgtgtgatgttccccttcctgtgtccaagtgttctcattgttcaattcccacctaggagtgagaacataacggtgtttggttttttgtccttgtgatagtttgctgaggatgatggtttccagcttcatccatgtccctacaaaggacatgaactcatcattttttatggctgcatagtattccatggtgtgtatgtgccacattttcttaatccagtctatcattgttggacatttgggttggttccaagtctttgctattgtgaatagtgcgggcagccactcttgttatggtggcagagaacacagcatgttcaggagatggaacggggttgctgctcattttgctccaggcgtttgartttggactctgccagatccatgcaaatgccctatcccacaagatcttacatttgcttggaggaggcaagggtgaacagtctgtgcttggaggccttgctgggaagtttctagtgagaggtaatgtcacacatgacttttacagggagatggaatccttctacagcacattctttactgacagatctgtccccagacaagctccagctcctggacagccacgaggcagcrtgggaataactatacgacctacacttcacttgattatccccatttayggcatttttttttttaactgcattcaatttggagatggcaagatgactcttttaactctcctccctgcaaaactccagttgaaatgaccaaagaaatatagaattagggaaagaatgcaccacataagaacacagaggaaggtagcagctgcaggagagaaattgaatcatttctgctaaatagagtgacgttgctaatgaaagatgggaaggactgacatgcccatgattttggatctgtaaaggaacaggctgcttgataaactaatgcgttgaatttctagcaacacccacccccctyggcaaacaccccaaacttctggccagcaaccatagtgaaaagctttggtttttttgagccttgttaagcttgagttcaaacccaccacttgttagtcgtgcaagctagtcagcctcagtttcgtcctctattaaatgggagaatacctaccttataaggtgtaactagaagtaaatgaaagagtttaggctgggagacatagccgaargttttagtcactgtgctaaaagcttaacataagttatctttaatccacaagaaagttccatgaactttgtcttattctaatcaccattttacagattaagcacttgaagtttagcaaggttaagaaacttgttcaaggttcacagctatgaagagggtagagtaggaatttggagcagacaagtacagaacccatgctttcaagcactaagtgtactgttccaagcccttgaaatatattactttctttagttctcaggccttagactaaccatttttattggtgaaaaaatagaagttcaggggtaaaacaatttgaggttatgcaaatatttaaaatcaatcagatctgtttgactctgtctcttgctccttaccattctttcgttgtttaattgatagactttctaggatgtcgttctgttcccccactttgaattggattttattcctactgaatacaaggggtgcaaaatagggaggacttcaaaatctggttccaatgccttcccattttttgaagaatcaagctattgcatgtgactgcctctaaatggcctgcatttctctttgttggtaggactcacagaaaacactggacttccccggaagctacttgaaaaacatgacccctggccggcctatgtcacctatacctctcagacagtgaaaagactcattgagaaaagcaaaactagagaactggaatgcatgcgtgccctcgaggaaagaccctgggcatcaaggcagaataaaccttccagcrtcattcagccgaaaaggaggaagtcttccaagtcttctggcaaagctgtgttcagggacacgctgtcagaatccacgttatcaatgtggggygcttattcggtattggccatggctcctaccatgatcccagaacccacacacttacakgyggattccagagactstccarctgaaaactataacaagatcatctttgcccgcaagcctatgatgaggatgctccctacagttcgctactgaccaacaaggagaaacatgcaaatgttttagccaggggtccctgcagccattccccaagaacgtacarmagttaagctccatttaccactcacttgacagtgtcctttaaatctgaacttgctcttgctcatgcggagcttggctaagagaaaccagatcagaatgcaagctgtaggtgggtgggtgagtgtgtcccctcccacactgctctctggtgggtttgggcagtccctggctctagtctctgctgcagattctcaggaccaaaatgtgggtgatttgtctgggtccaggcaggagacagaaatcacacaagctcttttattagagataatataaagaatgattaaccaggtgacagtaaagggcaggaagggaatacaaaggtatccatggaggtagcaccacaggaagcaggcatcacacttgaggcttgggaacaaggggaagatgctggactcattgaaaggtggttgcttggagaagggacatggggctgaatctcagacttctgaggtgggggagtggggatgccactcaatgcagctggtatctctgagctctgaggagagtcctgtggggatggtgccccctcctctgaataggggagatgttttgttggtgtctctgaggggacccccatgaggctgcttttgtgagtgttggaaaaaccaaaaactgcattgaaatgtttctgggaggagttgccactgcctgggtgaagaaaaagcactgctagggttagcaacctgtctggcagggacaggaagctgatagaaagtgaacaggaagcaaacaggaagtgagcaaggggccacttcctacttcctcctttagcctagcagattccttctagctccccctgggggctgagcctatcagggcacaaagccagaatgtggtttgtagaatcccagccccagcatctccaagcataggatggattttgaagccaagagggaattagctctcggccgggttctgagtgatcccatccagctgctcctggacctggtattgagaggtttttcccttggagggcaaacaaagtggcagtggggaccagggtgtcccctgctgagaaatggagagctcttttcccctgtacttctctggggtttgccttgtggaaccaagtgcttgggggaggagctcctggcaggactccagctgttatttgtcagaggacagctaggattggttcacccttgctctgagttggccccaaagcgagctatgctgaactcttctccatctccaagcagacaacctttgtctttacatgcaagagggatccaattatgacaggctgacccagctggtttcatgtttggggtttatctactgagtaaggctgaccttacctgagtttctgtatgtgtatttgcaagacagttaatactaatccatcatccctcacagagatgtagaggatgagatgtagtaacttatagcagtgtcatttggaaaagttgaatttgccctacaaggcatgttctccattcaagggtcttgtgtaaacgtttgcagacacaggtgcagctttggagaactcacctctggctcttgtgcttttatgttgggacagctgcctaaattaggagctctagacctgttattggttcccaactgttggccagaatgaattcttcgaaaaatataggtggtttccagggaatttgaatgattgtattttgtgtccatggaacgtttatagacatggaggcaggcaataaattcctccaataatttttttatctcttttgttcttttatgggtgtttctttctaggttatatttgggaaagtatggattacagagactcattgagtgctagagattattggaatttggggttatttcttttaataccttcaagggcagagtggtatggtaacttactgaaggttgcacagttggttttttaaaatttctaagcatttaatagtttttagaaaagtatgcactctataaattaaaataatttttctgtgtgtgggttttttttttttttttttttttttttgagacacagtcttgctctgtcacccaggcaggagggcaatggcacaacctctgctcattgcaacctccactgccaaggttcaagaattcttctgcctcagcctcctgagtagctgggattacaggcacctgccaccaggcctggctaatttttgtgtttttagtagagatggggtttccccatgttggtcaggctggtcttgaactcctgacctcaggtgatctgcccgccttggcctctcaaagtgttggggtttacaggcatgagccaccgcacctggcaaaataatttttctatagatatcattgtttaaattaatttaattctcagcctattataacaacacaagcatgagcctaggatatcattaacatctgatgttgtggtagaaattgtctgtgttccgtgactgtggtccagaagcattacctcctaaggcaatttaacaaagaaaaagagtctaattcctttgaatggggaactctgcttaagcccgagctgggactcgcaggtctggctaacaccgagacttaaccagccatgactatatgaattccgccagagaagaagcagctggatccagtaatgaagccttggtcactgggggaggaggctgatcctgggggaggaggatgacctgccatgtctgatgctcagatttgtcccttggttcagctcttcctgagtgccatgtgcgtggcgatcaatgattcaaactctcaaacagctctttcactaaaaatcctggaaggccctggggtacacataaaaagtggggcgagatcttgacttcacaatgcatcaacaagaaggtcccaccgctctgggtatggacaagaaacagccaggtctggtagacccaatgggtggttggcaggaccagctttgctcatgaggaaccaagagacatccttggcactcccagaaatagacatggagcccttgctaaggcctgaagttcatcacgagcagccagggcatggagtggaatgcaggttattcctaatgtaacctcatcggtctgtccaagctggagaggcccggggtatctcaggttacactaaacatatttaacttacatctctcagagggacctggctttctctaatgttccacagcccgcagcctctttttatttatctcctctgcatatggaattgtctgcttggcaggagagctgtttcaattagtctccctgacgtagtaggttcatgaaacatcagaatatgtattttgttagtccgtctgtgttgctctgtaactaaggccccgtctgacacacattgagcagctgctttgagcagattctttggctccttgtacagagtatggtatttacccatttgcaaattccacggttggcgtttaaacagttgaagtttaacctcggcaacatgactgagcctgctggtcattttcatgttggcaggggctattaggacatcaaatagttccacattctgcagcctttttagcagtggcctgggagcatgtcttaaaggagattagtctgcatgacagataagaggctgcaggaggctgggcacggtggctcacacctgtaatcccagcattttgggaggctgagatggatgaatcacctgaggtgaggagtttgacaccagcctggccaacatggtgaaacaccgtctctactaaaatacagaaaaaattagccaggcatggtgttgggtgcctgtaatcccagctactcagcaggctgaggcaggagaatcacttgaacccgggaggtggaggttgcagtgagccaagatcgcgccattgcactctagagcctgggcaacaagaccgaaactgtgtcaaaaaaaaaaaaaaaaaaaaaaaagctgcaggaaagtgttcaaggaggtaactgcataaacaaaggcgcagtgcagatgtgggcaagccagatatttgggggtggcccaggagccctctaactggaatagaggtcgggtgagacctaaacaaggagcagttatcgagtttatcaacagcaagtgtaagagccactttggaatgaggccagagcagtatgaccagtcccttagtctttttttttttttttttttttaggacagggaaaacaagacgggcaccctgaggtagggattttgatccttgggtcctaaagggggtcttcagaggcagtggaggagtcacatggagcagcgcagctctcggtggtggaatcccaaccagggactgacgatgcatccaggaagatgagaatctaggagtaggaatgccggccctgcagcctcactccatgtggacagcggttgtgaaaagatggttaaagtgctttgcgagctgggtccaagcagatgtacacatctggacaatgtggctcttttcagccttgattgagtcattcattcttggaggctttttggaatccccacacttttagaccaaagggcacattttcagagcccacacattatcagtgccagataagagtagacagattgagaaaccaggggaggtagagccagggaaggggagtaaacacaacctgaggtttattgtgatctgatgttgtcagagcctgggctgaagctaagggctgggcttatgtttgtcaagcaatcaggaaaacctctgtcttcttctttcactacacatccccacatcaccttccctctgtctctcaccaggaacccaaggcttcagccagctactgtggtgcttgcaaaccccacaacagtgtcctagatctgtaaggcatggctaggctgggcctgtccccagctctgagcatgtgtgtgggaacatgggggcatgctgggcagggccagatggagatgaaggaatacctcatgttaggtggggcttgaagccaccccatattctctgccttgagcctgacaattatctgatttctttatggggcaggccagaatatacaggtgcccactcttgttagcacactgctcagggcagcagatggcatggaaaagaccttggacttggtgctgagaccttgtcttttctcccaggccctatattccagggccaatggaaattccaaccccatctatggcctttctaggaagcttctattgctgggggcccagcaaagctcatggtatcaattcacttcctttctagattcaattggtcagccacctggagcattccattatttttggtagacaaagggatgtgagaggccacaggatttcaggcaagttaaaaacctgacccttggggttgtttctgtgtgtctgccaatggggagggtttttatggagagcaaagttagttccagaagttctaacttgtggaaggaagaaaggtggccttcaatgtgccaaggtctcttgctcacatttttgcattttggagcttgtttaagctcccataggcttaggcctatgctccctagttgattagataattatggaaggaggagagccctttcgagattggaacttgggcctctcaattccaagtgcaggcagcttcccctaaattcagatctcctcttcattggtgttacccatgacaaccctgctggtgttctcaagtagagcagatgtgtttgtccagtagctgctgaccccagtttcagccatggctcctctactgtgaagcagccccgttggagacccctcttcatgtggccagtttaccgtgtgtccctggaccagcagaggtaggatggtgaggctggaggtcccatgagacctgggtgaggtcagctgtgtttgccgttatatttccagagccctgcaacggcctggcacagagtcggtgctcaagtatttattgagcaagtgatttgtgagaacaaggcttagcacccaatctaaagtgcactgggaagaggtggtttctttcatcatatccacaggctggaaaaaccacttggctttttgtaaagtttgaagcactgagtaggcagctctgctatgaaggttatgaaggttccgtctagacccaagagtatgatttgagtgaactcttcagtaagttcctttcatgtacccttccttacgggatattagagagagagaagggacgggaggcacaagttcaaaaaacttaacatatagtgattctattcttttaaatgaccaatccatacctatctgatggaattccaagtagatttccttttctttagccttcatcagaagggacgtaatttcccagacccagcttgctccttgttcccatgtttgcagcatgccaacaggcatccaacaaatatgcacccagtgctgcctgtgccagggccccagccgtggacacaggagacgcaatcaagcttacgttctggcagtggagcattagacaagcgcatgatcgcattgcagtggtgatgcgagttacgaagtgcagggctctgtgagtgtatttgctttaggctcatgacgtgttgttctctcagtctcatgaaagagggattatggaaagaggcaggattagtatcaggacagctgctcataaaaaggagtgaggtcatggcgaatttttggccaagttgaatgtgagtggctgcgtaggtttttaaaactttgcaaagctgctttcgggttatattcagcccctacatccaggtctgtttctgtagcgccatggagcgacccctggttcagtcaggctttaggttagggcatctctgtctgtagccctgtatagtgacagcacagaggaagtgtcaaacatgtgtacactgtttgttccaggactcttattccctgactgcctctctatcctagagggctgagctgggcagctacaaaggagacctcaagccttcctcaatgtcctctccagacctggggcaggtgccaggtctaagccttcagcatctggctcctggcctgctggaccccacctcacatttctagttctccagagcaaaaggactagctctgcctctcatttcttgactgtggcagacagcccctgctccctactggcgtggccagatttccgggggcctctctgtagactgcggtgtggggtgcatttcaaccgtgaccttgccctcgttctatctccttccaacctctttggttatagccatagtactcctcactctgtcttttactcttctttccttcctttcctttcttcaactttctttcttcccattgcctccctccctcctttcccttcttctctaccttttgagcttcattgattatcctttaaattaatcaaatttaaattaatcaaaattaaatgatgcttgttgcaagtaacttaggttttcttgaagtgtaattgacaagtgacgctgaccctgtcaaactttagggggagcatatgttctttaatactcaggtattaggagtaggagctccagcctgaggacaaaggggagtttccgcctactttctgggaagctctaagaaatgcttgcgtattccacaaaaccaccctaatggccactggtcccctccggccacccatctcctccctgaagcagctgctgcaggatcccaggccactgctgttctgcccttccccaccatagctattcggtccccctgcagcttcccaaagcacagctctgctaggttcgccacagccaaccatgtctgctgtgacggattggggatatcagaagctaaacagagtaaattacaattgctaccataagtggctactctggatggggtggtggatggcgggcggagggtggtggcctaaatcacaacctaaatgtgatttctgttccctggtgagggccggctcacccttcaacatg

SEQ ID NO: 96817 - DNA, 17195 bp, Homo sapiens
  misc_feature (1)...(17195): n = A,T,C or G
tttttactttctattttatcttttaaaaggtggggtctcactgtgttgcccaggctagtctaaaactcctgggctcaagtgatccttccgcctcagcctcccaaagtgctaggattacaggcgtgagccaccgtacctagccctattttattttatttttttgtgcgtgagacagggtctcgctctgtcatgcaggctggagtgcagtggtgtgatcacagctcactgtagctttgacttcctggctcaagcaatctctgggttcaagtgattctcctgcctcagccacctgagtagctgggactacaagtgtgcaccaccacatcaggctaattttttttttttttttttttttttggtagagacggactctcactatgttgcttaggctggtctcgaattcctgggctcaagtgatccttccaccttggcctcctgaagagattacagacgtgagccaccacccctggcttattttattttatttcatttcatttcattttattatttaagacagtcttactccgtcgcccacactggagtgcagtggcgcgatctcggctcactgcaacctctgcctcccgggttgaagcaattttcctgcctcagcctccccagtagctgggattactggcacgcaccaccatgcccggctaatttttgtatttttagtagagatggggtttcaccatgttggccaggctcatctcgaactcctgacctcgtgatctgcctatcttggcctcccaaagtgttgggattacaggcgttagccattgcacctggcctgttttattttattaatatacatttgaaatattatcctgacaagagctcaactgcaaaggggtgtgaggcacagaaaagattaagagccctgctttaggaaatgctgttcacggtcagtgttggcagtctggccgggccctgtcatgagtgaccattctggagagccatctacttcacaggcagaagctctggggccacacagactcgggtttgaagctcaactctgttatttattaactgtgcatcttgggggaagtcatttaatctctcagaggctttttcctcctctaaaaaaggaagttaggctgggtgccgtggctcacacctatcatcccagcactttgggaagcgaacaggggcacatcacttgaggccaggagttcaagaccagcctggccaacatggcgaaccctgtctctattacaaatgcaaaaaaattagccaggcgtggtggcaggcacctgtagtcccagctactagggaggctgaggcagatgaatcgcttgaacccgggaggcagaggttgcagtgagccaagatcacaccactgcactccagcctgggcgacagagtgagactctgtctcaaaataataataattttttttaattaaaaaaatgaagataatgagaccatcctctgaatgggctattgtgagggatgagagacgatgtgtggcagtgcctggtgcgtggatggtggtcagagtgagctgtctggctggggcacaagggtcctctctgatcccgttcatggcagacaggatggcgttctactgccctttgagcattttgcaggcccagatgagaagccagcagtgatgaagggagacctctatctttggagggcccatttaacccccacaggcagccttctgactgagcgcgctgcccacactgctcctgaccttgcagacagacatctggttggtggtgagggtgcctgtcttgtcggaacagatgacagaggtgcagcccagggtctctacggagggcaagcttcttacaatggcattcttctttgccatccgacgggtacccagggccaggcaggtggtgatgactgcaggaagacctgtggggagggagggagggtgtgagggaacctgcaaggggagggtgtgagggaacctgcaaggggctaaatagtagcccccagctgggcacgttggtgcacacctataatcctagcactttgggaggctgaggcgggaggatcacttgaggccaggagtttgagaccagcctggaaaacacagtgagactcctctgaaaatatttaaaaattagctgggtgtggtggtgattgcctgtggtaccagttacccaggaggctgggacaagaggattgtttgaatccaggagttcgagattacagtgagttatgattgtgctaccacactccagcctgggcaacaagagtgagactctgtctctattaaacaaacaaacaataatggtccgcaaagataccagatcctaatccctggagcctgtaaatgttaccttacttggaaaaggggtctttgggccaggcgtggtggctcacacctgtaaccccagcactttgggaggccgaggcgggtggattgcttgagcccaggagttcgagaccagcctggccaacatggtgaaaccccatctctactgaaaacacaaaaattagccaggcatggtggcgtgcacctgtaatcccagctacttgggaggcagaggcagaagaatcacttgaacccaggaggcagaggttgcactgagcaaggccgggtgcggtggctcacgcctgtaatcccagcactttgggaggccaaggcgggcagatcaggaggtcaggagatcgagaccatcctggctaacacggtgaaaccccgtatctactaaaaatataaaaaaattagccaggcatggcggcgtgcacctgtagtcccagctgctagggaggctgaggcaggagaatggcgtgaacccgcgaggcggagcttgcagtgagccgagatcacgccactgcactccagcctgggtgacagagcaagactccatctcaaaaaacaaaaaagaaaaaaagaaaagaaaagaaaagaaaaggggtctttgcagatgggattagcaaatgggaggagaaaagaaaggctttcataccttcggggatggcagccacagccaaggccacggcaatcttaaagtagtagatggccccgcggaaccaggagcccccatggacggggtcgttgaagtggccaatgttgataagccagacagccacacagatgagggagatgaccttggagagctgctccccaaactcatccagcttctgctgcaagggggtcttgtcctgttctgtggcagccatttggtctcggatcttcccaatctcggtgcccacaccagtggtggccacgatgcccaaggccttgccggctgcaatgttggtgccctgggaagggaaagaggaggcagggaatcaggcaagaggtgaccctcatgccgcatctccccacgccatctcttctcacacgccatgtttctctccaacccgggcacctggcttgactgagtgtgtgatggctggtcccggattgctcaccgagaaaagcatgttcttcttgtcctggttgacagctcgggggtcaggaacgggctccgtgtgtttgatgacagatacagactcgcctgtggagaaggggccaaggggttttcggatgacatcatgtccttctcccaggcttcccgtgcctaactctctccctgctcagcaggacagctcctggtaaggaccaagtagccatcctgggggatgtctggactctggaagaagccactgaaggcagctaggaagtccattgctcctttttttttttttttttttgagacagagttgcagtcttgtcacccaggctagagtgcagtgtcaagatctcagctcactgcaacctcccgggttcaggcaatactcctgcctcagcctcccaagtagctgggattacaggcacatgctgtcacacctggctaattttttttttttttttgtatttttagtagagacggggtctcaccatgttggccaggctggtctcgaactcctgacctcaagtgatccgcccacctcagcctcccaaagtgctgggattacaggccaccgtgcccagccagaagtccacggctcttaaaaagacctcgacccaagccccagcttgaccactaacaagctgtgtttgatcacctaacttccatgtgctcctctgtaaaatggggacaaggacatgtacactgcaaaacaatgtcttgggtgaaaatcaaataagtggacatatttggagccacacttttaactgtcaagcatgtttctgggaggaagggggacctacacttacgaccatgcctccctcaccctaagagcaggggctcagcagcaagcctgggccagcctagcccttgccccctgggaccatggggaatgttttctgcctcttcttcgcttctccctgccagtgcggaaacagaagcagctatggtggttttacagagacagggtcttgctctgttgcccaggctggaacgcagtggtgtgatcatagctcattgcagcctcaaactcttgggttcaagtgatcctcccacctcagcctcccaaacaactgggactacaggtgtgcagtacaatgcccagctaatttttaaaaaaattttatagagatggggtcttgctctgttgtccatgctggactgccgtggtaatcatagctcactgtggcctcaagcttctgggcttaggcaatcctcccacctcagcctcccaagtagctgggactacaggtgcacaccaccacacccagctagttaaaaaaattttttttttatagagatggggtctcgctgtgttgccgaggctggtctgaaactcctgacctcaagtaattctcctgcctcagcctcccaaagcactgggattacaggtatgagccaccacgcccagcctagcagccatggttttcagtgtatctgaaccccctatcttgtcctagaatctcatggctcctccctggaggatttttgaggaggctgaaggagacaggacagttctcgaggtgtctgtggccctatgtccatgtggaaggggtgggctggtggctatctagagagtaggcaacaacatccagccttctcccactacccgtcccgtttcaggcttgggacagaatggaaacgtcaagcaggtcaggtgcagtgggtggctcacacctgtaatcccagcactttgggaggctgaggtgggtggatcacgaggtcaggagttcaagaccagcctggccaagacggtaaaaccctgtctctactaaaaatacaaaaattagccgggtgtgatggtgggcgtctgtaatcccagctactctggaggctgaagcagggaattgcttgaagccaggaggcagaggttgcagtgagctgaaatcgcgccactgcattccagcctgggtgacagagcaagactccatctcaaaaaaaaaagaaaatgtcaagcagtgctgccactgccacagccactactagcgagccagggggaggccccagtgctgggttttgttttgttttgtctttttttttttttttgagatggggtcttgctcttgttgcccatgctggagtgcagtgacatgatcttggctcactgcagcctcagcctcctgggttcatgcagttctactgtatcagcctcctgagtagctgggactacaggtgcctgccaccacgcctggctaatttttgtgttttttgtattttttggtagagatggggtttcaccatgttggccaggctggtctctaactcctgacctcaggtgatccacccacctcggcctcccaaagtgctgggattacaggcatgagccacctcgcacagccttttgtttttattttgacagagacagggtggcccaggatggagtgcagtggtgtgatcacagctcactgctgccttgacctcctgtacccaggcgatcctcctgcctcagcatcctgagtagtcaggactacaggcactcaacaacatgctcagctagtttttaaaatttttttgtagagacagggtctctttatgttgctcagacagtgagggttctctgtctttccactcacctcccccttgttgcctcttcctccccacgtcccacccccatgcatcttcccacccaggccagcagacctgtcaggatggactggtcaacccgcagcgtggtggatttgatggcgaggattcggatgtctgcagggactttgtcccccactgtggagagagtagggaagagggaggtcacttgggaatggaattttcttccttccaaagaaaaacccaatctgtgtctgactcgttctcctcatccatccttcaggtctcagggaggctcccagggcttgcatcaggcccttggcttgagctcctgaagctggcaacccctcatcgtgacacccatcccttctgcccccgtgtccacggcgagatggagtctcgctstgttgctyaggctggtcttgaactcccacatctcttcccactggctgtgagccctgagaagggatgggcaggtgtactgctcagcacatagtacatgctcaataaatgcccactgaatgactggaggggaaattagggacagtccagctgtaggacaagaagctataattgagattgggagacaggagtgagaaaggcaaggaggaaaggcaaggaaagaactcagggaaaacagggtgcattagagagaaggggtgtcggggtgagagaatgaagtggacagccagggaaggcaaggagaaacgggaaaatatggaaattgagaaaatcgagggcaaccaagaggaacagtggagggcaaggcaggagaggagtgagcggaaggtatgagtgggcaggactcaaggcagcggggggcacagggtggtcatggagaggaccacatatcgggaacctgacagccyggtctgagcatctcagggaggcagggaggcggggagccagggagagtgagctggggacatggacaagacaggatgggatgggacaggagagaagcgggggttgggcaggaaacaggtgtggaagagtggggcgggcagcacaggctggagagtgaatgggtggaggtgaggccagggagacgcacaggtgggctggcaggccatggaaaccaccttgtcggggggctggagaggtggatgcccagccagactcagagaccttaggaggaggctaagaatctcccagggccgctgcctaattccgcactggtcccacggatggtactggggacagggtccaatcgctttcctttccctctgtttctaaggatccctcctgtgccagaggaaatggaccgaggagggaggagggaggtcgggatagagtcgggcgggacaccctgtcacccaagcccgcgtgatatttatagacattcatggcgctgactccatgctgtcacggcggcaaggctgccctgtgatggggcgctggggtcttcagcctgccctcactccctctgcccaagctccctggggtggtgattcggatgtctgctacagggaaggaggcctctgaagagccattccccctggcaggggcctggagcttcgggaaggcctgctcagggcaaacataaaaaccgctgaagggggcagaatcccagtaatcttagccacccggcccccacccctccctggccaggcattaagtgtcccttgccgcgggcggggccctccttgagctccctcctccccggtcgcgtgctctgtgccaggcctgagtttcccttacatggtcgggggctcgagccttcggcctccctcctcccttctgccctcgctccttcccctttgagaggcctcaagggcacagagaggtcaagactgaaagctgaccaagcttggggtgggtggaaggagggggaagccaggcccgggagggggtggagacggggccattggcagggaccgggttccacctgttgcctgcgagtgcaagtgcagggtgagaggatggggagcagggggtctgcctgcagcctcagggacaggactggctgttcctgctgagactccgctggggagggggggatgtggccggagtggcctgggatgaccttctgaggagtcggaaagagaagcagactccgtcatcctcctggacacctggatccgagcctgaccagcccccggcatctcctaggcctcagccccaaggcctcccatcctggaccagccgtccctgtcactcaccagccacctccacgatgtccccagggacgatgtcccgagccttgatcctttgcactgacttgcggtcagcccggtagaccttccccatctctggctcatactccttcagggcctcgatggcgttctctgcgttccgctcctgaggagacagggtggaggaggcagggttatacacaggaggcagagttatggagttgtggctcctggcacgggggaggcaacaaaaccccacacaggcaggggtgtgtgtatgttgaggaaactgtcacctacaggtgaaaacaggtgagagggttttggggagggaacaaagaagaatcaaagaaaatcaggccgggcatggtgactcacgcctgtaatcccagcactctgggaggctgaggcaggcggatcacttgaagtcaggagttcgagaccagcctggacaacatggtgaaaccccgtccgtttttacgaaaagtacaaaaaaaaaaaaaaaaaaaaaaaaaagccgggcgtagtagcacgcgcctgtaatcccannnnnnnnnnnnnnnnnnnnnnnnnnnnnnnnnnnnnnnnnnnnnnnnnnnnnnnnnnnnnnnnnnnnnnnnnnnnnnnnnnnnnnnnnnnnnnnnnnnnnnnnnnnnnnnnnnnnnnnnnnnnnnnnnnnnnnnnnnnnnnnnnnnnnnnnnnnnnnnnnnnnnnnnnnnnnnnnnnnnnnnnnnnnnnnnnnnnnnnnnnnnnnnnnnnnnnnnnnnnnnnnnnnnnnnnnnnnnnnnnnnnnnnnnnnnnnnnnnnnnnnnnnnnnnnnnnnnnnnnnnnnnnnnnnnnnnnnnnnnnnnnnnnnnnnnnnnnnnnnnnnnnnnnnnnnnnnnnnnnnnnnnnnnnnnnnnnnnnnnnnnnnnnnnnattctcctgcctcagcctcctgagtagctggggattacaggcacctgccaccatgcccagctaatttttttgtatttttagtagagatggggttttaccatgttggccaggctactcttgaactcctgacctcaactgatccacccgcctcggcctcccaaagtatgaaagtggctatttctatcctcagtgttcagaaaccagtgagcaccaaaaaatggcttatagcctgacatttcttaaaaccaaagcaaggtagcatttgggttttcactttggaaatgacctaaaaacaaaacaaaacaaaacaaaccaggaagcagaggacaggacatgtagggggtggtcaggtcagtggaagaaggaaatcaagctagcgtctattgaattcctactgtgtgccaggaacatgcatcatcttagtcgatttcacactggattgctagccccattttatggatgaagaaactgaggctcagagggatgaaggaacttgctcagggtcacatagccaggaagtgacagtgggtcacagtctcccacctcttccccacactccatcccattccagaccaggggataggaccagaggaagaggcaagtatgggggaggtgatggaggaggaggagactggagggagggttggcctcttcttcactgttgggacatgaaggggtaaggaagggtcaacgctaacctgccaaacccccacgatggcattggcaatgaggatcaagaggatgacaaagggttcaacaaaggcagtgatggtctcttcaccttcctcaaaccaggccagcacctggggagcaggggaaaggagaatgacaggtaatgaggccccaaaacagatggagaaaggaagtggaccactgcaaaggggagaactgtgcaggagagtgcaggagccagcaggagggccgggcaccgtcggggcgctgtggccccacatccgtctgagggtctgtccatccactgcaggtcctgccaccgccttactcagcgggatgggcgcgcacagacttgcaccacttgggggattagctgggaatgctttcaggtttccctgaccaagctgctggcttagaagcgaagctcaggccaaccccccgcacagccacatccatcccacgggagccaaaacccgagaggaaaaaccctgtggtcttcgcaggcggtctggcccccgcagccctccccctcggccaaggcagggaagctccggtttcacgagggagccggagcggggatagggttacggggcctcctgcgcgcgccccgccccagctgttgccaccgccaggcagcaggcaaatgtcaaggagcaaatctgagaagggagaggagaggccctgccagcttgtgcttaacgcgacggggcctgcgttcggagaccaaggcacagggaggctttcgttgcctccagagtccccagcgaggctcacatgctgcggaagaacccgcgacatgcagatggaccgcgggatggggagtagcccccagggcgggagaggaggcagagccctggagatgccctgcgggggtgggggtgcctagggagcgcggggaagggctaaggccaggctgggcgggtaatgagggatgccagtgccctccctgaccgggcgccgggctccttggagtcatcatcacaccgccgcgctttcccgccactaggagcgagtcctcccctcgaccaatcagcgtcaggaggctggggagggcggggcaggggcgccgacgggcgcggggattggtggagcggccgtccgcccggcgcatgccgggagtggcagtggccccccgcgccgcagccggcatcgcggcgggacccggagcccggagttcgggtgggtaacccgagctctccaagctcttgaagccgcgagggtggcttagcttcggtgttttggctgagaacacccttaaagcttaaaataaaacctgcctctggggtgcaggggaggagagaggaggacgcgaatcacacccgctgctgcgcgccagcccgccccgtctgtacaatgggatgctygggactcggacgggaggatccagtgactgcgagccccgcattcgcccgatcccagcctcacacccccagccagcccccagagaccctcccacacttacgaaggaaatgcatgcggccaggaggagaatccgcaccaggaggtcttcaaactgctctatcaccagctcccacagggtcttccctgggggaggaggcaaggggagggccccgggttaaggtctagtgggtgaaggtctgggatggagcgccctggactccggcctgcagtggggaggctctagggtggtgggcagacagcttggtgcccagagaagggctaagaagctcgcctggagtccagaaacagactcggcaaagtggggggcagttcaagggttggctgcttcaaggagaaagcgcctgggagacttctgccccggacaggactctaacctttagggagggagatttgccttttgggaagggatatttgctcaaagaatctaaagaggcagggaggagggagtgggacagggcggggtggggggtggtcatttatgagagttcagggattccagtaacttaccttcctcagcagggagctctacccaggaaaaagaagaaaaggacagattcatttggggttcagcctcatgccccccacacccaagactttgtggctaagagaatcaggccaccttgaggttcatcaagttcatcccattaaaacctcccaaaactctggatctcgggactctgttttctcagtatcttcttccccctgcgagcattggacaacggcccagctcttccttaagaaaccctgaagggagaaacgcgtgcatgcgtgtgcgtgtgttttgggggtgcaggagggcattaattaccagccgctcttccaagggacacttaccattgaggccgtatttctccagattccgcttaacttggtccggggtgaggcccgtggtctcactcaccccaaaataggccaaacattcctccgtggttttagcatgagcggcctccattgtgctcccttcctgggggccggggccggtgtgttccttccagggggttcccactcgtggggggtcttcctcagtgtgtccaactgcctgtctgcctgggtttcttctttttactctcctgccccctccaggtttttcttccctccacaaagctctgacccccgtcccacttgagcagccggccaccccccggcccccagctggtccttatgagggagcagggggaggccgggctcccccctccaccagatcagggattggctggctgagactccagcaggaggtggtcagaaaagagagatatttctgctgacagagggggaacagtggggctgcagcctgagatgtcactcatgagggacgcaaaggtagccccagccccagggaagtggggtagggagagacttcactttctgtcatctgctactgaccctgcccccccattgcctcgacttccccagctgcattgaatttcccattccaaactcatccccccagttcttcccggagccctcttccatccccggcctcacctgtccctttcctcacaccccccttcctgcctcatctgcccggagcctgtttccattgccgcagtctccttcctcctcaccccatttgctgaagcagtggcagagataccccaagcctttgggggactgatgaagggagaacatcttttgggggctagaggaagtgagtggctcctagagggacaaggggaagtgaggggagagagtcaaggggacagggccgaagatggtaaccctaccctagggaggggttgccacagccatcaacaagggatttagtgtccaggccctggtgagcaaagnnnnnnnnnnnnnnnnnnnnnnnnnnnnnnnnnnnnnnnnnnnnnnnnnnnnnnnnnnnnnnnnnnnnnnnnnnnnnnnnnnnnnnnnnnnnnnnnnnnnnnnnnnnnnnnnnnncaagtaacccaagaggctacagaatgtgctgatggcagagggggaggggtaactgtctcaggatgggggcaggggtcaccccaagtcgtgcactgagggtcacctcatcccacactgtgctctaaccaacggggtttctgtggccagccccagaggcctgtggtctgcgctgcactctgccctgctgcatctgtccacgaggggaacaggatcaggcccatgctgtgtgcgtgcaggagctaggcagaccccacagaaaggtgtcggggcctggggaagctggaccaagcaggggctccagaccaaaggaatggggaagggtggacttctggggacaggtctgggggaaataaggacagatgtctagacctagggggaaagggagcagagacacagagccaccagggtcagagggaagtccgagcagcagtggggaagagggacagcagggagccaggtgggcggggaccccggcgctgggtgcaaagccacaagttgttgctgaatgctggccttggtgtcagcttcctcagagaagcagctgctctgagctgcccctccccacccctgctccaggatgggggcgtctcttggttaccaccaaggcagctgctggaggagccgagggagggtaccaggggtgcaggaaggggaggacaggcaggcagaaaggctggatgagagtcagggtgaaaggtcagtgaggggaaggggcctggtgccctgggctcaagtccgtcctctgtctaggcctgtttcctgaaatgagcagaggcatgtggacttcctaagtgtggcttcttaaggctgctttccattctggggctcaaactccgaagcagaggacagaataggagacagcagagcaaagaaaagggaggcccccacttttggggagggggatggcagcaggggtggatggaacttgagggttcagcctcccagatgcatcccttctgcctggacttgggtgaggcgcggcctcctgggtgagttgaggacaaggtgctccttcctgcctccttttcacagttccaacaaacccctcccctgaagcagaatcctgctgtgacctgaggggagtgggggacagtgggctgaattgggggtgcaggagagcattagcagcctctcttccaagagacacagcccccggcacctccacccggcccagcacccaccgtctccgctggactcaggctcacacccgccaaggcttttggcgctggccggcgtctccccaccggcacctggaggagtgacaggggctactgtcttacagcagtgggaatgcccaaacatggagaggggcagacggagagatgggcagcttcgagggagtcgagagcctgagacagagggcagggggcaggcttggcagcacattcctgccaacaggcctttaaggttattcatttctacctcccccggcttcccagagggggaaacaagccagggagggaaagccacccgccaggagctgcagaagggctgctctagggaaggctgtgggtgtgaactgccatggagggaggctgagccagaggcgccctcggggatcccttcccacaggggtctccacgcccagggatggaaagtgatcctcctgtcacacctgagggctggagctaaaagcatgggacacagagacaccctggccagtccctgatgagtgcagaacttcggtttaaccatctgtaaagaaaggcttagagggaaagtctctcaggccccaacagccaagacatgctggtctgaggagtgggtgggtgtcctcgtccccctcccctgcccatctttggaaggcaggtccctgaaggctggcagggctgggggagggggagcctcagagcaccagttgctgctggaagattaggaggggatcaggccctgcttacctcggggcaccacagccttcactggccatctcactaagaacccagcacccggctctccaaagcttcccccactttcaaggccggtcctatccccagtctcctgaggccaaggtttggggagccccagaaattagagcaagcaggagagccagcaggcttccctcggctagccccccgcctgggtggcctggaagcccagctgtctcctgtccatctccctacaggacacaaggcccagaatagcaaggtcatgagcgtgggtagggcctcctggaggtgggggctgaagctgaggggcatgagggtgtgggctccttgctgcctgggcggggagtgaggcaggatgctgaaaggcggagctggacagtggggaagggagaaggccgagctcagcgggtgggattcttcagccccaggcccctccttgttggcacccactacccccagagctgggaagcccaggggtgccctctgttggagggcacagccacagatcaggaagactgattccaagagcagagcctgtgttttacggggtggaggggtgtgccacaatgggggtggtgttataaactcaaatgcccacagggccaggccctcccagggagcaaagtgagctggtggggatggggcagatgtggaagtggacccacatcactggatcttctgatttttaagagnnnnnnnnnnnnnnnnnnnnnnnnnnnnnnnnnnntttaagagaagccagtgattttttttttttttttttttttttagacagagtctcgctctgttgcccaggttggagtgcaatggtgcgatcttggctcacagcaacctccacctcctgggctcaagcaattctcctaccttagcctcctgagtagctggtattacaggcgcgcaccaccacacccggctaattttttgtatttttagtagagacggggtttctccacattggtcagcctggtctcaaactcctgacctcaggtgatccacccacgtcggcctcccaaagtgctgggattacaggcgtgagccaccacacctggcctgtgatctgaatttttaatgtgaaactcaaatggacaccatgtccaggccaagcaaaccatgtcagcagctctgactcaagatgaaacttcacatgtcacagatgaggatgctcaggcccggcgtggctacaccttgcccaggccagtgagtggcaaggccaggacagaagctagtgccctctgccatccctccagcctggctttgagaagggggccattgggcccctctgcggctaccctgtgactgccacgttcaatctcttccagcacagccaccgtgcctcccatctctcactgccagctctctctagggtacaaagccataactcaggaagggccgctggagatcaccatgcctgccattcacagcactgtcccatgacaaaaactcgcaggagaccccaagagcatcatttagtgctccacgaacaaggctgtcagacacagggatggctccgaaagcacagcactgcagaatgatggggactggcctgggccagccctctggcctgtgggcactgagtgggctgccttcccaacccaactgtccccagtccccacagcaaacaatggccatagccatcacgatagaaccgagataaacctttttatttatttatgcttctccattttgtttaaaacaacaacaacaaccaccttaatgtaactgacagcccttccccctcaccctgcctcgggctgggggtagttaatggggaaatggcccccagggtggggctgaccagaagagcccctcaaggagctcatggagcccaaatcccctgccctggggaggggacctgtagtgtgtgacgggagcctctcccgagcctctgcttgtaccatcaaagatgcccttggccaacaagggtcaggaagcatgggggagggatttcggcctcctctgtccctacccagcccaatctcacgagcagggctggggggtttaaaaagggtggagcgggtggggttggctcacacgaaggagtactggttgttaatggccctggggtggcccccttcctctccatcaccccctagtggtgactgctgcagctgcaccattgggggcacccccgcgtccccaccagacccagcgccctgggcctctgagcctggggctatggcctcttccaattcaaccacggggaccagctcaaccacggggaccagctcttccgggacccctccaccgcccgctttctctttctcttgcctctctttggctgctgcggctgctgctgccgccacttctggcgccctcgacgcctcttctgccccaggctgtgggggatctgtccatgaaggggg

SEQ ID NO: 96818 - DNA, 39027 bp, Homo sapiens
ccgaaatctttccctttaagatcaggaccaaggcaagaaggcctgctaccatcactgctagtcaacagtgtactggctgcgtcacttggtgaccaaaaaaggctctatcatctgcaatgcttctcgttctgtgctaatgataaaatgttactccagcttcacactaataaagtcattccagtgtgaagacactggttgagtctgacatattaatgtcacatgtctcttttctggagggtcatgtattgtgaactctttagtgataaatggaggtgagacaggagaataggtctggaggcagggaacctaaggccattcccgctgacttcttagaactgaatcaaaaggaaaaccccgtctctccacacccaaataacaaaaggatcagaggttactacctttgcactgtgtggcagatgaaaaatggaaagtacctctgattggtcccctcccgcaatcaatcagatatttgcatagggcgtaacttggtaactactatttagtctctgattggtcctgtcttctgcaaccaatcagactggttgtgggccactccttcatttacatagggtgtaaccaagtaaccaatgggaagcctctagagggtatttaaaccccaggaaattctgtaaccagcactctttgaggcttggtcctgctcccactctgtagagtgtactttcatttcaatacatctgtgcttccgttgcttcattgttttgttgctttgtgcattttgtccaattctttgttcaaaacatcaagaacctggatgactaccatgagacaagaacttagcttaaatccctactacactaataacagttaccagatttctctacctctgtaaagatttcaattgctataaaaacatttacatttctaatatacatcttttctcttatggaaatgcttcggtgagtgtaaagatttgactttcaatggaaatatttaccacacaataatatgtgtatggcttcattttttccatactctgcatttatttggttccttccctgtgaagacttttcgagtatcaggaagcattgattgaaagccaaacacctcaatacatttatcacatttacttagtttttctcccattttgaatggatgagaatttaagctgtttaaatttattatatataaaacatgtattatgtttcagactgatgtctatcaaggcttgacattgataactacatttctaaaatgtcatttaatttccaattgcaaacatccccagtgttatatctcttagatatctcctctgtggcctctccgggcggctaccttgtgttttgaggagattgctgtgctagatagaggctgtaactcaacaacttctctttacctgtatctatgggaaaattaaattacatgtatgatactttgttcagagatttctagtttactaattttttttttcttgagacagaatcttgctcttatcttccaggatggagtgcaatgacatgatcttggctcactgcaacctccgcttcccgggttcaagcgattctcctgcctcagcctcccaagtagctgggatcacaggtgcccgccaccactcctggctgatttttgtattttttgtagagatggggtttcgccatgttggccaggctggtctcgaactcctgacctcatgatctgcatgcctcagcctcccaaagtgctgggattacaggcgtgagctactgcgcccggccgattttttttttttttaatgacaaagacatggctttaatgttatccaggagacagctgattcacatagggttattgaacactagaatctgatcttgactctctcatgtcaacaacagacaaacgcattacaatttagggaaagctgttttctgggtacctcccaggtgtttgcagaaggcggctagaatttgcttccaggcatctacctgggccttagaatgagccctggctccccaacccatatcacgtgtttgttcagtaatttgtgaagggaagctgggcacagggggaagtaaggaggctcagtgtaaagcccagtcccagggtaacagatgatctggggtttttcctttccatgggcccgtaaccgttcagagactgggcatacaactcactcctccagttatggtcatcctgaccaacaatgaaaatgatggggccctgggccttctccattgaaatcatgctggggttcttataccctcctacaagatcattctttatatccacgacgtccacgaggcctgagaaagctaccttgattctcctcaggtcatagcccaatggtggaatgctattctgcttacagtttatgcctctgttcccactgatcccggatccattgatggaaactgtgtctgagtcattcttcaagaatgaggccattgagagacaaatatcagctcctagagaaatgccccaaagcccagtgcctgggccttttacctggggatgttgaagcatgtagcatagggcttcttcgaagtactccaggggtatgttgtccacgttcttggggagatcttcaaagttataacaagctagagcgaacgtggcaaagccatggccagcaaggaggctggctcgatattccaacaggctccctccattaccaaagatgccaatgatccctaggaagggtccaggtcctggcggcaggaagagcgtggcgcgcacccggcccgcgcgcaccgaatcgctccgcaccccttgtgggaggaagtcgcgctcgtgccgcgcctgtcacaacagccgtccaggctcggggtcgtggccgtccagcacctccaactccacgataaagggaatctgtacgtcccgcttcagaaagcgccaaaaaggtttcttggattccagggcccagagcagccccatggactctagccccctaaagctgccgcccagcacgggcgcgcgctccaggtccagctcgccgcgggcgtcggcgcagtagcggaagagcccagccttctcgtcgcgcagggacgcgcgcgcagcgtgtccagcggctccgaagccaggccgcgcatggtgatgcgcaccggcttgtctcggcagccgcggcccgcgggctccaggatcagcgttgctgacatctcggagctggagcggggaatcttaaggtcgaggcccgaggcccgtccaagatcgtggcaagtgcgccgattgtccagagggcgtccggcgtcccctggtgccgggagcggccggtggctgagcagtcccagaaagcgcctgggactttagaccagttaacccggcgccctggactcgtctgaggcaaaaggagccagactcctctcctgggtcctctccttgggccccggggagcgcagacttttttttttttttttcctttttttaattttgagacagggtctcgctctgtcgcccagcccggagtgcagtggccgatccatagctcactgtaatctcgatctcacaggctcaagctatcctcctgccttggccttccgagtatgtgggactacaggcatgagtcatcacgcctggcctaagccatcacgcctggcctgattttttttttttacttggaaaaaaatatatacttcactcccacaaagtattattttagactcctgccccgttattcctagagaattaaaatttccaagtaaagtaaaaacaaaaaagtagtgaagacagaagagtatttaaccatatcgctgtagaaaattgtattgaatattctaaggcatgtgcttgtcctttttgtgtctgttggtagaaaaagaataaacattaaactcagcttagtatttccaaagtagtaagaaacacttttgcacataaggatactttgggaaaccttgtttcccccactgtctttacactgagtgagtaacaaggctctgtaaagacgcaggggaattggtcactagcaggcaaggcagacatcaagcactgtaagaaatcagagactgacttcaaagaaaactcagcgtttactgataaattgtgttatattaccccatcaatggctagccttcatgccatgaaaatgcatccatgttaatgatgtcactgtcttacctaactgcaggtgacagctgccatgacatagaaatgacattgaacttaaggaaaacactatactgttgcaaaatccttgttaaaaccaaacatcttaaatgcatttgaagcagcgtgtctaagccacgtaaaatcaaacccttgatagttattagctggccttcttctataaagaaagctttcttttttctttgtgcttatttaatggggtacaatcaattatagacataattggtggcacagggaaaataattatttcaagtagtttttaaacactagctgtataactaagagggacatataaaaacagggattggcaaactttttctttaaagggcctgatagtaaatacagtcaatcttcattcacagattctgaatttgtgaattcatctacttgctaaaacttttttataaacccagagtcaatatttgcagcacctttgtggtcatttgtggacatccgaagagcggtgaacatttttgagtcccttaacaggcatgttctcagccaaagtcaaacaaagtgaccctctatcttcttatttcagctctcatactgtaaacaggtaccctttttgcagtccatttagtaccttggcttctcatatttttgttttttgctggtgattttgctgtttcaaagggaccccaaatgtagtagtactaaagtgctgttgatgttcctatgaatgagaaagcggtcatgtgtcttacagaaaaaatacatgtgttagataagcttcattcaggcatgagttatggagctgttggccatgagttcaatgttaatgaatcaataatatatattaaagtgtttaaatagaaacacaataaggccaggcgcggtggctcatgcctataatcccagcacttttgggaggccaaggcgggtggatcacctgaggtcaggagtttgagaccagcctggtcaacatggtgaaactccgtttctacaaaatacaaaaatcagctgggcatggtgacatgcatctgtattcccagctactctgggggctgaggcaggagaattgctggaacccgggaggtggaggaggttgcagtgagccaagatcccaccactgcactccagcctgggtgacagagcaagaccctatctcaaaaaaaaaaaaaaaaaaagaaaaaaagaaaataaacacaataaaataagcttatgcattcatcggttgactaaaatgtgaccagatgcttacaggaaactaaccctgtatttcccctagaagcagtggaatggtattcactaattccgtgtttgtagcaagtttatagaccataactactgtgaatagtgagaactgactgtattttaggctgcgtgggccatctggtctgtgtaactactcgagtctgtccttgtagctcaaatatagcaatagacagtacacaatcaaacacggctatgttccaataaaacttttatttatggacactgaaatttgacatgtatgattttcatatttcacaaaatattgttctccttttcattgtttttaccatttaaaaatacagaaatggaaaatataggaactggcttccccgaatctccggagtcacacggtctcaaatcccaacagccacacccagtgaaagaatcccacccaggagcgcgccagggacagactcgcagcgccgtcctcgctcacagggctccctagttggcactatagagaggcggtcgcgggcgcccctctttaacgcgccagccatctgtccccgctcccctccaggccctgccgcgccgtccccaggcgctaagggactcgaagcgcagcctcgctgggacggacctagctccggctccgggttcacgcagagcaggggctgcaccagcgagcggacccttgagactggccgcgcctgcgcactccgtgagcgcgcccggccctcccagcagcctccgcgcgcagcccgttaggccccggggattgtggcgtgacccggcagcggcttcctccgttcgggcatcgctgtgcctcgggttcgcgccccgagtgagcagtcctggcccggagcgtcggtcctggtaatctgtaggaaaagcgctgcggcccagggggtaaagagaggtaagcggggccactgcagtatcgcagaggggcgggagcccgcgcctcaggcccgggtgtgtgtgtcgtgggcgtgacggggccggggctgggacgtgacggagtctgtgcggctgacttgggtgcagagactattgtatgagcgaaggttgttgtggccgtggagtgcgtgactgaccccagcatcctctgcccacaccgggcccagctgcagagaaatggccctcggtcagtttctgcacgccaaagactcccagcagaaacgcgcagactaggccggaccaggtggctcacatctgtaatcccagagctctgggagagcgaggcgggaggatcgctggaagccaggagttcgagaccagcctgggcagcaaagcgaaactcccatctgtaccagaaatttaaaaaatgagccgggtgtgatggcgtgctcctgtggtcccagccactcgagaggctgaggcgggaggatggcttgagcctaggaggagattgaggctgcagcgagctatgatagcaccactactctccagcctgggcaacagcgaaacaaggctcagacccgaccttgggataggaatattagaactgaacgagcccccgctcccgcccaggcttgctcctggaagggactcccacaccacctcctcgcggacccggacccacgcacgtgcactcacaactctgaagagtccagctgcaggtttcagaaccacagcattgcttccaggaagctattgtgaactccagttctagccccgggcatccatgaccctggcctttctttgatactgggaagagttaacaacaccatctctcttatgttactctggttatgtgtgggtgggcggtgggggcattgtgccctatgcgaggctgggctgcaagaaaagcctggttcccttattagccagtcctgcccaattctttaagaaaaggggtccgagcgggaggaggaatgaattgctgttgcctgtttaagtcaaggtcgaggcgagtgggtgtttctgctttcttctgtgaaatgcattcttatttcttaggacatgagaatatttgtttcattctccataaatgtcctgtccattgagctgatacctaggtcccctcccgagagcctgtatgcacatacccatttggtagatgtttttcattacttctgtgggccttcttttaattactatgtgtaaagttcttagaacagttcctgagacctcgttagtacttaataaaccttagttatgtattcttaagtagtgatttggagcaattctacatcagccttctatagatggggggaaaatgaaaatactaagccaattgtggtgagtatttcctagtaaaaaataaatgagccagatcagatgcttaaatagtctaaaacaggaattctttttttttttttttttttttttttttgagacagggtcttgctctgtcacccaggttggagtgcagtggcacaatctcagctcactgcaacctccctttccgtggttcaagcgattcttatacctcagcctcccaagtagctgggattacaggcctgcaccaccacacccagctaatttttgtatttttagtacagaccgggttttaccatgttggccaggctggtctcaaactcctggcctcaagtgatctgcctgcctcggcctcccaaagtgctggaatgacaggcatgagccaccgcccccagcctagaacaggaattcttttttttttttttttttttgagacggagtttcgctcttatttcccaggctggagtgcaatggtgtgatcccagctcaccgcaacctccgcctcccaggttcaagcgattctcctgcctcagccaccctagtagctgggattacaggcatataccaccacgcctgcctaatcttgtatttttagtagagacggggtttctccatgttggtcaggctggtcttgaactcccgacctcaggtgatctgcccgccttggcctcccaaagtgctgggattacaggcatgagccaccgtgcccggccatagaacaggaattcttaaccagaagtaatttgaattcatttgaggctttcaggggaccagatactctttgaaattgtacgtaaaattgttatagatatctgttaatatgccacttttatggggagaaaatatgtaatttaatgagattatcaaacatgatccattaagattcagatctactggcctagaatcaaagtctgtaacctttgagaatgtttttcaatgttagacacaaaattagtgtctaatagtaggaaatgattaaataagccacactccatgtgatgcagctttttgccattaataaatactgttaattatgagaaggaaaaaaagcttgtgatcgatgttgtctaagcaatagttttgaacaagatgactcacaaaacctttaatcatgtatgaatcgctcttaataagctagagatttataaaacattttgcaaggattatacataatataaaactagtttcttagtggagaaaaaaagataaactgttgtttaccacactgttctgtctgctttggtatacttttactgaatttaggaatgtcgcttgattgtgttcattcatagaagaatcttgagagtgaaaatagcccatcgttttgatgaagaacagttaaagaactgatgggtgttacttatttgtgccacactgttgtttattttcccaaaacccactcatgtcacaggcttatagaatcacaattttcttaacaactaaaagatattccttcttcacaactctgtttttaattctatgtgtatgaaaatagtttaattggctgggcgcagtggctcacgcctgtaatctcaacacttgggaggctgaggtgggcagatcacctgaggtcagaagtttgagaccaacctggccaatatggtaaaacctgtctctactaaaaatagaaaaattagctgggcacagtggcgcctgcctgtaatcccagctatttgggaggctgaggcagaagaattgcttgaacccatgaggcagaggttgcagtgagccgagatcctgccattacactccagcctgggtgacagagtgagactcagtctccaaaaaaaaaagaaagtcctggtttaagctgccarctatatttagtactattcagaacagattttctccatcccctaccacccagtcatcttcactctataagaataaaatttaagttgcccgtagtctcaccatccacaataaatattactattctaatgtttgcttttccatttttttctgtgcacttgtgcacatgtgtttgttttccaaaatagaatcacaacaattgatcatttaaggagacaaagactctgcaacactttgtttgaaaaaggaaaaagaggttgggcctggtggctcacgcctgtaattccagcactttgggaggccaaggtgggcggatcacctgaggtcaggagttccagaccagcctgactaacatggtgaaaccctgtctctactaaaaatacaaaattagccaggcgtggtggtgcatgcctgtaatcccagctgcttgggaggctgaggcatgaggaccacttgaacccggaaggtggaggttgcagtgagccgagatcttgccattgcattccagcccgggcaacaggagcgaaactgtctcaaaaaaaaaaaaaaagtatttaatatgataccttatcaaagcaaaattcttgagctggttttatgatatggaatggtgtccctttggagctactagggatggaaagtaacaggggccttgctctactttttgatttctgtgaatccttttttgataacattattaagaagaattacataggccaggtgcggtggctcatctctataatcccaagactttgggaggccgaggcaggcagatcacgaggtcaggagatcgagaccatcctggccaacatggtgaaaccctgtctgtactaaaatacaaaaaatcagccgggtgtggtggcatgctcctgcagtcccagttacttgggaggctgaggcaggggaatcacttgaacccgggaggcagagattgcagtgagctgagatcatgccactgcattccagcctggcgacagagcaagattgtgtctcaaaaaaaaaaaaaaaaaagtagaattacattttcaagcctagttctaacatttatcaatgttttaagagcaatgctgaaaaatctcaaaaatctcaaaaatccctttagagaaagggactgctattgaaattgttaaagataatttatcagcaaataccaaatttttaaattgaaaattattgaagccagtgtggtggctaacgcctgtaatcccagcactttgggaggccaaggcgggcggatcacgaggtcaggagatcgagactatgttggctaacatggtgaaaccccgtctctactaaaaatacaaaaaattagccgggcgtggtggcgggcacctgtagtcccagctactcgggaggctgaggcagacgattggcctgaacccgggaggtggaacttgcagtgagccgagatcttgccactgcactccagcctgggtaacagagcgagactgcgtctcaaaaaaaaaaaaaaaaaattattgaagataatttttaaaataatggaatgaggggtatgtgatgtttttcactgaatttagtgcttacagtaagccattttaagtgctttatgtattatgttcttaaccttcacaacaaccctataaggtaggtactgtttattccttagtttatatctgaggaaactgagacactgaaaattaatgcgtccaaattctcacagttaataattctcagagctctgttcatatcctgaatcttgataacaaagcctgtatttttaataactgagagtctgccacctcccaacattgtacatattcttttagtctgactcccatagctagtaatttatcrtgaatatcttccttctttaattaatgtgggccaatgccatcattaataattgcataatgtgctataatatagtagaacatcatttattcaacttgttgcctactgttaggtatttgatttcaggttgtcgtaaattattcttttttttttgagacagaatctcactctgttgcccacgctgaagtgcagtggtgcaatctcagctcactgcaacctccgcctcccagattcaagtgattctcctgcctcagcctcccaagtagctgggattacaggtgtctgccaccacgcccagcttatttttgtattattggtagagatggagtttcgtcatgttggcgaggctagtctcaaactgctgacctcaagtgatctgcccacctcggcctcccaaagtgktggttacaggcatgagccactatgcctggccaataaattattctttgatgaactctcttgcaatacatctttgtatacttttacaaatatttcctaacgataaattcctaaaagtggaatttctgggttgaattatgagacatttataaagtactcacaatatgccagatcctgtgccagtccttgggggaaatacagtgaccaaaatgacatggttgatatccttacattgtttgttgtctttcaaggtagataagcctatgcaagaataacactgagataggtgaggtaaagtcattgaagaattcaggtggcatggcttgagaggtcatgggaagcagacagctgattgtagcaagcattgtcaggtcacgaccaaataataccaaactcatggggttcctgtggggtaatggattttatgtaataagcatgtgccttatagtttttattttcatgatgttgatgcaaatgaacagcacaagaagattcagcagctcctaggtgggcctcatggctaaaacaactctttcagaaacaaaacaaaagcttggtcaagaagtcatgagaagtagcagcagtgaaacaaggcattaattgaagatgtttagccatgtttatataggcagaactcwgacatacatgaacacacttagaaatcatagagtcagttcagattttgggagctgaaatcaacaaaaccagtaaaaacatagaagctgcttgtaggatattgagtttttttctccaagttcaagggatgactactttaaaaactatctctttaacctatttaaagaaygctttccactatgcaaagttaaaatatatgtttcaagtatatatggtcatgtagaattatgaaataaatgtaagcgaaaaggaaatcaagatcaatatctattgatgcctgtcagtgtttctttgtgctgatttgcatgtatactttacagatgtcctaataatgttcattttatttttctaagagattatatatcttgaatattttatatgtccttgtgtattttctaaaacttagcacttagagattaatacacacgcacamtctctctctctctctctctctctgtttctctcacgtctgtttttgctgtaccttaacaggatcatactactcacaactgtttgttactgcactcctcactcaacaaactgtactgaacatatttccatatttccagttaaagagctgcattatcattttttaaatggcaacagtttgttttactctatggatgctttatgatttatttaatctgttttcttttttttttttttttgagacggggtcttgctctgttgcccaggctggagtgcagtggcatgatccygcctcactgcaagctccgcctcctggtttcacgccattctcctgcctcagcctcccgggtagctgggcttacaggtgcctgccaccatgcccggcyaattttttgtatttttagtagagacggggtttcaccatgttagccaggattatttaatctgttttctattgaaggacatttaggttcttcccagcttttttccattatgaacaaggtcaacatactgttacacatacctttgatcatatgtacaattttttttaatccccaaagtagaatttctgaatcaaagagtatgcgtggtttaaatgctgcttgtacatactttgaaatctatgcagtctgcagtatactggttagaatgttcatttcctctcatgcttgcaaatatgggtatcagtactcagatacctgttggtgagctgatgtgttatttttattttatttttttttagtgaatcatgcatgccagttttcgctcactggaatagaaattctgggtttcagaaacaagagctagagttgaaggaaagccgactctatggttagataaatgattccaaatgcagctttgctactcataaactgcatttctacaaatgattttatttcctttttttttttttagatggagtcttgctctgtctcccaggctggggtgcaatggcgcaatctcggctcactgcaacctccgcccccctaggtccaagcgattctcctccctcagcctccccagtaactgggattataggcgtctgccaccacacccagctaatttttgtatttttagtagagacagggttttaccatgttggtcaggctggtctcgaactcctgacctcaggtgatccacctgccttggcctcccatagtgctgggattataggcgtgagccatctcgcccagcccaagtggttttatttctcttcatgtgaatttctgatccattgcatggatagaataattattgtgctaaagagcaatcctgaggatatagttaatatatataaaacaggccgggtgggtgcggtggctcacatctgtaatctcagcactttgggatgccgaggcgggcggatcatgaagtcaggagttcgagaccagcctggtgaatatggtgaaacctggtctctactaaaaatacaaaaattagccaggcgtggtggtgcgtgcctgtagtcccagctacttgggaggctgaggcagaagaattgcttgaacccgggtggcgggggttgcagtgagctgagatcgtgccaccgcactccaacctgggcaataagagcaagactccatctcaaaaaaacaaaaacaagaacaaacaacagcaacaacaacaacaaaatatatatatatacacacacayatacacacacacacacacatacatatataacacccaacatactggaattcttgataaatagacatttgttattgtcaaatgaccaagagcatgaatccatgcctgttcagcctaggttgtaagaaagagaatggcaaatgaattcattccagaaaacaatgtggatgattctgattctgactggaaagagagagtgatgagcccagaggattttgaaagttgttctggctgcaagcagggctgccagtgtgcagttttgtggtggtaatggctgccaggcttggtctttatgaatttctctctttgtgtctggtgaatctaaacaggcctatgaaactttgaagraggaagattgtggtttagatgatacagccccttatcagccctggaattagcaagggattagactcgtccagactccctcaaatttctctctctctctctgcctatgtgtgtgtgcgcgygtgtgtgttggaggagctgtggtggagagatcagaagagaggggaaaggtcacagtaactcaaatcatttggggatttctgaggtccatctgatctcatggccttgttttcckctccctagatcagcctctgtggactcggtgcttctcctggcaagtaaaccccaaggaggactgaccagttcttgaatttctataccatggcccttgtaagtttttttctcctcctaggaatactatcatgytaaggttctgtgaccatttttttattctgaaacttccttactatcagagctccatccaagaaccttcttccagttcttccaaatccagtggcgggtgaaccacaatgcttgtcctatgaacactctttattctagtcattgttcttatctttgttgaacaaattattcagcatctcctatatgtgctcagtcttctgctaaaagctgcaatggaggaaaaatgaaatctcttaaatatttgaccatgggcccatttagccactcataggaaaactgaactttgagttttccaagtacgtaagataagggtcgtggctgggcatggtggcttgcacctgtaatccctcctgttcaggaggttgacatggaggattgtttgagcccaggagtttgaggctccaatgaagctatggatgtgccactgtactccagcctgggtgacagggagaccctgtctcttaaaaaaaaaaagttataaaacaaaaaggtaagagttgctgttagttggcctcagcctcagtatatcataagatctcatgttttgtgaggcttttaggactgagtaggggtgtggctaggtcttatagagagatctgagatcttttggaattcctgagttacactcaggaacaagattccatttttggttgaacaggatgtgctggtctagaatgacatctttgtgattctggattatgctatattaatatcctttaactcaggaaccaggaaggcatacagtgagggatggaaagtgatagcatgtgagaaggtaatccaggtacataagtagtcacgttgactcccagaattgaggaggatcttaaggttttgtccaaccaaaatatctaagtataaaagaatgattaaatctcatatatgcattgtatagactattatataaccaatttttgtttgtttttttttgagacggagttttgttcttgttggctaggctggagtgcaatggtgtgatcttggctcaccacaacctctgctcctggattcaagcgattctcctgccttagcctcctgagtagctaggattacaggcatgtgccaccaggcccaactaattttgtatttttagtagaaacaagggttctcctgttggtcaggctggtctcgaactcccgacctcaggtgatcctcccacctcggcctctcaaagtgatgggattacaggtgtgagccactgcgcctggcctatacaaccaatttttaacagtcataattagaaaaatgcttatgatatgatctgcttctaggataaacttagaagatattctctaattgcatttagatccttttctaagataaagatattgtagggagggagactttaaaaaaaaatctgttctttaagaagaaaggggcggaagaactcaccttccttgggaattgatgagggagacatagtaggcaaaggcttatatacagtatttcatttaattggaaaactgatttttttttctttcccaggagtatctagattattaagatttgccagagtataagagtctgtgtctgtagcaacagaatccttcgggaacccaggcactttgcttcaggcacactcatttcctgactcgctgtgttgcaggcttccagcccaagcctgttttcttgccatatgatccacttcctgcaatatctcttccttcttttctccttctaccttaaaatacattttcttccatttcatttataatgtgtggtttgtcatttcagcgatcagtgatgttcagtgatgtatccatagacttctctccagaagagtggsaatacctggacttggaacaaaaggacttgtacagagatgtcatgttggagaactacagcaacttggtctcactgggtaaggttatctgcttctaggaatttagactgtgttctctgtaaatcagctttttcctgtggaaatttcaagagtatcttttaggaagctatctaaatttttgctccactttctaaagggaacactttgagctttatttcattggaagtgagcaccttcattaagcacattgaccttccccatccttaagtagcccttgggccttaataatgaaggggctgggtttgagatctttgtgatttgtagcctcaccagcgtcaaagaaaacaagtttcactttgtgttgaattcagaactgctttagatgttttgttgcttgttggtatattttgtaagggaaatagctagatcctgtttattgaattagctctatcaaaataatacatatgatttatgtagtggtaaaatggatcaacagcatgtatttacaattcaagagaactcattcccttcattaataaacaatcatattcagttttacctacytttatgattgaaaattaaaaatctggccgggcgcggtggctcacgcctgtaatcccagcactttgggaggccgaggcgggcggatcacgaggtcaggagatcgagaccatcccggctaaaacggtgaaaccccgtctctactaaaaatacaaaaaattagccgggcgtagtggcgggcgcctgtagtcccagctacttgggaggctgaggcaggagaatggcgtgaacccgggaggcggagcttgcagtgagctgagatcccgccactgcactccagcctgggcgacagagcgagactccgtctcaaaaaaaaaaaaaaaaaaaagaaaattaaaaatctaagatttgtattcatgtgttttattgcacagcaagatgagtatagttaataataatgtattgtatattgtatattccaaaatagctacaagagagtatttttaatgttctcactacaaagaaaagaaatgataaatatttgaggtgatggatatgctaattaccctgatttgctaattccacaatgacatgtatcaaaacatcacattgtagcctataaatatatacaattattagtcaaaagacaaaataattattagtgagtatttggraaaactagaaccctcatacattgcagtgggaatgtacgatactatagatacgaccctgtaattcttctcctaaatgtttactcaagagaaataaaaatgtgtctatacaaagatgtataagtattcacagcagcattattcacattatctaaataaatggataaataaaatgtggcatagtcatacaatagaatattcattgaaggaacaaactactgatacatgttatagcatgcaagaatataaaaaacactatgctaagtggaagaagccagatgcaaaagattacatattatatgattctatttatatgaaatgcccagaaaaggcaaatctatagagacaaaaagaagatcaatggttgtctggggctgggagtaggaatgaggattgactgccagtgaccaatagggatatttgggggatgacggaaatattctaagtttgggttatggtgacgtttgcacaactctgtaaatttactaaaaatcattgaattgtacacttargtaggttttatgttatataaattatattgcagyaaagctgttaaaatccaagaactttacatttaatttaacattgtttgaatatccaagaartaatacatgtcccagaaagcttatttttcctctcagcaaaataacaataaccaatagctaatgaaatataaatagtgtttggtatatactctaggcaatgtttagatacagacatatataaatataatcttaacaataatcatataagatargtactatgattatccctattttatagggaaggaaaaggtagcatggaagtaacttgcccaaggtcatacaactaggatgtggttcaggcaggatttgcacccagcagtctgtcatctcaaccactattgcctctgaaaaagaaacacttatatgaatatagattttaaaaagattttttcattccctctctagtctctatttattgtgtaaccttaacgtaaatgtttttaaaacatctttcacttatttgttttgccttattaattactgttttgacatatactttaaccaagactgaatcaaagtaattttgatttattttttattttcatgtaccttatattccttttcttctaagcaggatgcttcatttctaaaccagatgtgatttcctcattggagcaaggaaaagagccttggaaagttgtgaggaaaggaagaagacaatatccaggtgagggctagttgggcaggaagaagccatcaacacagggaaccccagatcactggggaagagacacatccttatgttgtttagaaagccctcttgaaaggtctgtggcccaaggaggaaaggtctgtggcccaaggaggaaaggtctgtggcccaaggaggaaaggtctgtgacatggggagcaaattaaggtcttagctgggggatactaaaagaagcacttatttgtcccatttaccactcttcttttttattattgttctctctagttttcctcctccttaatggagctgaggggtaaggtggtgctctctttggctcactgttgacaaccattgtatattttgattcagttgctttcctcctttgcatttttttttttttttttttttctgagatgcagtttcgctcttgttgcccaggctggaatgcaatggcacaatctcggctcactgcaacctctgcctcctgagttcaggcaattctcctgcctcagccttctgagtagctgggtttacgggcgtgtgccaccacacccggctaatttttgtatttttagtagagacggggtttcaccatgttggccaggctggtcttgaattcctgacctcaggtgatctgcccgcctcagcctcccaaagtgctgagattacagatgtgagccactgtgcccagcccctcttttgcatttatagtgtcagctgaagaatgacaaagttcatacatttggaaaggagagctttatttttcataaaggattgcagcctgcaaggcggttattctgacagactgggaagtgtagcctaggcttctgcccagagacgggcatttcgagggagggagagggtaagacagaaatgtatgctgaatgttagccaagtatacatattcaacaggctacaggaggagctatgaatactcaggaaagagactgtgcacatgcatattaggttaacataagtcctatggccactttagggtagagatttaacatttaaatgcattataactaggacctatgcattaaaagggtaaatgtaggacacaagtccatgatctgtgtatccttgggagaccagtcaaaaccagtccaaggctggaagtcgtttatcaagaagaagctgtggactggaatagctgtcatgttggaaccataaaaacaggagtgtggagtggtgggggagtgttctgatgaagtaagcaaaagggtctttcagccttttattttctctagctgacttttgagaaaatctaatgatcagaaaggtgaaagggattggaagcaaatgggtcatgaccagccttctgtcctgccatgtgccatgactaggaacatggggtctttagccaaaagagggtccttcagtctgtcggggtttaggacttttacttcggtctttaataaatagacaggtggccttggagctgggcactgtcacagacactatcaatatagtggtaaacaaccaatcaagtttccatccccacgaaatttaccttgtaataagagaaacataataactataaataaataggaaatacaatgtcaggtaatgagagtgctatgaagaaaagtaagcagagtaaggggatggagatgtgtgctgggaagactcttttagttgtcagagaagccttttttcccccaacttttctcataaattattaaagggaaataaaagactacaaaaatgatatgcttgatagtataatcatatatgttttatcagcaactaaagtttcatatgaattattctagaagatagctcctagttcacagaatatcattcttatttgatttttctatctatgtattcatctatcttcacattaagaagaaacatggatataatagactctagagagaatgatctcatggtcttttgtttaccttgtctgtgctgttttcatctctctttgcagctcttgtttcaaaaggtttttttttttttttttttcttgcgacggagtctcgctctgtcgcccaggctggagtgcagtggcgtgatcttggctcactgcaacctctgcccctccaggtttaagcagttctctgcctcagcctctggagtagctgggattacgggcgtgtgccactatgcctggctaattttttgtattttttgtagagatggggtttcaccatcttggccaggctggtcttgaactcctgaccttgtgatccacccgcctsagmctcccaargtgctgggattacaggtgtgagccaccgcgcctggcctttttttttttttttttgagatggagtcttactctgttccccaggctggagtgcagtggtgtgatttcagctcactgcaacctctgcctcccaggttcaagtgattctcctgactcggtctcctgagcagctgggattacaggtgcctgccaccatgcctggataattttttttgttgttgttattgttttttgttttgagacggagtcttgctctgtcacctagcctggagtgcagtggcgtgatcttgctcactgcaagctccgcctcccaggttcatgccattctcctgcctcagcctcccgagaagctggaactacaggcgcccgccaccacgcccggctaatttttttgtatttttttttggtagagttggggtttcaccrtgttagccaggatggtctcaatctcctgatctcgtgatctgcccgcctcagcctcccaaagtgctgggattacaggcgtgagccaccgcgcctggccatgcctggctaatttttatatttttagtagagatggggtttaaccatgctgctgaggctggtcttgaactcctgacctcatgatccgcccatctcggcctcccagagtactggaattacaggcgtgagccaccgcacccggccacaaaaggtctttaaaaatgtttttattcagagacatatgttgtaattttgtattttgttctctgtatattcaggtctggctaaggacacttattttagggtactagttcttattttataaccataggaccatttcagtgcctacactgtttgtaatgttctatcttctgacttaaccttctaccaaaagaaagaaaaacatgctttttccctcttatccctaatctttttttttttttttttttgagatggagtctcgctcttctgtccaggctggagtgcagtggcgtgatctcagctcacttcaagctccgcttcctgggttcacgccrttctcttgcctcaggctcccaagtagctgggactacaggcgcccgccaccatgcctggctaatttttttgtatttttagtagagatggggttttaccgtgttagccaggatggtcttgatctcctgacsttgtgatccgcccaccttggcttcccaaagtgctgggattacaggcgtgagccactgtgcccggcctcctaatctattttaaaattcacattcaggtaattaaatgacatttgcaattattaacactcaaaatgtattgcagaggttccaagtgaataagataatatccatttagtcaggaagcatttagccaaaatagtaactgttggctcagagttagacatcttaaacaagaccatgtattttttttctttcttttctattcttcctttaagaaagtttgattaaagtataaataacatgccttcagaaaagtggacaratgactttcttgaggtgatatttgagaagagacatgaagtaagggctcaagacatgtcattttctgggaaaagagcattatgagctgatagaaaaggtctgagtgcggcattagccttgctagtctgaggaataacaaagacggccattatggtcagaccagggaaagggaaagtaagaagctgagatcagagttaggcaaggacccggtaatgtaaccactaagagaaattgaaagccacrggctgcttgtattctaaaattatttctccggttgagtgcaaaagcaggaagcaccgatactgaggcagtttcagttgttgagttagacagggtggtggtttggataagaatggcattgttaggaagtagtaagaagctgttaggctcatgatgtgtatgaaggcgctgtcaaaagaacatgctgataggattataagtgaactaagtgggaaggagtgatataaaaggagaagaaatgagtgttggcttaaacaactgggtgaatagaagcagaatttactgaagtgaggaaaataggaagagcaagttggaaagttggcactaagagtttcagtttaagatattttaagtttgtgatgattattatctgtccagtttgagatgttgcgtaggcagttgaatacgtacacctggaacttggagcgattacagcctggtttatgtttggctgtctgtatgattggaatttacattcatggatctggatgtgaccaactagggaaggcaggcaggcccgagaactgactcatgggtcactccaccctgtagacctttgaaagagggaaagagggacaacaaaagagataaagaaggagcagccactaaaaaaattaaaaaaaaaaaaagaaggggcagccattgagataaaataaaaataaaggaaatgtttcaccatggacggagtagagaatgaggactgagaattgaccccaggttccagcaagatggagaatcctggtaagcttgtcaagaaagattttcaatggagtcaggatgaaagcccragtggagtgacttgatgagagaagggtttgtgaggcagtaacaagaatgagtataagacaactctggaggaattatgtatgaagggaagctgggaaatagggttgtcagttacactggggatatgggttaaaaagcagtgtattttatgacattagggcatgtttgtgtgctcataggaatgattctatcggtggaggaaatcagtgcagtagagaaaggcataattgtccttgagactggagtaagaaaggatccagtgagtaagggggaataaaagggaaaaacagtgtagttatgtgtgcaggtaggttgctcaggatggtggagagaagatagcatattcttctgttgctgttttctcagtgaaaaagaagatcaatagaatgtgagagcatcaatggaatattattagcattcagtatgggcttattcaggatrtgattaaaattgattctccgaagtacagttccttagatgtcgggttttactattttcagatctttgtacattatccctgtgttgaaatgcaaataggacttccctggaaccaaatcttctatatcccagaacttcttgtatcaacaaagtaagatggttgatacagtgcccaaatagagtaagtctaagtgatttatatgacattttctgtttaattaaaggtggttctctgcaaagaggaatcacatttatgattttttgtatttatatatttttacctgatcaaaaaaaggacttttctacattctcatcagaagtgtttaatggactagaaatcctttgatccaacagatttaggactggtaataggtctgttagtcataaaaaaatgggtcgtatattttatgtacataccataaaagtattattttaacttagaacattcaaatgtatgtctgtttgccagtatttttgatagtgtccaagtcttcctttccattgtctcattgtatttcatttttcctctaaatcacacacataatatgaagtctattatttccagttttatttatttttaaagtagaataggaaccaaacttgcagtatgagtgcagaatacgtcttgattgttatgttttctttcattttttactattgtatttcctacacttaattttcgacagctgagatttttagcaatctgtatttatcaccagttttccaaaatgttcaattttgttttcatagaatcagttgttttctccttgttattcatgagtttacactcatgaatttatttaacatttattaaattaaattagatactttcaggaaaaaagtgaaacacacctaaatttgtttggaacaaacatagttgcctcttgtgaggtggggtgctttgtcacctgggcctgcgactgtggctgtatccccaggacatgaccagccactgacccatctctgataccctaacctcttgtctgttgcctcctctggaggtaaacagtagtagttgctgtctggccttggagaggtaacctgagggttaagtttatctgaccactttgaacacagcagttaccctgtgtattgccactgtctccacacctgcttcttgctcagcagcttcttagtatgaccacccttggtggggcacccttagcttctgtgcaggaatctcttccttgtgatttggtatatgatttcttcagtatacccaatgctaaatacttcatgagtgtttcgaagttttcctcataaaggttatccatatattttaaatttttgtaagtattatgagtgagatctttcccctcatattttattgttaaatgtatattcaaaggatattgttgtttgtatttttattttatatcctgctacctttctaaattttgttgccatttataatatttaaacctttgagttttccaattagacaggcatatcctttggaaatagagttttacctctaattcttctacctctgatttttttttctgattttttaattatgttgactaataactctaatactacatcattaatagtagtggtaatgttaggcaagctgcctttttggtaagataatatatactttatcatttagggaagtatcattacagtttcactgagcttttttaaaaaaaatcaggaacatgaagcaggaggattgcttgagcccacgagttagaggcggcagtgagctgtgattgcaccactgcactccagctgtggtgacagagggtgacgctgtttcttgggaaaacaaattcaggaacagttttggtctttttttagttaccttttcagcatctatggaattgattgtgtgattttttttttctccttcactctgttggtatattgaattgtcttaatagatttccccatattgaaccattgaaacatttttttttttttttgagatggagttttgctcttgttgcccaggctggagtgcagtggcgtgatcttggctcattgcaacctctgcctcctgggttcaagcgattcttctacctcagcctcccaagtagctgggactacaagcatgtgccaccacaccccgctaacttttgtatttttaatagagacagggtttcacaatattggccaggcaggtcttgaactcctgacctcgtgatccacctaccttggcctcccaaagtgttgggattacaggtgtgagccactgcgcccagcctaaaacattmttgtaataaacaccccttgggtctttcaatgtgctgttttattagatatttagaattttttcctcagtgttcagaatattggtgtgtagttttctttttgtgagcgatctttatatcagtatcactttatgaaaacagtttggaagtcctgatcttcttagttgaaaaagaattttgatagcctgtctttaaagcttaaataagttttgtaaagctttattcttgggaaaagggatggtaagtctgatcacattctctatttgctctatgggaattgatctatataaacattttattaacatctatctcttccatgatcagttttgataaattayatttttctaaaaaattatccattttaggctgggtatggttgctcatgcctgtaatcccagcactttgggaggctgaggcgggtggatcacaaggtcaggagttcaagaccagcctggccaagatggtgaaatcccgtctctactaaaagtacaaaatttagccgggtgtggtggcgtgtgcttgtaatcccagctacttgggaggccgaggcaggagaatcgcttgaaggtggtggggcgtggcggggggmcagcgggtggaggtgcaggttgcagtgagccgagattatactactgcactctagcctgggtgacagagtgagactctgtctcaaaaaacaaaaaaacaacaaattatccattttagctgtgttttcaaatttattagcatagtcatctgtcctctgtattcatgatcattttcatttgttctttcttatttctatgtctgtgctttcttgctgttttcattatcttaaccatggcttacattttgttgattaaaaaattggtttatgaggccaggcgcggtggctcacgcctgtaatccctgcactttgggaggccgaggcgggtgggtcacctgaggtcagcagtttgagaccagcctggccaacatgatgaaacccgtctctagtaaaaatacaaaaaattagctgggcgtggtggtgtgtgcctgtaatcccagctactcaggaggctgaggcaggaggattgcttgaacccgggaggcagaggttgcagcgatccaagattgcgccactgcactccagcctgggcaacaagagcaaaattccatctcaaaaaaaaaaaaaaaaaattggtttatgctttattacttctatttctgtattctaactaattctgcttttatatcggttaatatttttcttctgctttacttcagcttaattttattttctttttttgaatgagacttttaacgatgtttttcacttttattgctgtattttagtttgtaaattttcttataagcactatggttatgttttatagatacttatatgcaggttttcaaaatgtaggcttaatttttttttttttttttaaagaaacagagtcttgctctgtcacccaacccagagtgcagtggcatagacagagctcactgcagccttgacctcctgggctcaagcacttctcctaccttagtctcccaagtagctgggactatagcacacactaccatgcccagctaattttttaattactttatttatttatgtatttttttttgagatggagtctcgctctttcacccaggctggagtgcagtggcgcgatctcggctcactgcaagctccgcctcccaggttcacgccattctcctgcctcagcctcccgagtagctgggactacaggtgcctgacaccccgcccagctcatttttgtgtgtgtgtctatttttagtagagacggggtttcaccgtgttagtcaggatggtctcgatctcctgacctcgtgatccacccatctcggcctcccaaagtgctgggattatgtgcgtgagccactgcgcccagccaatttattatttttagagatgaggtcttgccatgttgccctgactggtcttgaactcctgggctgaagagatcttcctgccttggcctcctcaagtgctgggattacaggtgtgagccaccacacctggcctcccattattttcaaaaaaacaaaaatacagccaggtggcctggctcatgcctgtaatcctagcactttgaaaggcagaggtgggaggatcacttgaggtcaggagtttgagactagcctggccaacatggtgaaaccctgtctctactaaaaatacaaaaaaaaaaaaaaaatagccaggcgtggtggcacatgcctataatcccagctactcaggtggctgaggcaggagaatcgcttgaacccaggaggcagaggctgcagtgagctgaggtcacaccactgcactccagcctgggtgacagagtgagactctgtctcaraaaacaaacaaacaagcaaaaatcaaaaacattgtttcagatcttattttcctattgacctaagagttatttaatatagacttttgaattttcaggtagattttacttktgtttcttttaattttattattaatttccagttttagtagaaaatgtctatataatttcaaccttttttttttgctaactcctagttttgtgtctagatttcagctttttaatagagaccaccttatcataattgaaaacctcatcctgtttctctctcatacacaactcattcagcttgtagattttcctctggctgttcctgttgctggcttgccatcctctggcctacatgtaacgtgacttctgttagcaagtccttcacattcagatgactgcaacagttgaacatgcacattacttttttccacatttctgagttacargcatatcctgtctttttgtgccatgaatttcataagaacttcagtaagatatagacgtgttttcctgtccgaaaaatcactgatacacatttcctaaaaaaacaggaatggccttgactatgagggaatggaaaggagaaaacctgagcaatgggaggaaagaacaaaaccagttgaacatttgtcaaatgaatgagtaatagaataagttgaagggaagattgagtaggtagaactcctcaatacctttgctatggtgtagagacaaagaaaaagttacccatagctatgtgaaggggcaaatgggcagtgcactgcataggtaaaggcataagcagtggcagatgcataggaatatacagccacctatttccattcttgtatttagctgggctgccctggatgaataaagagaatatttaatcactgtagtaaggcatgagagactagaggcagagagatacatttagaacaagtatgtagctatgggaattaaatgagtaaaacctattatatgcttagcatttattacttaatgtagcgttaactagggattgtttctgtccttgaggaggtttataggtaagaataggcagtataacaattggagaagttaataaatatataatttttaaattgagagctattataaaggcaaggaatagagaatagcaacatggatttaggtactatcaatagggtcaaccttaaaggaaatgacttttaatctaagatctcaagatgaaaggagccagccatgcaaagagcccaatcaggagatttgtgggagatagaacagactgtgaagagtcctaagagatggaagtaagttaggacatgtgaggtctgcaaggaggcctctccagggagcagtaaaggggacactggtttgagatcatatgatgtaggtaagcagaggccttcttaaccacagtgagcttgactggattctgagaatgaagaaagatgaaaaaaatttaagtatagattctcgacctctcatcttcatcagaattatcatgtagagaatattaaatatccttccaggactgcagagtctgatccaggtggtttgggtggtgtctaaacctcagtgttagtaacaagctatgtggtgattctgatccacacctcaatatgagaaccactgacttaaaatgtttacttcatcaccaatcttgctattttgtatgaactctcatttttcctgatgttccctttggctttttttttctttccaaattgtataacaatattttagagttttggttaaggattacttttgttgtcttttatttctacattagaaatgwtgcttcttttagtaaaagaaaacagcatgtgtttgctttcttgttttattttagatttggagaccaagtatgagaccaagaagttatctttagaaaatgacatttatgaaataaatttatcccagtggaagataatggaaagaattgaaaaccatggccttaagggtctcattttaaaaaatgattgggaatccacaggaaaaattgaaggacaggagagacctcaagaaggatacttcagtagtgtgaaaatgccatctgaaaaggtgtcctcttaccagaaacgcacatctgttactccacatcagagacttcattttgttgataaaccctatgaatgtaaggaatgtgggaaggcgttcagagtgcgccaacagcttacttttcatcacagaattcatactggtgaaaaaccgtatgaatgtaaggaatgtgggatggccttcagacagactgcacaccttactcgacatcagagacttcattctggtgaaaaactctatgaatgtaaggaatgtggggaagctttcatatgtggtgcagatcttagagtacatcagaaaatgcatattggtgagaagccctatgaatgtaaagaatgtgggaaggcttttagggtacgaggacaacttactctgcatcagaggattcatactggtgagaaaccctatgtgtgtaaagagtgtggaaaagcctttagacagtacgcacacctgactcggcatcagaagcttaatagtgctgacaggctctatgaatgcaaagaatgtgggaaggcctttttgtgtggctctggtcttagagtacatcacaaacttcatactggtgagaaaccctatgaatgtaaggaatgcgggaaggcctttagagtgcgacaacaactaacactccatcagagaattcatactggtgagaaaccctatgaatgtaaggaatgtggaaagacctttagccgtggttatcatcttattctccatcacagaattcatactggtgaaaaaccttacgaatgtaaggaatgctggaaagcctttagtcgctactcacaacttatttcacatcagagtattcatattggtgttaagccytatgactgtaaggaatgcgggaaggccttcagactactttcacaactcacacagcatcagagtattcatattggtgagaaaccttataaatgtaaggaatgtggcaaggcctttagattgcgccaaaaacttactctacatcagagcattcatactggcgaaaaaccctttgagtgtaaggaatgtaggaaggcctttagacttaattcatcccttattcaacatctgagaattcattctggtgagaaaccmtatgaatgtaaggaatgtaagaaggcctttaggcaacattcacaccttactcatcatctgaaaattcataatgtaaaaatctaagaaagtcttttcaacttctgtgttatagaacattctatgaatgtagtaattaatctattttgctccatacatgcaactgcgttggcattagaggttttataccattaaaagagtgtgacaatgtattgtagtccatcatcactcaaacctgaaacttcagcatatttgttctaaaaactaatcctgttataagaatgaraaagacatttaccgtcatccctatcccatcactttgtgtcatactggacaagacgcttaactgctctgtgctataattttttaatttatgacatggtcatataagagtgcagcagtttgacacactttcaatcaagaggtggaatctacatccctctgttgtatacaggaatctacatccctctgtgactgcttcgcccagtagaatatggtagacgtactgctgtgctggtttcttgactcagactttactggtagggttacttcatctcatgaaatgacagaactgtcttgttacaaagtctggctactttgctgaagagaccacatgaagaggccctgaaactacgtagagagggagaggcacctgctgaaccctgtcttcttgacatccaccaagataccagacatttgagtgaaattttggatccaccagaccagccaccagctaaatgccagtgagcgacttggtaacctgaactgatgccatgtagaatggaagaattgaccagctgagcccctgcccaaatttctgacccacaaaaacatgagatataataaaatggttgttgttttaagccactaaactttcttttattatcatactaaatatttmtttttacataattcatactaaaggctgtgggcataatgagtatagaaatgccttccaccaacatttaatcttcattgaacttgagatatcttattctcgttaaaatattgaaagtaaggaattcctttccagtttgttcattaaaaaacagataccctagaccaggtgaggtggcccatgcctgtaaatccagcactttgggaggccaagtaaggacgattgcttgaggccagaagttcgagaccagcctgggcaacatggtgagaccctgtctctaccaaaaaactttaaaaattagctgggcataatggtgcatgcctgtagtcctagctactcgaggctgaggtgggaggatcatttgaacccaagagttgaggcttcagtgagctgtgattgtaccactgcactccagcttgagtgactgcaagaccctgtctcaaaaaaaaaaaaaaactacaatcagtattctctggccccagtcaatattaaaaattgacaaaggataacatgaaactttggaaattaaaagtcacctgtattatgaagccccattaattttttaaactacttcattgttttttaaaaatgctaaattgtcaatttagcattttgaggcaatcccctcaaattggctcctgtgtccttttatcatgaccactccaacctttgagcttttttttttcctgaaccaaatgcattgattagttatggagcatactagagcattattaacaaataaaggaaaagaatggaatatttaccttgcctatcctttacaaactatatttcaagacaaccaaaagttggtgaaggaaagttgttgattagagaattccaactggttaaaaggtcaaaggaggccaggcgcggtggctcaagcctgtaatcccagcactttgggaggccgaggcaggtggatcgtgaggtcaggagatcaagaccatcctggctaacacggtgaaaccccatctctactaaaaatacaaaaaattcgccgggcgtggtggcaggcgcctgtagtcccagctactcaggaggctgaggcaggagaatggcttgaacccgggaggcggagcttgcagtgagccgagatcgcgccactgcactccagcctgggtgacagaccgagactctgtctcaaacaaaaaacaaaaaacaaaacaaaacaaagatcaaatgaatgatagaatttgaaaactacgctctttaattttacaaaatcatggattttcgtggtgatagcaatggatgtgaagaccattaggtgaaaaatggataggaagcttataatgcatggagcagaatgacaggacactaatctatattaacatctctaaatgagatcagccagatgaacttgatgtgatgaaatggatacacacagtggacacctgtgaagttttcttggctcccccaaaactgagaagtacaagttagtctccaaacctaattaccagtttacaggaaacatggggaataaaagaacaaattaacaacacaaagaagcaaacaaccaaatgcacaatttgggaaattctgcagaagtaatggcctagttttttaaccaatacatgtcaaaaaaaaaaaaaaaaaaagacaaaaatggaatcctacactttaaaggagactaagaaacgtatccttcaaatacagtgtatggagcattttaggatccttgtgttaaaatgcgcttgggatttgttttaatcaatcatggtgagacaggcagacatggaaattattgtcatgaaggaagaagtttatacgcagatcccacaaacgggaggcatggcatggcatgcagggtcacgtaaagaagcacctgggtgtatcaggaggcagagggtgagagcacagcatggcccagagcttttattgggggttttcatgggaaggaatggacaaggcaggggtaggcacactggtaagcttaggattgaatagtttgagtaattttgttggtctctgggatctaggggggattcgtaattgtctagttagggcaggggaatattgaattggtgtatgagagtttggtaaaggagatagttgggagtatgggctctggattggttggtttgtatatgaaaggcatgcttgcagtggagtttatcatctatgcattagcttgccctgggaggggcagcctatccaggatcaaggccccaagtggccagagcatcaggaatacagaaaataaagaaaacatagtcaatacaagatttgaaggaataaaatgtctctacatattgtacaaatgtaaacatggattggttactaaatgatacgaaataatttattgttcatatgttaggcatgactatggcattatgggtatatgtgtatgagtccttaagtgttagagattcatactgaggtatttaaggctgaaatgttatgcctgtgatttacttttaaatacttaaaaacaaaaggtgggagggatagatgaaacaagattagcaaaatgttggtaaatgtttaatctggatcattaggtacacagggttcattgtgccgttcttactatctttacatatattttaaattttccataataaagttttttaaagtagaaaatcaagtttgggccaggcgtggtggctcatgcctgtaatcgcagtactttgggaggccaaggtgggtggatcatttgaggccaggagatcaagaccatcctggccaacatggtgaaactctgtctctactaaaaatacaaaaattagctggacatggtggcacgcctgtagtcccagctactcgggaggctgaggcaggaaaatcgcttgaacccaggaggcggaggttgcagtgagctgagatcacaccactgcactccagcctggcaatagagtgagactccatctcaaaaaaaaaaaaaaagaaagaaaatcaagtctgaaattgtagactatttagtgatgaatgatcacatgttgcctacagataacttgggggaaatcaccaaccaaagctctacttggtagaaaatttaaagcaatgcatttagaacatctggattgagaaataagtatttgtgttgttcaccattctgttcacacacctacagtgcctgtcacataacaggcaatttatgggaaaaaataaggattaacttaagctagaaatttttaaaaactaaggtgaataacagcaagtagtttatatgatcaaataaattaatggaatagttaataaaataacagactaaggatattctctttgaaaagaacattaatatagaattggcagttattgagggaaaaacatgactcacagctttatgtatggaaaaagtgaaatagctacataatgaggtttttttaaaaatttaagttacatattactatatacatatatttcaatgtttcagtattactatatacatatatttcaatatgtttcaatctagagaaacctaaatgatcaaagttgaccccagataccaaaaaaaaaccctgaactaatccataaaggggaaaatatgtacagttatgatcttgttttttaaaaactagaatctatagatttacaggcagtaaaaagctttaaagaatatataacccataacaaaattttactagatcgttatataaggcaaatatcccaatataaaattagatgaggataaatacctcctaaaaagcaaaatgtgggccaattttacttaagatatatgcaaacattcgcaaaaaagtatcagtaaattgaactcaatagtcaattaaaacaattataaaacataaaatgatttactaggaataccctggggcctggcctgttctcatttaaatatgtatccagattttaggtttcctgacttgaacaatgcaacaatgttacaaaaaatgacatgattcagtcacagtatcttttagatggtttctattctcatttatcttagtttcattgactttacaaaaggaatgaacaatacatataaaaataggaattcaacacaaaaattattaccttttttcttagtctgttttgtgttcctataaaagaatactggctgggtgtgatggctcacgcctggaatcccagcactttgggaggctgaggcgggtggatcacttgaggttaggagtttgagaccagcctggccaacatggcgaaaccccatctctactaaaaatacaaaattagccaggcatggtggcgcatgcctgtaatcccagctacttgggaggctgagaaagaattgcttgaacctgggaggtggaggttgcagtgagctgagattgcaccattgcactccagcctgggcaacaggagcaaaactccatctcaagaaaaaggaaagaataccacagactgggtaatttacaatgaacagaaattggctcgcagttctgaagggtaggaattccaacattaagaggctggcatctgataaggaccttcttgctgcgtcatcttatggcagaagggcagagaggataagagagagagagggcaagagggagcccaactcatcttttgataaagaacccactcctgtgataatggcattaatccattcatgaaagcagagtcctcatggaccaatcacttcttaaaggtcccacctcttaatactattgcattggggatcaagtttttccctaaaacttgggggtgagcattgggggacacattcaaactatagcgtggcttctctggcctcccaaattcatgttcttctcacatgcaaaatacatacactccattctgattgccccaaagtcttaactctttcaagcacaaactcagaagttcaatctcatctagatcagctattgtgagacaaggcatgatttatcctgaggcaaattttcctccagctgttagtctatgaaatcaagcaagatatttactcccaaaacacaacagtgggacaggcatagcctagacattcctattctgaaagaaatagggaagaaaaaggggataactggtcccaagtaggtccaaaacccaacagtgcaaacaacattaactcttttttttgagacggagtctcgctctgtcacccaggctggagtgcaatggcgtgatctcggcccactgcaacctctgtctccagattcaagcgattctcctgcctcagcctcccgagtagctgggattacagcatctgccaccatgcccagctaatttttgtatttttagtagagatggggtttcaccatgttggccaggctggtcttgaactcctgacctcaggtgatccacctgcctcggcctccaaagtgctgggattacaggcgtgagccagcgcacccagccaaacaacattaactcttaaggctccagaagacccttccttaactctatgacctacttggacacactggggtgggggctggttctcagacagccttgcccccatggctttgctgggcttatgccatagagcatctgtcacaggttggagttttacactggtaggtcttcagttctggggtcttggggatggcctctctccattaggcactgtcctagtggggactctctgcagtggttctgctcatggacaaatctgactgggcccccaggctacccaaggcatcctttgaaatctaagtgaaggaagccatgcccccgtgactcttgcattctgcactcctgccaaattagcaccacattgatgctgccaccacaagcttacagcttatgcccagtggcaggctgagccacacctgagccagcaggaaccaatggctggggcagccaagggcactctactggcatgtgggaagcagagtcatgaggcagcatgagccagtgaatgctgtctgtgatggaaggggcagcctcaaagagcgccagaatgccttcagggtcattctcccactgtcttgatagctcctgtcttccttctattcatactaatcttttcagcagtctctgggtatacaaccttggtttgcactcctaaacacaccttttcacttcataaatggccaggctgcaaattttccatatctttttgttctgccttccttttaattatgttttatctttaaatcatttctacctctcacatcttactatatgcagttaaaagaagccatgtagctctttcagtattttccttagaaatttcttccaccacatattagttcattgctcttaaattctgccttccaataaagcccaaggcatggacacaaattcagccagattctttgttaatttctaataaggatggcctttattccagtttccaataccttgtttctcatttccagctgagacctcaccagaattgcctttgccatccctatatttatcaacattctgatcacaaccactgaagtaatctctaaaaagtttc

SEQ ID NO: 96819 - DNA, 12858 bp, Homo sapiens
tctaaatttcacccctaatcaaatcaagacagaagaatcaaaagacaacattctgaaagtcaaggctttaggcatgggcacacgtacttcaaaccggtatgaaattactaagagtcaggcataagacaccagctcccataaattttatctgactgaagattatatctagctgtaaaattcaaaaggactactccccaactaagatgtctttaagttctccctcaggtactcaccttaaaatgctctacaattttgatcaaaatccagcgcgccactcccagacctactgaatcagaatcttcaagagaggagcttgagaatccatatggtttaacaaactccaggtgattatttttatttacttttgagacggagttttgctcgtgttgctcaggctgaagtgcaatggtgagattggctcactgcaaccaccacctcctaactccaggtgattcttattatcagacaagtttaagaaaaactcctaatggatagtgaaagaatacttaagaaattttggagatggcataagtgcaatagctataccttcacacttaattagaaccgtgtgttttcctatgaccagcagggattacttttattaaacaatgataatggcaaaatatctggttcaaaatcatctctgctcagattttgttcttttttgccactgatagtcatttggaactaggaggggaaaaaggagtgtgtcacttcatagttcagttttaagtttctcatataagccatcctgatcaatcatgtctgtgtgcccgttccagcggtgataggcaaggagtgcagcgttgtgggctgcaatggcactcatctccatggcacttgctgcacactctatgccattgaggtaataaagtcgatcatggagaatgatagaggggcatttctccgggggcttatagtgaggatatgcaagccatggcttcttcacagcataatcataggacagaaagagctttaaaatttgtgctttagtaagagtttcttgggaaaagatcttccaaacatatgttccatctgttgatggctcaggatcttccttttctctcacagagggcacaatcccaatactgttaatgaacaaatctgaattatcagtggttaaaactgtattaaggccaaatttatctatgggtctagagctaaagatagatgtattcaattcccccttaactaaagttgtcactatatgttgataatattgatggaattcctcaattggaggatcaaagttgagaaaagtaatattcgacatttttcgattcaacggagtggccaccaagacgatgtcatagaagtctgaacgagtctcagttccaatttggtagaccacttcatacatctttgttggatttcctagaggaaataaggaggcatatatttgtttagtgtttctaacataccttctaaaaataattgtataccttcttcataatttctctataattctaaagaattgaagaagttatatcccttaagatagttgtcccttgcatttttattacattgaggccaatttcttattcagaatgtcagtaagtacaaaatacagaatttttacttttgaaggtaagattatctttcggccgggcatggtggctcacacctgtaatctcagcactttgggaggccgaggtgggtggatcacgaggtcaggagatcgagaccatcctggctaacatggtgaaaccccgtctctactaaaaatacaaaaaattagccgagcgcggtggcaggcgcctatagtcccagctactcgggacgctgaggcaggcgcctatagtcccagctactcgggacgctgaggcaggagaatggcgtgaacccgggaggcggagcttgcagtgagccgagataggccactacagtccggcctgggcaaaagagcgagactccatctcaaaaaaaaaaaagattatttttcaaatccaaggagtgatgccacagcacttaactacactggggaattttttttttttttttttttttttagatggagtctcactccgtcacccaggctagagtgcagtggtgtgatcttggctcactgcaacctctgccccctgggttcatgtaattctcctgcctcagcctcccgagtagctgggattacaggcacctgccaccacgcccggctaattttttgtatttttagtagagacagggtttaactatgttggccaggctagtcttgatctcctgacctcaggtgatccaccctccttggcctcccaaagtacagggattacaggcatgagccaccgtgcctggcccattggggaatatttctatatggtacaatatatacaatttcaagtttcatcattttagaactgagtaagagatgacagaagagaagtgtttctccctgagcaatcattttctgcaggggatatcaggaacaataagaaattcaagcttacctgtgtacttggtctttgttttctcctcgatgtacattactgagccagatataagattgcttttggatgcctgcagaagccctgagcaaacaagtttattgccaccttctactgcccaaaggccagaatcagaacaggacagtgacaccgcccctgtcaataggaggaaaaatgtgttttaattctgactttttgtaagaggctctctacccactctcccttcccaattacatgttctactccaaatgtctctagacattgctaaatggcccctgggagcaaaatctcccccagttaagaattactgaactaatgaaagctaaagaccctctccccctaaaaatgcacatctacatacgcacaattttgctaacaatgtctgaggttcacagagaaaagtagcctccaatccacagcctaaagtcaggaaccaccatagcatcaggtaagcccctctgtgaactaatgtccaccactgtttcaagccctggcttacccacaaaggcattgatgtccgtgctttggccataattgaccctcataacaggagcaatcatttcattgaggaacttctcagaaaagccggccttttgcaaggtttcaagaagtgttcgattaagcattccaaggaagtcatctcctcctagagcatgaagtaatttttcgacactactgaaggcatagtcatgagactggtagcggtagatcctttggaaaagaagagaaatccattaaataccaaacaagatgtggggaaggggatgtataaagaagggaagtggcgtcataagaatcaaactgacatctaggtgcagtggctcacgcctataatccccacactttgggaggcagaggtgggcaggtcacctgaggtcaggagttcaagaccagcctggccaacatggcaaaaccccagctttactaaaaatacaaaaattaaccaggcatagtggtgtatgcctgtggtcccagctacttgggaggctgaggcaggaggactgcttgagccccggaattcaaggccgcagtgaactgtgataatgccgctgcactccagcctgggccagacagtgacagtgtctcttaaaaaaaaaaaaagaaaaaaaaaaagaaaagaaactaaggaagaaagaaagaagaagaaaaaggaaaaataaaaagtagaagtaaggccaggcgcggtggtttcatgcctgtaatcctagctctttggaaggccaaggcaggcagatcactaggtcaggagtttgagaccagcctgaccaacatggtgaaaccccgtctctactaaaaatacaaaaattagctgggcctggtggcgcacgcctgtaatcccagctattcaggaggctgaggcaggagaatcgcttcaacccagaaagcggaggttgcagtgagccgagatcacaccgctgcactccagcctgggcaacagagcgagactccatctcaaaaaaaaaaaaaaaaaaaagtagaagtaaaatactttgtctaaaggccacatggcaagtataaggctcaatcacaacttgcccactctgctgtcaatcacccacacatgcacagtctccactggagcacacctgacccattcactggtctctaaatttgccctacatgctgtatccccaccagtgcacaagctcttccctccaacctgaatacacttcccattcctaaccatggaacatctattcttccttaacagaacttgaatcccaccttctctgaaaagtcttgctcaacttcccagtccacagttatatcatctccagaagcctcataaaacttagcaccaatgccactcattcaacaattagatgctttctattattttttagaaaacatcacttgaccaaaaagaaaaatatcacccaacacttctctgcattttatggatttaaaacaacattcacataaattagtgcattcagtaattcaaacacaatttttcatgttgcaaatagtacaaagatggaaaacaggcttaagtttgggataagtaatacggggtttatctcttattcccttaaggggcttatagttagggataagtaataaggcacatgcagagataagtatatgaaaataagaaattaagagccaaggaaagatccctatcactgatcatggaagggaaactttcacatcaagtttttctctcaaaatgtactatatttttttacagaacaagggacagtattataaccatttcagtattacctactaaaagcatagtagtagtataagtgtacaaaatgttaaacacatttttattggaaaaactgattcgatatctatgccaaaactgagaaactaaataccttctaaccatagcatttgggtcccagtctttaggagactggaaaaagtaggatggaaacactgaattcttcagaaaaataatagcctggatatctcatatccaaagaagagtgatctttggctaatggtcaacatgagaaaataacagtcaattaaataagctactaatgatgctataaaaaacatattccccaactgctcctgccagagctgcaacctcactcaagcaagtctccctgggagggggcggggtggcagcggtgagatgaaactatatacacaatataaacagagagcactctaattgtttcatgatacaactaatcgtattagaataaatacactgctgggtatggtggctcatgcctgtaatcctagcactttgggaggcaaagtggggcagcatcacttgaggtcagtagtttgagaccgcctggccaacatggtgaaaccccatctctactaaaaatacaaaaattatccaggtgtggtggtgcatgcctgtaatcccagctactcaggtggctgaggcatgagaattgcttgacccaggagacagaggttgcagtaagtcaagatcacaccactgcactacaccctggatgacagagcaagactccatctcaaaaaaataataataataaatgaaaaaacagaataaatactactaaaaaacagcacccaggtgaggcagcatgcacctgtagtcacagctactcaagaggctgaggtgggaggatcacttaagcccaggggcacaaggctgtagtacattatggttgcacctgtgaacagccagccaatatactccagcctgggtgacagagtaagacaggaggataccttgaggccaggagttcaagactagcctgggcaacatagcaagactctgtctgtacacaaaatgtaaaaattagccaggcgcagtggttcatgcctgtaatcccagcactttgggaggctgaggcgggcagatcgcttgaggtcaggagtttgagaccagcctggccaacatagcgaaaccccacctctactaaaaatacaaaaattaactgggcatggtggcgcatgcctgtaataccagctacttgggaggtggaggcaggagaatcgcttgaacctgggaggtagaggttgcagtgagccgagatcgtgccactgcactctagccttggtgacagagtgaaactccctctcaaaaaaaaaaaaaaaaaaattaaaaattagccaggctcctatataatagattgatcatgcaccatatccacaggaggttggaaaaaccatgccattttctggaatttaagggtgttgcattatttcatcaatcatttgttgacaaaaaagaaaaactaaaaaataaatttaaaatgtgaaccttcaggtattgagtaacacctttatcttggtatagaactgatactttttttttattttgaaatatctgataataatttggaatgaagtaaggttctgttaaagaaaatatatttgaagaccctttaaagcagtgaatctgaaacaattttcacacccttaagtggttgataygtacctatttttaggtattttgaggtatttaccataaactaaatttagaaattttttagattcacttgaagtaaacattacaaacattggatacggtggggttttctttagattttacttgagagaaggtgagtacaaagcaatttgcagttgttgtaatgacaagattactgcgcaagtgtgaatccaaacagtatagcttttaaattttaaagcatttggtaaattatcgctgagtttttttctgttgccaatagcaaactgcttttccattaatggagaattcacgcctttcaagcattttaaatatgacaatatttataaatgtatggtttggaggaatcgtttaaattctctttcctaattttctttcttttgaagatagattctttcaacaagtaatttgtagtaatgactgtgttgacttcaattttggagcgcagtagctatgttaaagatgaactatttggtctcattgaagccaacacagaacttgctgctgtgttttttcttcagtgataaataaaatacttacagaaaaaaaaaaaaaaaaaaattagccaggcatggtgaggcatgcctgtagtcccagctattcaggaagctgaggcatgaggatcacttcagccccgctggttgaggctgcagtgagctgtgatcacaccactgcactccatccagcttgggcaacagagtgagaccttgtcttaaaaaaaacaaaaacaaaaacaaaaaaataataatttttaaaaaaatataactggggccaggcacagtggctcacgcctgtaatcccagcactttgggaggccaagacaggtggatcacctgaggtcaggagttcgagaccagcctgaccaacatggagaaaccctgtctctactaaaaatacaaaattagccgggcgtagtggtgcagtggcacagtgagccaaggtgagccgaggagagccaagatcgtgccactgcactccagcctgggcaacagagacagactccatctcaaaagaaaaaaaaaaggagaaaatggtctgaaaagaagactagaaatacatggggttaggagggttgaattctaaataagactgtccaaaaacaagagtggtcaggaaaagcctcactgagaagatgatatagaccaaagacccgaaggagatgaggatgcaaaccaggcaaacacctgggggaaaatatttccggtagaggtaaaagcaatgcaaaggtcacatgacagaagcttgcctggcacattcaagaaacaatgaagccagagcagctgaagcagagtgatatgggagaaccgggagtggtacagccagaaatgttactggggagaggaaacttccagaatggcagaggaaggacctctggaaatctgctcctccataaaagctatgagaatactgccaaaaatgatcaacattgactctttcagagctctgcagataaaccaaagcctttccaagtccaaggagtatttattcaagaaaaatgtctggcaggcatggtggctcacacctgtaatcccagcactctgggaagctgagccaggcggatcacttgaggtcaggagttcaagaccagcctgcccaacatggtgaaacaccatctgtaccaaaaatataaaaaattagccaggtgtggtggcacacgcctgtaatcccagctattcaggaggctgaggcaggagaatcgcttgaacccaggagatggaggttgcagtgagccaagatcgcaccattgcactccagcctgggcgacaagagggagactccgtcgaaagaaagaaagaaagagaaaaagagagagagaaaaaaaaataaaaaataaaaccagcacccttccaactgcaatgtgaaactagcaagctagaagccactggagagaacacaacgagtttgtagctcccaaaaagcactatcctcagagaactgtcaatatttgacctatctggcagctccgaaaaagctctatcctgaaggcttgtctttattcgacctgattcaaagttcactctatgcaacagccccatcctgagggcacgtgtccacgtgtcaaaaaaaaaatctgtggcaattgtttaacatcacagatgccggaggctatgacatcaatagagactacaagaggctgaccaaaaaaactttttaaaaaaggccgggtgcagtggctcacgcctgtaatcccagcacattgggaggcacaggctggaggatcacttgaggttaggagttcgagaccagcctggccatcatggcgaaaacccatctctactaaaaacacaaaaaattagccagggttggtggtgcatgcctgtagtcccacctactcaggaggctgaggcacaagaattgcttgaacccgggaggcagaggttgcagtgagccgagatagcgccactgaactccagcctgggcaacagagcgagactctgtctcaaaaaaaaaaaaaaaaaaattagctgggcatggtagtgcacatctgtagtcccagccactcaaggggcctgaggttggagaattgcttgagcctgggaggcagaggttgctgtgaacatactacactctagcctgggcaacagagtaaaacatcatctgaaaaaaaaaaaaaaacagacacacagatccttgaaacaaataagaaaacccagaaataaaccttcatgaatatgatcaaatgatcttgacagaactgaaatacatagttcaacaataatggagacttcaatatcccattttcaataatggacagttactgaaaatgacaacagtgtattagttcaccaagactgccataacacagtaccaaagactggatggcttaaacaaaaaaagttttatttcttatagttctgtaggccaaaagtccaagatcaaggtgtggatgcattcggtttcttctgaggcctatttccttggcttgcagatggccaccttcttgctgtgtcctcacatggtctttgtgtgtttcttctgtgtcccaatttttttttttttttttctgagacagagtttcacgcttgttgcccaggctggagtgcaatggctcactgcaacctctgccgcccaggttcaagtgattctcttgcctcagccttcctgagtagctgggattacaagcatgcaccaccacgcccagctaattttttgtatttttagtagagaaggggtttcaccatgttggtcaggctggtctcgaactcccaacctcaggtgatctgcccgccttggcctcctttctgtgtcctaatcttaaggacacccatcaaattgttttagggtctacgctaaagacctcattttaacttaatcacatatttaaaggccctacatacatatgcagtcacattctgagtactgggtggctagtgtttcaacctatgaattttggggaaaacaaatttaaaagtaagggatgagagcacagaatcctgtcatgtcttctcagtcacaaaacagattttggctataaatctctattaatgaaatagccactgaaggtttctgagttagtggagtgatgtgatgagccttagattttaaagaactactttggctgctaacctgagaacaaatggtagcaatataacagtaatggcagatgatttaggaggtgtcttggttttccactgctgctataacaaattaccacaaacttagtggcttaaaacaacacaaatttacggccgggtgcagtggctcacacctgtaatcccagcactttgggaggctgaggcgggtggatcacgaggtcaggagtgcaagacctgcctggccaagatggtgaaaccccatctctactaaaaatacaaaaattagccgggcatggtggtgggcgcctgtgatcccaactactcgggaggctgaggcagagaactgcttgaacccaggaggcggaggctgcagtgagccaagattgtgccactgcactccagcctgggtgacagagcaagactctgtctcaaaacaaaaaacagctctccctctccccctccccctccccctctccctctccacggtctccctctgatgccgagccaaggctggactgtactgctgccatctcgactcactgcaacctccctgcctgattctcctgcttcagcctgccaagtgcctgggattgcaggcgcgcgccgccacgcctgactggttttcgtattttttggtggagacggggtttcaccgtgttggccgggctggtctccagttcctgaccatgagtgatctgccagcctcggcctcccgaggtgccaggattgcagacggagtgtcgctcactcagtgctcaatgttgcccaggctggagtgcagtggcgtgatctcggctcgctacaacctccacctcccagccgcctgccttgacctcccaaaagtgctgagattgcagcctctgcccagccgccaccccgtctaggaagtgaggagtgtctttgcctggccgcccatcgtctgggatgtgaggaactcctctgcccggccgcccagtctgggaagtgaggagcgcctcttcccggccgtcatcccgtctaggaagtgaggagcgtctctgcccggctgcccatcgtctgggatgtggggagcgcctctgccccgccgccccgtctgagatgtgaagagcgcctctgcccggccgcgacgccgtctgggaactgaggagtgtctctgccccgccgccatcccgtctgggaggtgaggagcctctctgaccagccgccctctctgagaagtgaggagcccctccgcccagcagccgccctgtctgggaagtgaggagcccctctgcccagccgccaccccgtctgggaggtgtacccaatagctcattgagaacgggccatgatgacgatggcagttttgtcgaatagaagtgggggaaatgtggggaaaggaaggagagatcggattgttactgtgtctgtgtagaaagaggtggacataggagactccattttgttctgtagtaagagaaattcttctgccttggaatgctgtttatctatgaccttacccccaaccccatgctctctgaaacatgtgctgtgtccactaagggttaaatggattaagggcggtgcaagatgtgctttgttaaacagatgcttgaaggcagcatactcgttaagagtcatcaccactccctaatctcaagtacccagggacacaaacactgcggaaggcggcagggccctctgcctaggaaaaccagagacctttgttcacatgtttatccgctgaccttccctccactattgtcctatgaccctgccaaatccccctctccgaagaacacccaagaatgattaataaatactaacaaaaaaaaaaaaagttataatcttacggttctgtaaattagaagaccaaagtcagtctctccgggctaaaatcaaggtgtgcacaaggctggttccttctagaagctctgagggaagactgtcttttccagcctctacaggccacctgcattccttggctcgtggacgcacaccccttcctagcatcactccaatctcttccttccatcatcacatctcctactacctaccctgatcctcctgcctctctaaggacccttgtgattatattgggcccacctagataatccagaataatctacccatccttaaccatatctgcaacgtctcttttacctcaaaaggtaacacattcacaggttccaggaattaagacatggacatcttgtggcagacagcaggggagaggattattcagcctataataggaggctactctagcaatccagacaagagacagtggtggtgacttggaacaaagtggtagcagtaatcctggagagaagtagtggaatactggatgtattttaaaggctgatgggattcaagatagagtgggtttgggaaatgaaagaacaaaaattgactcaaaatatttggtaggagtaactggaaggaagaaagggtgtttataaagcctttccctgtgagtctatcagtctcagatcaagaagtgttaaggatcttacaagtccccagaaatgcactaacttgagagagaagaataagctttaacctagtctacaagccaagatatctcaacaggaagccatcagcagaccagagatttaaattccacaaacatctgagtaaacatctactacattctagttactgtgcgtagcatagaacacaagcacacagtgtgcaccgtataataagggatgtttgaaaagaaagatgaatgttgattgaagcattaaggaaatgctttgctgaaaaagtgagataagaggttggacttgggagtaaagaatggcatccggctgagcgcggtggctcacgcctgtaatcccaacactttgggaggccaaggtgggaggatcacttgagcccaggagttcaagatcagcttgggcaacatggcaacaccctgtctctacaaaaatttaaaaaattagccaagcatgatggcacatgcctatagtcccagctgaggctggaagatgacttgagaccaggaggtcaaagctgcagtgagctgtgattgcaccaccgtactcca

SEQ ID NO: 96820 - DNA, 17728 bp, Homo sapiens
ctggatattagccttttgtcagatgagtagattgcaaaaattttctcccattctgtaggtggcctgttcactctgatggtagtttcttttgctgtgcagaagctctttagtttaattagatcccatttgtcaagtttggcttttgttgccattgcttttggtgttttagtcatgaagtccttgcccatgcctatgtcctgaatggtattgcctaggttttcttctagggtttttatggttttaggtctaacgtttaagtctttaatccatcttgaattaatttttgtataaggtgtaaggaagggatccagtttcaactttctacatatggctagccagttttcccagcaccatttattaaatagggaatcctttccccattgcttgtttttgtcaggtttgtcaaagatcagatagttgtagatatgtggcattatttctgagggctctgttctgttccattggtctatatctctgttttggtaccagtaccatgctgttttggttactgtagccttgtagtatagtttgaagtcgggggcataatgcctccagctttgttcttttggcttaggattgacttggcgatgtgggctcttttttggttccatatgaactttaaagtagttttttccaattctgtgaagaaagtcattggtagcttgatggggatggcattgaatctataaattaccttgggcagtatggccattttcatgatattgattcttcctacccatgagcatggaatgttcttccatttgtttgtatcctcttctattttgctgagcagtggtttgtagttctccttgaagaggtccttcacatcccttgtaagttgtattcctaggtattttattctctttgaagcaattgtgaatgggagttcagtcatgatttggctctctgtttgtctgttattggtgtataagaatgcttgtgatttctgcacattgattttgtatcctgagacattgctgaagttgcttatcagcttaaggagattttgggctgagacaatgaggttttctagttatacaatcatgtcatctgcaaacagagacaatttgacttcctctttcctaattgaataccctttatttccttctcctgcctgattgccctggccagaatttccaacactacgttgaataggagtggtgagagagggcatccctgtcttgtgccagttttcaaagggaatgtttccagtttttgcccattcagtatgatattgactgtgggtttgtcatagatagctcttattattttgagatatgtcccattaatacctaacttattgagagtttttagcatgaagggttgttgaattttgtcaaaagccttttctgcatctattgagataatcatgtggtttttgtctttggttctgtttatatgctggattatgtttattgattttcatatgttgaaccagacttgcatcccagggatgaagcccacttgatcatggtggataagctttttgatgtgctgctggatttggtttcccagtattttattgaggatttttgcatcagtgttcctcaaggatattggtctaaaattctctttttttgtggtgtctctgccaggctttggtatcaggatgatgctggcctcataaaatgagttagggaggattccctctttttctattgattggaatagtttcagaaggaatggtaccagctcctccttgtacctctggtagaatttggctgtgaatccatcttgtcctggactttttttggttggtaagctattaattattgcctcaatttcagatcctgttattggtctattcagagattcaacttcttcctggtttagtcttgggagagcgtatgtgtcgaggaatttatccatttcttctagattttctagtttatttgcgtacaggtgtttatagtattctctgatggtagtttgtatttctgtgggctcattggtgatatcccctttgtcattttttattgcgtctatttgattcttctctcttttcttcttaattagtcttgctagcggtctatcaattttgttgatctttttaaaaaaccagctcctggattcattgattttttgaagggttttttgtgtctatatttccttcagttctgctctgatcttagttatttcttgccttctgctagcttttgaatgtgtttgctcttgcttctctagttcttttaattgtgatgtcagggtgtcaattttagatctttcctgctttctcttgtgggcatttagtgctataaatttccctctacacactgctttaaatgtgtcccagagattctggtatgttttgtctttgttctcgttggattcaaagaacatctttatttctgtcttcatttcgttatgcacccagtagtcattcaggagcaggttgttcagtttccatgtagttgagcggttttgagtgagtttctcaatcctgagttctagtttgattgcactgtggtctgagagacagtttgttatatttctgttcttttacatttgctgaggagtgttttacttccaactatgtggtcaattttggaataggtgtggtgtggtgctgaaaagaatgtatattctgttgatttggggtggagagttctgtagatgtctattaggtccacttggtgcagagctgagttcaattcctggatatccttgttaactttctgtctcattgatctgtctaatgttgacagtggggtgttaaagtatcccattattattgtgtgcaagtctaagtctctttgtaggtctctaaggacttgctttatgaatctgggtgttgctgtattgggtgcatacatatttaggagagtaagttcttattgttgaattgatccctttaccattatgtaatggccttctttgtctcttttgatctttgttggtttaaagtctgttttatcagagactagaattgcaacctctgccttttcttgttttccatttgcttggtagatcttcctccatccctttattttgagccaatgtgtgtctctgcacatgaaatgggtttcctgaatacagcacactgatgggtttgactctttatccaatttgccagtctgtgccttttaattggagcatttagcccatttacatttaaggttagtattgtgatgtgtgaatttgatcctgtcatgatgatgttagctggttattttgctcgttagttgatgcagtttcttcctagccttgatggtctttacaatttggcatgtttttgcagtggctggtaccgcttgttcctttccatgtttagtgcttccttcaggagctcttttagggcaggcctggtggtgacaaaatctctcagcatttgcttgtctgtaaagtattttatttctccttcacttatgaagcttagtttggctggatatgaaattctgggttgaaaattgttttctttaagaatgttgaatattggcccccactctcttctggcttgtagagtttctgccaagagatccgctgttagtctgatgtgcttccctttgtgggtaacccgacgtttctctctggctgcccttaacattttttccttcatttcaactttggtgaatctgacaattatgtgtcttggagttgctcttctcgaggagtatctttgtggcattctctgtatttcctgaatctgaatgttggcctgccttcctagattggagaagttctcctggataatatcctgcagagtgttttgcaacttggttccattctccccgtcactttcaggtacaccaatcagacgtagacttggtttttcacatagtcccatatttcttggaggctttattcatttctttttattttttttctctaaacttcccttctcgcttcatttcattcatttcatcttccatcgctgataccgtttcttccagttgatcgcatcagctcctgaggcttctgcattcttcatgtagttctcgagccttggttttcagctccatcagctcttttaagcacttctctgtattggttattctagttatacatttgtctaaatttttttcaaagttttcaacttctttgcctttggtttgaatttcctcctgtagctcgaagttgtttgatcgtctgaaggcttcttctctcaactcgtcaaagtcattctccgcccagctttgttccgttgctggtgaggaactgcattactttggaggaggagaggcgctctgctttttagagtttccaggttttctgctctgttttttccccatctttgtggttttatctacttttggtctttgatgatggtgatgtacagatgggattttggtgtggatgttctttctgtttgttagtttttcttctaacagacaggaccctcagctgcaggtctgttggagtttgctagaggtccagtccagaccctgttttcctgggtatcagcagcggtgtctgcagaaccacggattttcgtgaaccgcaaatgctgctgattgttcctctggaagttttgtctcagaggagtacccggctgtgtgaggtgtcagtctgcccctactgggggatgcctccctgttaggctgctcggaggtcaggggtcagggacccacttgaggaggcagtctgcccgttctcagatcttcagctgcgtgctgggagaaccactgctctcttcaaagctgtcagacagggacatttatgtctgcagaggttactgctgtctttttgtttgtctgtgccctgcccccagaggtggagcctacagaggcaggcaggcctccttgagctgtggtgggctccacccagttcgagcttcccggctgctttgtttacctaagctagcccggcccctcccccagcctcgctgccgccttgcagtttgatctcagactgctgtgctagcaatcagtgagactccgtgggcgtagaaccctccgagccatgtgtgggatataatctcctggtgcgccgtttcctaagcccatcggaaaagcgcagtatttgggtgggagtgacctgattttccaggtgccgtctgtcagccctttccttgaccaggaaagggaactccctgaccccttgtgcttcctgaatgaggcaatgccttgccctgcttcggctcatgcacccactgtcctgcacccactgtctggcactccctagtgagatgaacccggtacctcagatggaaatgcagaaatcacccgtcttctgcgttgctcacactgggagctgtagaccggagctgttcctattcggccatcttgtctcctcaccccatatattcttaattataagacaaagatttgggttttttttttttttccttccctaaaaccactttttggctgtgtgctgtggctcatgtctataatctcaagactttgggaggccaaagtaggaggatcacttgagtccaggagttggaggctacagtaagctctgatcacacccactgcactccaacgtgacagagtgagcccgtctctcaaaaaaaaaaatgaagcttgcatttttaaataaaaatggttgttaattctgagttcaacacatgtaaacattcatttttcaattttgatatttcataatatagtaaaatatcttgattaggatacctgtaggtactaaccactagaaataacttgatacaccagtgtaactggttataactgttgtttatctgttgaatatttaggtttactcttctaagctatttgtaacaagagcctaaaaactgggtttccttcattgaacttcatgcctctctggttattgaagatggcaagcgaggggcactctggatacaggtcagtttcctgacaaccatcaggatagtatgataggcacacgtttccaaccgtcctcatttatttaaatagcaagctaattaaggaccttgaagagtattagagagtttcacgatctgctcatgtcctgtgatttaattgtattataattctttaatgggaattttataaacaggcagtttgagatgcagagtttccaacagacttaacggagttttttcccctttaggtataaaatgaagagaatgtctcctggacctaattgccacaatgagatactacagtttattcgcaccagggtggaaaaaaagggaatagtgttcaaatcactgatggaactggatgacgcttctatttccaggtggctttaactatagtattacgcaacttatttatattttcaactatttatttaataaaccttacaaacaagctatagggaattatcttacatgtgtagactactttataagtatgtaggaagataatttgtttgcaggygacagcttgccccagtctcctgtggcgggcagggcttatgtggtatttgtgccttgggctgcacaggaaatgggctcaaagagtttcagtgcagctccccctggagcccggcacttctggctctggwtatggtacttttcactgcagtgtgctgattctgggtgcctccagaagacccacaatgtgactgttgggcccagccctgttcccaacaatggcagggsctgggacaaaaatacaagtatttaaagtttataactttatagtttataacaatacaagtatttaaaaagttataaatcaaactagcaaactattagattaagaagtgtgtcctaatctcctcccttggcaaatacaacttcataaccacctggaaggccaggttcaaattcagcccttggctgacccctagcaccctaagaggccttgcctgcacacatgaataccccaccccacccatcaaaatgccatccagaccccatgccagtgccccctcaccccagccaccttgcagcaccagtgagatggcagcactgttcaaactcaggatgacagaccagggaagaccctggaagtggactcagggccatgtggtcaggaacgctagagttgcagggtctaaaaaggaggatgtgggttccggggtgggcacattctcttgtccctacagaccctccaccccatggcgagaggggcatgaccagagtaggatccctctgacatacgtatatatgtatatgtatatgcatacacatatgcacatacatacacatatacacatatacatacacatatgcacatgcatacacatacatgcatacacatacatgtgcacatgcatacacatatacacacatatatataagtatatacatacacatatgcacatacatacacacatacacatgtatacataactatatacatacacatgcacatacatacacatgtagatatatacatacacatatgcacatacacatatacatacacatgcacatgcatacacatacacatacacatatgcacatgcatacrcatacacatatgcacatgcatacacatatacacatgtatgtataagtatatacacacatgcacatacatacacatgtatatataagtatatacatacacatatgcacatacatacatacacgtagatatatatatacatacacatatgcacatacatacacatatacacatatacatacacatgtaattggcttatgttcatttaaaggcaagataaggggaaaactaatcaaactaataaaaatactgttgcaagggaggtttggtagagaggacaargatggaagctaggtttctcctagtgtgatttgttttgcagttttgactttggaactatgtaaatattttatgtaataatggataagattgatatttatttatttgttgagacaaagtctggctgtatcacccaggctggagtgcagtggtgcaatctcagctcactgcaacctccgcctcctgggctcaagccatcctcccacctyggcctcctaagtaactgggactacaggcatgcaccaccatgccctgctaatttttgtattttttgtaaagacagggcttcaccatgttacccaggctggtctcgaactcctgaactcaagcaatcctcctgcctcagcctcccaaagtgctaggattacagacgtgagccaccatgcccagcctgggaattaatttaagatgactttaaaacatagtaaataatttgactgtgtcaaattatgtcaaatcccctagtgggatagtgcctaaggattaaaaaatattacaaagaaatctcactgggagtagccatggtgttaataacacttttgatttgttattttggaaggtagatactaatattgttagaaactaatatgtataaaatcaaacaagttaaatgaaaacccttgatttctaaacttgaattagattagaggaacatgttatgtgacaccatgcaaatgcagtcagcaaagtctggaatgtggggaaataaatggcaagagaaaaaaagggttgaggagcgaacctataaataaacctttagagacatgtcaaccaaaagcaagagtagaccttgtttagatcctagtttgaacaaaacccactgcattttaaaaaatgagacagggaaaattaaaacactacctggatattttatgatatttaaagaaatattgataactatttttttttttttgagatggagtctcgctttgatacccaggctggagtgcagtggtgcagttttggctcactgcaagctctgcctcccgggttcacaccattctcctgccttagcctcccaagtagccgggactacaggcacccgccaccatgcctaatttttttatatttttagtagagacggggtttcaccgtgttagccaggatggtctcgatcgcctgacctcgtgatccgctcgcctcggcctcccaaagtgccaggattacaggcatgagccactgcgcctggcctgataactattttttaagtgtaacgattaagaaaaagttcttgaacacaaaacaggtgttcaggaatttctggactaggcacattggctcatgcctgtaatccatgcactttgggaggctgagacaggaggaccagttgagcccagcaagatcaagcccaggagtttaagaccagcctaggtaaccaatgagacccccatctctacaaaaaaacttttttwaattacccaggcattgctgggcacagtggctcacrcctggaatcccagcactttgggaggccaaggcaggaggattgcttgcttccaggagttcaagaccagccttgaccacatagcaagaccctgtctctacaaaaaaattaagaattacctgagtgttgtagtgtgtgactactcaagaagctgggggagggggggggattgcttgagcccaggaggccaaggctgcagtgagttgtgatcatgccactgcactccagccggggcaacaaagctagaccctgtctaaaaaaaaaaaagaatcataatttactatatgtaatttatacttccattttttgaaaagcaataccttctcattagtttgccaagaaagatgagaatttattcttttttctatttggggggttttcttttttttttgtatttatttatttatttatttatttatttatttatttatttatttactgaggcagggtctcattctgttgcccaggctggagtgcagtggcataatctcggctcactgcaacctctgcctcccaggttgatcacttgagcccagcaagaccaagtccaggagtttaagatcagcaattctcgtgcctcagccttccaagtagctgggattacaggtgcgcaccaccgtgcccagctaatttttatatttttagtagagatgaggtttcgccatggtggccaggctggtctcaaactcctggcctcaagtgaaaataaaccagtgccacttgccaagagaattaattaaataaatatcaaagaaaaaacactttgaacagctaggagatgggactaaaaaattagtatttgacttaataggcacatccaaagaggtaattattctatttatattgttcctaattagtaatattatagctgttagaacaagtataaactttgaacgtgcttttgaactgtaataccacaaagtattaaagcaagatgttcagaactgatcaagtatattgcagcatatagctcttactacattactgctatggtgctagcaaaatggtttgctggcacttgagtacataagacaatacgatgttaggccaggcgcggtggctcacgcctataatcccagcactttggaaggctgaggcgggcrgatcacaagsttgcagtgagctgagattgtgctmctgcactccagcctggcaacaaagcgagactcttgtctcaaaaaaaaaaaaattaaatattttttatttcctgtttattgcatgtttgaaactttkttctgtattttctatttcgggatgtacgtaacattgatgcaggagtacattacctgggggtgtaggcacaaggttttcttactagtggaatgtgaaccaaaaagtgtagaggccacagggctaaaggaggccggctgaattagtgaaaatattcaaagccagttttgttgttttcagcagtcagtaactgtcagtagacgaacatttaccaggaaatgtcggtcttttaaacttcgggcatggttcttatttagtatgttcattctatcatgacattcagtgaacatttattgagtgcccactgtgtaccagggattagtatgcacgttaaatttataagctttgttgatttccaccacaaacccatgggacctcatgttattctcacaattgaggaaactgagattcccagtgttgaatgaaagccacacagtatcacatggccagtatcatgtgattgcagagtcaggactcaaacccagctcttcaccatcatgctatactgatggccctttcccagttcacagggagaaatgaggaacagggagagaattttcaaaatattaggttttcccatagaattttctgaagaactttggtgtatgttgccacttgttcactaacaagttctaacagatgacagaacaaatgaggaagtagctaattaatattaatgaacaaccccagaatttttctgagtgttgaatagacttgaatattcaacagtctcaaatatttgacaccattcagtggacacacacttgactcgataagcttattctaccaagttgttcctggtttatgtgacacagctgaacagatgccagtttcatgggggactgtcagatattctgaagggacctaatcaagtcagtacagtgggaaggagagagaaacagaagcctcrtttgtgaaatactacttgagtttgtgcatgaagaatggataggatttagactgagaagcttggaaaggggacaaccacaaacaactgtagagaggctggaacctgagctgtcctgtaggcagcagggatgcctggaggcacgtggaagccaggaggtggggggcacaggacacttgacaatgcagtgcataagctcaagttcagatggttagaagaacttccggaagatgtcaaggaaaactgcttttattaaatatcttaacttttggcagaatcattttgtgtgatataatgtgatgggtttagtaccacattacatttcacatgttatattctgaaatctgaaacatttatttttttttaacctaagaatattccctgggcttttgaagcaataaagaaagcaagtgaatgggtaagaagaactgaaggacagtacccatctatctgcccatggcttgaactggggaatgactgggactctgccaccaagcagttactaggactccagctcataaacactgtgtcccctcttcgtagagtccttcattacagtcaagactaagtcaaatgaaactgaattttaaactttttgcatgcttctatgtagaaaataatcaaatgataatagatacttataatgaaactccattaaggttttattcagtgtagcaattagtgtctttgaaaataaagtggaagcagaattactttaatcaactaacaagcaataatgaaacaaaatatttgttttctgtctcattttttgttattttttaattttttatttttttgagacgaagttttgctcttgttgctcagactggagtgcaatggcgtgatctcagctcactgcaatctctgcctcctgggtacaagcaatgctcctgcctcggcctcccgagtagctgggattacaggtgtgtgccaccatgccctgctaaatttttgtatttttagtagagacaggatttcaccaggttgcccaggctggtctcgaactcctgatctcaggtgatccacctgcctcggcctcccaaattgctgggattacaggcataagccacagcacctggcctgttgttgttttagagatggtctcaatctgtctcccaggctggagtgcggtggtgcgatcataccccactgcagcctcaaactcctgggatcaaagaatagtcccacctcagcctcctaattgagactataggcatgtgccaccacacccaggtaattttggggtgtactttttgtagagatggggtcttgctatgctgcctaggctggtcttgaattcctggcctcaagcaatcctcccacctcagcctcttaatgtgttgggattacttgtgtgagcctctgcacccagccagtgtttcagagctttaaggtgatgagagatgcttctggatggtcctgggagcctgtgtccttctcacattcgggagtccagtggaaagctggctcagctggactgagcaagctgagaagaaacatggtcttttgtaggggatctgtcagggtggtgggagaaattataaaaattaagttgtaggagatagacacaaaacttcttggaaggctgggaggtttgcataccttcagtaaaagatttggctgaaggcagctgaattctcttaaaagcttagggcgtagatacataggaatgtagagaagtttatctaaatagcttgtttactcatgtggtcctaaaacagacctttgatcatttgcgggcgcatgactgctctctactcaggaggtcagcaatgttaattaccctctagtggtgtggtgtttacttgagaactttgtcattaaatctgtactgaataaatgcctggagccccagcctgacagggctgtgcctgctgactctttatagcacctgctgactctttatagcaccctcctcagtgtctgggagctgcccagtcccctaccccattctttcacaggatacctgtgtctgagtgcatttcttcatccatcacgcagccagggtctgcaggttggacccagcaagttattgacagagtttgaaaattatacaggattggttgttgagttggatattttagtcaacatttattaagcccatgcctcagcagtagttgacttttgtctaaagggagagaaagaaattctagttttcccaaacgtccaaggctccaaacaaaacatactgaattaagatttccagaagaaagtcctggcaacttggatatttaataggtgctccaggttatcaagcacattggaacacaatggcccaggtgctgtatctcaaaatgtgagtctgtggactggcattgtctgcctcactcgggaactcaacaagagacgcagaatctctggtcctgtttgagactattgaatcagaagctgcattttatttagcaaggcccccaggtgactcctatgcatgtttatagttgaagggctagtggagtgtggtgacaggaacatatttggtgcttgttcagggccttgttttaagaacccatgatgcttgtgcccagtggagcaacccatcagtccaattgttgggagaaaagctgaggcaagacttgctagtctgacataatatgaaaagagccttggaacatgtcctgggtccagagtttaaaacttcttgtggcctatggaacaccaggttctgtgcttaagggtggaaggctgccccgccgcactacaacctaagcctagggcataaaacccctcatggcttggatggaatccaggactcaggacataaaacccctcgtggcctctggaatgtgtccagacttgctggctccttgcttcttgctctcccaggatcataaactgattgtaccttgaggtagaaggaaatgttcattatctcgagtagcagaacatgttccatatgcttcaaagaaaatgctagaccgacacagctataaactaaacacttgatgtgactgcttccttttgaccagcacgtcctcaccacctgcttctttgtttaatctccaataaatggtgtgggctcccagagttcagggccttcacagcctctatactagcattggccccctggacccactttgtgtactattagcttgtctcattcctttgactctgccggactttgtagcccccatggcctggtgttgggtttgatcacctcaacaccaatgtggctatttgtgactgcctttgttttataatatttttattattcactttgtacagatgaagacttccagctgtagaggccaaaggggccacactgcaggtagagcaggcattcaccaaggcgtttgtgatcctggggtgcagctcccacccttggctgcctgggtgcttctttccagacctactgtcttgtgacgttcccttaggcacgcagcacaggctgctttctgatttagaagtgagcctgttcagttgatggctcarcgcaggcctctaaaaaagcaagcctgatgtgggttagtacatctgtggttgacttatttggtgttcattttttcagttttcagaaaggtcagttgaagtgctgctggtggctgtagaattgatacgcaggggaggtttttgatctgtgagctttctaagggacaattgctaagctgcactgattccttgagcccctttcctttggaacaatgtagagcccagttcatggctcccagaagtttaggtccagtaatttggctgcaggcctagagaatgggaggctgcagacttggactaatggtgaactcttgcctccccccagggatatgtggtgcctgtcataagctccagagagctgccttccatgagaccagaagagtgggcaaacatgaagtccaatccccctatccaggctgccattgacctcatggcaggggctgcagttacagtcctgtgcctcataaccatgtttctgttggtgatggatggtgtatcggatggtggtcccatgaaattataccatcttttactataccttttctgtgtttatatacgtttagatacacaaataccactgtgttacagttgcctacagtatccagtacagtaacatgctgtacaggtgtgtagccttgagcaacaggccatactgtacagcctaggtgtggagtaggctatgccatctagggtcgggtgtgtatgctctatgatagcacaatgatgaaattgtgtaatgacagatttttcagaacatgtcccagtcgttaagaaatgcctaagtataatcccagagaaaacccagtcttctctattcctcaagtaccttctaaatgagatcaaataaaagtggtaggaaaacattacctttctccctctagaagtgatgggctttacctttgggatgaatccatttgatggaagtgtggcattgttcagagtgtggcagaaggtagagaagtgtccattattgctaacaccttgtgagtcagggtgaggggaggaatgtgcccagtgcagctggaaaacagctcagaggtgaagccccttgtccattgtcacctggctgtgataggcaggtgacatcgttcttcatttcaagcctggcagtcttcagagcccttgtagtgcaaaaataacaccatagcatctcccaggaaacatcacttactgtccctgctagtgttgggaaagaaaggaggacactctttagaaatgtcttttacaatgagactgatagtggactgtgtcttacagccatgaaaggaaaggagaagttgtaggatttcctgggaatgtcagctaacctgagcctaggggcctgagcccaagggcagactgaggctcccccagcacagggaggtgctgcctgtgacaagggggtagtgctggcacagtgcaggctactccctagaaagatcagcttgaatatgcaggaagagcaggaccctcgggctgaggcacaggtggaatgggaagtgcatggtggtaatttagttctccagaggccagaagtaggaggagcagttggaatgctgatggcccaaagggaaaccctggactaccctggcctcccacagtaattgtggctccctgcagtggggaggccagaaagagtgttgcccaatgctgtcctcatccagtccaccccccacccaccaccaacagatgagtatggtcatgagtgtggtcacctcatcagtcatttgctcagttgtgaaaaagaaattgttccgagaagagcaaagtgtttttccatgagccaaaggtcggccaaggtatgctaatgaggaggactggagacagcacgtcacagacaccgagaaggagcactgggcaagggcacttctcccagggcagagcccacaaggagcgtcctggcaccagacgctcatggaactgaaggctggcaggggtccgcccagtagtctcttgcccgctgcgtgcctttaggctacagcctcccaggccccgtgccccctcccctcccctcccccatgccacactggggaggatgctgaccctgagagtggtgcaaccatctgcctgcccctggccaccacctctcaccagcatgtgaatgctcttgggctcagttctgtatctgcagtaggagggtgtttagccacatgagagagtctcaccttttgacattctatgtctttcagtctgtcaaagatctagaacatattgtgatggaattaaaaagtttacttttggctgggcaaggttgctcaagcctgtaatctcagcactttgggaggctgaggcgagtggatcacttgagttcaggagctcaagaccagcctggccaatatggtaaaacaccgtccctactaaaaatacaaaaattagccagaygtggtggtacacgcctgtaatcccagttactcaggaggctgaggcaggagaattgctcgaacccagaaggcagaggttgaagtgagcgaagattgtgccattacgctccagcctgggtgacagagcaagaatccacctaaaaaaaaaaaaaaaaaaaagagtttaccttttcatatttatgtgcatacaggtatttgggtaccacatttgtaatttacagtgagtttgaaagatagaaattgtaacagtatggttgggagccaggtatgtaaggcagttgccgatgggcatgttttgaacctgtattgggcccttatatgtatgatctctgtgatcccatcattactgttcatttcttccaggagaggaatgacacacttctcactttaattgccagattatctccaattctgaatcagtggaatataatttaatatgattttactatgattgagtcattctctcccaggtactgctgggctaggataaaatgagatctgaattacattaaaataattaattattccaagagaagaggtgacagaatgttttaagtgggtgtgtaatttagataacctagatgcagataagctgaataaagcatttaatccagcacattcgtattttaacttgatcatcagcaatggaagttggaaacccaattgcagctgcaggtcccacacaactgaatttggttccgtgtgcatagcagtgttcgctggacatgcctggaggtctgaaggtgcgcccttttataggcaggaattccaccaggat

SEQ ID NO: 96821 - DNA, 12699 bp, Homo sapiens
ccatctcaaaaaaaaaaaaaaaaaaaaaaaaaaaaaaattggagcctgctatgaggtaaccacatctcagcttgctatgaggtgaccagatctcagcttgctatgaggtgagcagatctctcttgttttttttttttaattaacaacacaaataatgaacctaaaatagtgagaagggggcaggtgggagaacaagtgaagtcctcatgttttctagtgattgtaaacaattaacttgtcctttttggacacatatattcattcattcattcaacaaatatttattgaacttctacaatgaatgaggaactgctctagatgctaggaatctagcagtagacaaaacagacagaaaaaaactctgccatcttagagcttacattcttacatggagagcaaggatgtagggttctgcttctcaaatgagtaataattctctgagtaaaattggaattatttcagttcaatttctgtgatcatttctatgatttatttcacccataaagaactaaaagtatgaaaaaaaaaagttgtagggaagtaaattctgaaccagccaccatcactgcttcaatacattatcatctttttgaatgtacaaaactgaggtcaggagttcaagaccagcctggccaacgtggtgaaaccctgtctctactaaaaatacaaaaattagctgagtgtggtggcgggcgcctataatcccagctactcaggagtctgaagcacaaaaatcgcttgaaccctggaggcagaggttgcagtaagctgagatcacaccattgctctccagcggggacaacaagagtgaaactccatctcaaaacaaacaaacaaacaataaaagcacaaacagccaggcgtagtctcatgcacttgtagttctggcaggcagggagaccagtgcagatttagtgaacattgtacctagtaggtaatttttcaaccttcaacccgctcccactctcccactttttatagtctccagtgaaggccttaaaatttagaggtgggtcaaggatttcccccacatgacttttgaataaaatctttattgtgaagctatatatgcaggctctagaaagatattctttatttctcagtggccacctaacaggatgaaactagtcatgtctcatggtctcatgcctacccaatcaacgtatttctggggcctcctatgaaagcaatggtagattgtaatgtcctggtgttttttgttcttggcttccctcatcctcaggctgtaccaactgtccaaagctgggaagctgtgtgttccagccatgaatgtcaatgactcagtcaccaaacagaaatttgacaacctctactgttgccgtgaatcaattcttgatgggtaatgtttattatctttgagatgaagttgtgatgtccagttgagattctaagttttttggctttggttatttctggaaaggattcatgtagcacctctggataatgtctccataaagccagagctttgtcacctcgtaaattaaaattacattatttttattttctcctttgtatcttttctatttctaaatattatattttcaaaatattatctaataaatgtatgttgcttttatgtttaaaagttactgtgttatctacatcttcttcctttctgcaccacttgcaagaaaggggaaaaaaaaaggaaaaaaacccttacatataggattggttagatggcagggagtgagaaaatatgtattttatttaaccttcctgtctggtcattagtttctctaggatagaaaccagactttcagtgttacaggtcttttagaatttgtctagcaggttttctggtctttaccagaaaacccctttaaaaaaataaagaaaccagactttctttcaaaatgaaaaaccaaccaaaaaaccccatgaaaacaaagagattcaatctaacctcaagggagaaacaagagaagatttttctgatttaatgtttttttttcccctagacttaaaaggacaacagacatgatgtttggtggaaagcaagtggtagtctgtggctatggagaggtgaagtttaaccttttgtttattgggtgttttaaatggattttgttgaaatattctggaattttttatttgtatggacatatgagtacaccctttaccactttagatgagaaaaagaatttcagaggccttctggttgaagtagactttctttttccctttgcgttgccgccattttcccttaagttgattttctgacttgctccagtaccaccgtttgtgatgttctttttagcttgtgttttgattatgaatcgtgagtgtgggtgttcttgtgcacatgaatgcgataagcaggagccaggggtttgtttatgagctgcattcaattatttgttcttctcgttttccccaagtatgaatctattcagtgaaattcctctcgggggtggaaagagggggtgcactttaccagaagctttgagaaatggttttctcagtgactttccttaatatgtgtgctctctcccctcttcaggtggggaaagggtgctgtgctgccctgaaagccatgggctccattgtgtatgtaactgaaattgaccccatctgtgccctgcaagcctggtaagcctctacgctaccatctcacttgcaatctcggagctgtctccaaagaatggcctggttgatgccacactttattttagaggagcccagatcctcagagatgctgccactaactctaagcatctgtcttttaaaaaggtcaaggagctctgcttggagagagcagagactatcagaaaagcgaaaatttagaaatcctgtggagatagtaacagggattctgtcagccagagaacaggtagccccttaccttctccatgtatgatacttgcctttcaaataatgatcagaaaagaaattggcaggcatcagatgccttctgatgtgttacactgaaaatagcccttctgtggtattcctcccaaaaatgtataacctgaatctaattgtgaggaaacattagaccaatcccagttaagggtaaaatctactaactctgagtgaagcatatatgagaattatttacactagtattataattcttaagtttgaaatgattctaaaattaaaagttaaaacttttcttatctataaaatgtgtgtaatcatacctacctcataggattgtgagagttcagtaaaataataattagcataggctgggtgtaatgggttcatgcctgtaatcccagcactttgggaggctgaggcaggaggattgcttgcgcccaggagttcgagaccagccttggcaacatagggagaccccatctctacaaataatttttttaaattagctgggtgtggtggtgcatgcctgtggtcccagctacttgggaggctgaagtatgagtatcacctaagcctgggaggtggaggctgcagtgagttgtgattatgccactacgctccagcctgggtgacccagcaagaccatgtctcaaaataattattattctatattatacattatataacaaatacataattatataaggtacagagctgctgccacataatatatgctcattaaataatagctgttattaaaattgtctcttgccatcctcagcagggtgggaaataccactgttcttaaaaactattgcagagtccaagtgtctgtagcctaggggaaccatcatccttctggtacactaagagtttaggaacctgaacatattttaatacaaattgatactgttcagatactgaacagttcagattatcctgttcagattatcctgtagacacgaattgatcacttactatgcattagatactgtgctatgtgctgagaatgaataagatgaatatataaatgagataaggtcctgcttttagaagcacacagacagataaccactgtgcagcaaagtaagtgctgtcatggagttaaacggcacatgcttctgtaggagcataaaggagaaattgcttactgaagagcaagggagcagggtagaaagagatgtcagcagagctgagtcttgacatttgtataggtgttttcttagtttggaagtatattccaggtactgggaacatgtgtgttgtctccaaggaaggagatagcatggcagatttaagaagctagaaatattttaatgtagttggcagatgaaatacatttgggggagtggtactatctaaggtaggagtcatgggagtcatatgtcaatataatcacatatcactgtaagtatttgggtcttactcttatcctgtcttatccttaagaacaggcagtctcactgaagtattttaaggaaaggaagcgacatgatccaaattgcatttaggaaaatcactctgccaaatgatttagaaagatgtaaacctagaggcaatgagattgggccaggggttactatagtaatctaggcaagaagtaataagacctaaacttaagcaaggccagtatgtattagagaagagtagagagatgaaagagacgtttatggaattaaagaaaaagagtcacccagatttggtgacaacttcaattcaggagaggcagcaaggacattcttgtttatatggctcattcagttggatgaacagtgatgctattgatcaagatagaaaatatagaagaagaaatagatgagattatgggtgcagagaaaataataagtttattttcaaacacagtaagtttgagatccttctgggacattgatgaggtgctatccagtggctaatttgatccttggctatgaagcttcagagagatctaagctaaagttacaaatgtaaaaatcagccatctatcagcagtcatttgcagccaaaggaagagtatggttctctatactgaaagaatagagaaaagaataaaggcataaccctgcagagcaccaatatccaaaggttggctgaagttgaggagaggcaattaagagaagtaagaggaaaaccaggagagatgtatcatggagtccaaggggtatagagttttaagaaggcaaataatgtttaatgtagtagaagaaatcaaataatataagagtctaagaagttgggcatggtggtgtatgccaatagtcctggctactcaggaggctgaggcaggaggattgcttgaggccaagagttagaggctgtagtgcactatgattatgcctgtgactagctactgcactccagcctgggcagcatagtgagatcccatctctaaaaaaaaaaaaacacacacagttaagagtctaagaaatcttgggtttggccttcgggggatcactgatgatcttggagagagcagtttcaatggggtagttggttaaatggctaagtggcactttctacagtttctagaaatttggtcagggaatctcatggtagcccctggctccctattatcaggaagaaataagttccgtgatgcaaacgaaccttttatttctgtcttgtatgaactaaggaaattgtttggatttttcacttctaagaatagttcagctatctcaagaaatgacagcaacttgatattagcttttgaagtcctgtgttaaaaggctccccagctgcctgtttaggttaatgggtcatgctttatttcaacagtatggatggatttcgactggtgaaattaaatgaggtcatccgacaagtggacattgttattacctgtacaggtatgataatgacattttaaatggggtggcacttgggaatgtttttatggagcaggtgcaagatgattggaaatattctgaaaaaccaaactctaaaagctagagagagatagtagcccgcaaagccagccagtctttcacattcttcctaattctttagagctccgaccaaaggtatacgattaggttattcctatgtaaaaatgtttctcttcacccttgaagacaactgttatatctccattcatcctaggagatagctagagatgagattcacttataaagttttatttgggaagccagatatttttttttttccaaaaatatatttatttttaaaaacagaaaatcagatcagttttatagagtcaaattttcaagagacaaaccagagtttggattccagcttagagtgcaagtgaagcatcagtaatctcatgcagaagatttgtctctgcaggaggtacattctgcttgactgcaagcactcaattctctaaatctggtttgtacttctgccatcattttattccattccagcgctctggcatgcaagataatccatctctaaaattcaagacttccaaattgagatgaacgattattgggcttgggttggggtttataaccaatccgatcattgatcatttgttcccggctcttgggatcactgctaagcccaatggctccttctccatcactgcctcctacaacttccacatcttccttctgtttcttacgggtctccaggtcctttcgaatgttctcaaactcttcaatgtcatcaagctttagctctaggcgtgttggwttccgtctcagcatactgaagtcaacactaagggccaaacccagtgaactattagcaattcacaggattatcctcagcgtccaaacagatcttaaatgtgtacgtcattcattaaacaaacacttcttgtgttccagctacaragttaaaaggtacagtcataatctcttttcaagccgacctagccccttccccgggaagccagatcttaaatgtacacttgattttttattttacctccaaaagtgatgtatgtttctctctagtatgtaattaaggcaaggctagagagaaattcttcatagttagagaaagtagacgaggttattctgttaattcccaaagaggtagattttgagttttaaagaatatgcagaaatggctagtttcctctagggtaagatacttatttttatgtggaaccataaactacaggaacactggttttctaattctattttagagggggaaatcagacagaataaaaaaaaattgtagttgtagcctcaggaagaaataggggcagagaagagggaccataagaagctgttcttggttcatatcaatcccctggatctcttttgttgttttaaatagagatgaggtctcagtctccaggctggtctcaaactcctggcctcagcgtggttctcccacctctgcttcccaaagtgatgggattataggtgtgagccaccctgcccagcctggacctttttttttttttaattgcttttttgtgatctgtaattcattcactgcacatttcacacatttaaattgttcactgttttttagtaattcacagagtttgtacaaccatcaccacaatctaatgtttttactgagttgtaattcacattgtaatgttcacgcttttaaagtatgcagttcaatggcttttagtaaagttgtagaacatcccaattatcgaatttttatcaccccaaaaagaaaccccatatcattagcagtcactccttattccatcctccatcatccgccaggcctaggcaaccaccatttccctattctggacatttcatataaatggaatcatagcaacacctgtgaaaagaaggggaaaaaataataattttttttaaaaaggaatcatttatggctgggcacggtggctcacgcctgtaatcccagcacttcaagaggccaagatgggtggaccacctgaggtcaggagttcgagaccagcctggccaacatggtgaaaccccgtctctactaaaaatacaaaaaattagccagatgtgatggcaggtgcctgtagtctcagctacaggagtgtgaggcaggagaattgcttgaacctggaaggtggaggttgcagtgagccaagattgtgccattgcactccagcctgggcaacaagagtgaaactccttctcaaaaaaaaaaaaaaaaggaatcattcaatatgatgttttcagggcctccccatgtgatggcatatatcagtaccttattcctttttattgctgagtaatgtatcattgtatggttatactgtattttatttacccattcattaactggtagacatttgggttgttttcactttttggctattaggaataatgctgctatgaacattgaatacaagtttttatgtggacatattttttcagttcccttgggtgtatagtaagagtagaattgctggatcatatagtaactttgtttttaacattttcaggctgggtgtggtggctcacacctgtaatcccagcactttggaaggccgaagtaggcagagcacttgagcccaggagttcagaccagcctgggcaacatggcaaaactctgtctctaccaaaaaaaatacaaaacttagctgggtgtggtcccagatactcgaggagctgaagtggagaatcacttgagtgatttaaaacaaaaaaacaacatttttaggaattgccaaacttttttttttttttttcgagacacccaagctggagtgcagtggcgcgatactggctcactgcaacttccacctcccgtgtgcaagggattctcctgcctcagcctgccaagtagctgggactacaggcgcacaccaccacacccggctaattttttgtattttagtagagacagggtttcaccatgttgcccaggctggtctcaaactcctgagctcaggcaatccacccccctcagcctcctgaagtgttaggattacagtcatgagccactgcgcctggctggaattgccaaactttttaaaagtgactgcaccattttacaatccatcaacaatacatgtgccttctaatttctccatatcttcaccaacacttgttattgtcagtctttttgatattgccatcctagtgagcgtagagtggtacctcattgtggttttgatttccattttccctgatgactaatgatgatgagcatcttttcatgtgtttattggccatttgtacatcttctctgaagaaatgtcgattcagatccttttcttttttttcttttggagacagggtctcactctgtcacccaggctacagtgtagtgatgcagtcacagctcactgcagccccgacctatggggctcaatcaatcctcccaccttagcctccctagtagctgggactacaggcacatgccaccacacccagcttatttttgtattttttttgtagaaatgggactttgccatgttgcccaggctggtctcaaactccagggctcaagttattgattctgcctcagcctcccaaagtgctgggataacaggcatgagtgagcatgcctggcctgctttttttttttttttgagaaagagtcttgctctgtcacccaggctggagtgtggtggcacgatctcggctcactgcaagctccacctcccgggttcatgccattctcctgcctcagcctcctaagtagctgggactaaaggcacccgccaccacacccagctaattttttgtatttttagtagagatggggtttcaccgtgttagccaggatggtttcgatctcctgaccttgtgatccgcccgtctcagcctccgaaagtgctggaattacaggcatgagccaccgcgcctggcctggcctgcttatttttaagttgtcttcttcttattgggttgtaagaattccttataacaagtccctcatcagttatatgatttgcacatttattttctcattctgtggattatctttctccactgctgctcagacctctcttctgtttttaaggtaacaagaatgtggtaaccagagagcacttggaccgtatgaagaatagctgcatcgtttgtaacatgggacattccaacacagagattgacgtggtaagatcaagtagctcattattgggggcttttttctctccttcacaagaagcaaactggaaaatgagagagcagggtcacaagccatcctaaacatgactatcctggcagagttgtccacatcttttcacttactagccctatagcctgtgtttttggagactataaagtttcttcatctcaatttaataattctaaatgattgtcatcttctattcaagctcgatgcctgtttacaccataagccttatctgtatgtttaggattgagagcaagataaactcaaaactacaatgaatgatagaaactcagagctaagtgatacaatgaatgtgaatcagtatggtagtcagtattttgggggtgtttggttttaccataaagatgagataagtaggttggtccaaggaaataagggagagaaatctatgggctgggatgattatgttgcttaggattgactgtgtgtatcaaatactgcggtttcttcttttatccctctcttttattgggcgaggtcacccctcacatgttttccaaactgtagtaattgtgtctgcaggtgtcataatcaattcagcaccattgtgtagtagcatgtgttcttcaaacctggaaaatatatcactttgattctctaatttggttatattcaccctaaaattttccaatccaaaatagcacttggtactaataagttgcccaagtaatagttaatagaaatgttgtttctttttttttttttttttttgagacggagtctcactctgtcgcccaggctggagtgcagtggcgcggtctcggcttactgcaacctctgcctcctgggttcaagcgattctcctttctcagcctccagagtagctgggactacaggtgctcgctaccatgcctggctaatttttatgtttttagtagaggcagagtttcaccatattggctaggctggtctcaaactcctgaccttgtgatctgcccacctctgcctcccaaagtgctgggattacaggcatgagccaccacacccagccaagtgttgtttatttcttttcagacttaccaaagtatctctcagtgtgacttttactctggttttaaatttttctggcatttttatggcacgcttgtatttctctctgggtaactggcttaagcaaagtatgctttcatctccactgagggctgctctgattgagcttcagcattgccaggtaaggaccagctgatgtactgagagcttattggataatatttattatatatggtttcccttttaaattctgtgctctattcttccattattaaaaatagctggcagaacaacctaccaaagcccctttctaccctggggtgtctgagtggtatggccttattactctctcttaccatgatattttgcttacaatgaacaatttagttggtagttggttctttagttttcttttgcttaagtttcatttatgtgctatactgcctctttgctgaatgatcaaggatattagtatttctaaaatgatccagcaaatgattctcatttcctggatgactttgcttctagagcccccaaaggggaaaggcctaaagggaagtattcatgtcatgccctgggccctaatgggaaatcttcagaggaagggaaggggaaggaattttccttcctaaaccctcaagaagctctgaaataaaaataattccaaatgcagtgatgtaccttttgtaattttactttatctcatttcatctttttgacgactccatgaggcattattcttattcttaattttcagttgggaaactaagaagttaactaccttgtcaggcatataattgattcaagatgaaactggtgcacaggccaggcacggtggctcacacctgtaatcccagcactttgggaggctgaggcaggtggatcacctgaggtcgggagttcaaaactccatctcaaaaaaaaaaaaaagaaaaagaatatgatgtttgagaccatgtgtggtggctcacacctgtaatcccagcactttgggaggccaaggcgggatgattacttgagcccaggagttcgagaccagtctaggcaacatagtgagacctcatctctataaaaaataaaaaaaaacaaaattagttgggtgtggtggcttgcacctgtagtaccagcctggccaacatgatgaaaccctgtctctactaaaaatacagagattagttgggcttggtggcacacaactgtaatcccagctactccagaggctgaggcaggagaattgctggaacccgggaggctgaggttacagtgagccgcgatcacgccattgcactccagcctgggcgacaagagcgaaactccatctcaaaaagaaaaaagaaaccagtgcacaaaatccagggttttttttttactcctagtctagttttctttgttttgttttcctgtgtgttgtatttattatctcctcatgacttgtggattaacttcaaatcatgatggtaatctctccttcagaggcagcccagacataagtaacctcctaggataaagaccagaagactcttcaccttcaattacaaatattttttgtatgattgctatatgccagctgttgttctaaatgcttggagacagtgaacaaaacaagcaaatatttctaccctcatggagcttatatcatagtgagaagaaaataaacataataaatatgtaaaatttatactatgttagaaggcaaaagcaccacagaaaaaagaaaaagtagagcatggtgggagaattgagcactggattataatttgaaatagatcaggctgtgacccttattaagaatatgatgagccgggcccagtggctcacgcctgtaatcccagc

SEQ ID NO: 96822 - DNA, 35064 bp, Homo sapiens
ggcatgagccattgcgtctggccttgtatttttatttctaagtctggtgactctaccttggtcctatcccctggcccacccctcagtccctgctgctaaaatgtcccacagaggctgccggtgcccagtgggcgccctcccaagctttgagtgtctctgtgaatctgtgtgctcctgatcttgcaggctctgtttctctcacttctgtctgcttgagtctcgccctcctgtcccctgctgtctacctcagacagtccctcctcagcctccctctgcgttccctgctgtcctgcaaggtgacgctgagcaacatgactagtacacctggtgctgaggactcaggctccccaaagggccagcctgcacagccaaagggggtcccctgagggtgagaggagcgtaggggactggtccctgctcccctggatatggggaaaacccaggactccaaactccagcccctcccactccagccacctgggagagcccgcttcacctgggaacaggttctaccatccagaaggcaatcaggcacgtgccctaaaggggtaagccctgtcccttctgtcctgggagaggggcaggcagcaggaacagccggtccatggctgggctcccaggtcccacctgcctgtggcagagctgacgagggctgggaacagagggcttcaccagacctgtcccacccacggccctcagctaagcaacagaagtgagctccctcttccctgatgacccaggaaaggggctaggacctggcaccactgggacaagcctgggagaccagcactgtgctggcttcctggctcatgtgactttatttttattttattttattattatttttcttgggacggagtctcgctctgtcgcccaggctagagtgcagtggtgtgatctcgattcactgcaacctttgcctcccaggttcaagtgattctcctgcctcagcctccagagtagctgggattacaggcacctgccaccacacccagccagttttttgtatttttagtagagacggggtttcaccatgttggccaggctggtcttgaactcctgacttcaggcgatctgcccgcctcagcctcccaaagtgctgggattacaggcatgagccaccatgcccagacttgtgtgactttaaacaagttacctaagctctgtgagcctcagtttcctcacctgcaatatggggctagaaacatacctacctcatgagcatgatgggcttcaattcaatcatctaggtcaagctcttagcacagtgcacagaaatgggacacccttgaggcatatttcttctctttgtctctgccggccaggagccaattccgtatcttattacacaataattaaccaatggggaggcagggagcgccccctctacctcccaatctcagagggtcctgcagacccactgcaactccagaagtaccatgtatgggaagcagagataattttgctctcagacgaggcctgaggaggcctttcccttctgggcctgggcccaggaaacacggctggccttatggagaggagtctggggaaggagaccctcccctggggggatcacattacctgagtgagagaagctggggaaaaagctgggggcgggggtgggagggtgttgggggtggtgccaggcccgcatgcctgtgtgccttgggtgtgtggcccagcagaatttgttggatgctttgggattttatttttcttttttctctaatttcctttgaaaacatatgtttggcctccattacagaagtcctgcctatcgcagggaagcccacggcagacaacgcaaaccccagaaaagcgctggctgccgtcggctgcaggttcctgcatcttttttccaatgtgcacttcgttttaataaaaaatgggaccattttgtatacactgtttttgtatcttccttttctcactgcgtaaccttttcccatttgggaaaattctattctgttgacaatgaccagctgcatagtgtttcatcttctggctttgactgattgattcaaagcccatcctaaggacagctgagcagtttccaatttctggctgttgcgaaagagcgaatttctttaggatacattctgatgagtggtgtcttcgggtcaaaggtgtgcaaatcgaaaacatttattggttcatattacagaagctgcgcacgcgcgcgcgcgcacacacacacacacacacacacacacacacacacaaaacacactgtcataattccagcaggcgctgggccctggctgcaggcagaggcttgaggagggctgacttgggctgagctgatgtgggttggctgcctagggagcctagaaagttcttcatggagaggagagatgggatctgccctgcttgtctgtcctcgggttcgaggttggccatccccccacctcaggctgcaggggtcccgcacccgcagaaacatggacgattcaatattgatacctggggacctggggccagctgggctgggtggcagaagagagccagccttcctacctcagctttgcccccacccacctgacccacccccagcccaccttcaggcccacctgaaaagctgcttcttactgaaagcttctctgatcctcagccagaagtgcttcttccctcctgcagtacctgggacagaccccccagtgaggatgggggagacccctccctcctgggggatgggcccggggcttgaggtgggagaggagcggcctgggttggcgagacccttccttctctgggcaggaggcccagaaagtcatgttatggtgggtcttggagggtaggagctttccatgtgatcccataggcagtggggggacggcagtgacaggcggtgaggatggacagaagccgagggcaggaggagaggagacagctggaaatcccagagacgatgcggggtgtgagcatgggagagagaatgtggggcttcatagaggcggcttctagaattgacttttttgctgactgtggggtcagggctgagagaagcgtcaaaggcccaatgtccaggtgtccctagccggagaggtggggttcaaatcagcctccttcgggtccatgcagcgtggcaccatggtggctgccatgccctggctggctgacctcatgcaaggcaccgcatttcctgacctatgcacagggcataacaagcgtgcccaccttaaggggcttcgtggggtcaaacaaagcaatgggtggaaagttcagggaacccctcagtgccctgggctcacaccaccagtctctgagtctatttccttacctggagtagatgaggttaacgtgcctgccttgcaggcccaggtatggaaagcattcagcacatttggggtaagagttcgaaagcctagtaactagggggcttaccccttaagcccatgggaactgctgtgggatccccgtggtcagcctggggttgacatctggggtgttgcaggggcgccccctgaggggctgtgcactgtcagccagggagggcctgccaagttatgatgtcctgccctcagagacatgggtagggaggaggctaggaggggagggaccccgcccctagcagcctccggagactgaacacaggcccaggtgcccacccagcagagagctgcccccagcttccagccctgggtccagcaggatgcagaagcagcccctgcccactggatggggggcaggtggtaggggtgcccaggtgcccctgtgcccttctgccagccaggcctggaggccccaggagtaacgagataatcacagcaattgcagcgagataggactgtctgcttgtggagcactgagatgctggagcaggcggggggccgggagagtggcaggaagcttcctcaggcagagtcgctcgtcccaccagccggggtgccaggactctcatcctggaaccctgcactcccacccagccctagtcttggtgtccaggaagggctctgaggccttttgctcaaatgagcccatcatctaatgagggagaggagtgtgggtggggagctctgcgggctgcctggaactgactgtttagagttcaggttatctttgtttaccactgagaaaacataaagctgaacacaggtattaactgtgcccacctgctcctgccattgattcgctcatccagagttgcagcccatggcaccagcaataaaggaaattgcttttgaagttgacagaggctgggaatgaagctccaagaccgactggcccgtctcttccaggtggcagctgggtccctccccacccacctgtcccccaaagccaaagacacgtagttgtcaccagggagctgggaagcagcctccaatcctgacgtgtgtttttttccaagagaccctctgctgcccaggattataggctcacacctataatcccagtactttgggagatcgaggcaggaggatcattcgagcccaggaattcaaggccagcctgggcaacacagggaggcccccatctctacaaaaaaataaaaaattagccgggcatggtgacatgcatctgtggtcccagctactcgggagactgaggtggggggatcgcttgagcccaggtccaggctgcagtgagctgagattgcaccactgaactacagcctggatgacagagcaagaccctgtccccaaaataaaaataaaacaaaagaccttgtgcctatgtctcccagcccaacacggggccatctgccagggctgcagcatgagggcatgaggagagatgctaagcaggacttcctgaggaccagcatctgcagcatgaggcagggtgtacactctcttcccgacagttctctgggaaagcagtgtcaggcctggggaatcagaactggacaagaggccttcctgccccaggcacgtgctcatctgcaagccttccaatgacctaagtaggggaacctgctaagatgttcctccaccaaggggcttctctgctttcagcacccagactcccacttccccaggtcgaaggacctcagagaggcagatcattaccccaatgcctcccagctccgtctcccacacccttgccctcgtcacaccgggccacagcgtccctgtgcctgcagactctttccctactgggaagccagggtcctcgcctgggttctccttcttcaaggttggtgtagtggagtgaatggtgtcctccaaaagatacatacacatctggatccccagaacctgtgaatgggaccttatttggaaaaagggccttttgcagatgtaattaaattaaggattttgagatgaggaggtcatcctggattatcaggtggttcctaagtgcgatgacaagtgtccttataagagacacacggggagatggacacagcagagcaggagacaaggtgatggtgcagacagagcctggagtgacgcgtctaccaggagcgccagggactgccatagctcccaccagccaggagagacccctggaacagacacactcagcaggtggggaaggccctgcccctgcctcgattttgaacttctggcttccagaactgtgagaaccaatttctgttgtttgaagcccctcattgtggtcacgtgtcatagcagcttcaggaaacaaatgtagctggtgttctgggatgtcacccacacccccaacgtccacgacagccataaactgttgatggcaagtctgtccctccaggatggtgtccatccaaatttcagatctctattcccagtggcgccgtgggcagtgtggtataatatgaaaaatatctggtctttgttcctgggtcctggcacagagttcccaaacccttggaattttctgagtgatggaagcctcttttgttattgataagaagccctttccataccacttgagtttctgctaatgaggtgacttatggtcaaaggcagttctgcactcctaccgatgctccctttaagtacatgcaaattaaggggcagattatgcagacatttctagaaaaggggtggtaacttccaggtcatcaggtcattgccatgggaaggggtggtaacttggggatcttgccatgaaaggggtggtaacttccggttgttgcatggcaacagtaaactgcaatagcatctgtgggtgtgtcatatgggcaggtgctttcgccccatttctattgtagctagagtcgtcaaatcaattcggtgtggtgtcccagcccagcctctggagtcaagtttcacctcctgagtggagtcctgcctcctacctcaggaagattgagcccaggtgttcaagaccagcctggacaaaacagccagacctcatcatgaattagagtaggctccgccatctaggtttgtgtaaggacaccctgtgatgctcacacaatgacaaaatcacctaagcatgcacttctcagggagtatccctatgactactcccttttgtggacattcgggttgtcaggtctatttctgaagcacccggaaacagtcagttctggcattttagagaggttctgtatctgcagccttgttctgtgcaagcctactgggtgtctctttcagaacatatcccgatttcggagaaatcccccaccatcctgtccatgatcgagggcaccaagaactgatgcttgagccagacactcaaccacaaactgcacttcagggaggcccacagcctttgaggaggtttggagtccgctgcctaattagggctcttcatcttggtaggtaacacaggagggagtggagcctggggtttaggaagtgtggcaccgttagcatacacagaggaagctcataagtgmtctgcaggagcccaaatggtgctgaggtctgtttcatacgaagagtctcggaggccaggattcagctgaggagacagattcctgtcctcgggtctccctgccataactctggaagacaaccttgaaccagtggatatgattcttgtaggatattaaatatgtctcttttcrcagtcatgctatttatttactcaacactttttattttttttgagacagagtattgttctgtggcccaggctggagggcagtggcacaatcttggctcactgcaacctccgcctcccggttcaagcaattaccatgcctcagccttccgagtatctggggttacaggcctccgccaccttgcccgggtaattttttgtatttttagtagagatggggtttcaccatgttggccaggctggtctcaaactcctgacctcaggtgaggatctgcttgcctcaggctcccaaagtgctgggattacaggtgtgagccacctcacccagccttttttttttcttcatatagggtgcaaaggtacattctctcccgctcttattatcacaaatgtcaaattatgaattaaagatgttttattgtagctgctcttgcaatgtgaatgtgtgtgtgtgtgtgtgtgtgtgtgtgtgtgtgtgtgtgtgtgaatgtgtcatatttgcatttgggccggacctgaatgaatgactttagaatgagactctaatgaggatgacacaggcggctttcgagggatgagacctccccggagaaggacagagacattatttggctgtcttctttccggagggtaaggatttggctaagaattttaaacactcacgtcctccagctcacaggagtgggtcaagagcagctagagggagtgcagagaggccggtgtcgatgttccagaaaagtgagacgagggatgtggtcgatgactgccctgccagccgggtgcaaataatgcatgggaaggtatacaagtccggtggaaagaaccctgggctggcgataaggagattggcctgtgaccttgggtgagttctgtttggctttgagcaagtcgcttaagctctctgtgctgaagcatgtgaccgcgcatggaaaacaggccagagatcggcctccgtacctcaggagactgagtgggttgttaggtacaaaatgcctgaagtcctttccacagcaaggcagggcatacacagacctatcaataaaactgaaggcatcaggaatcctggtggggaaactgaggcccagcccaggaaagccctgtgcccaaggatccggggattgtctccatcctgcctttagggaaaagcaagctacccatctagggtctgggtagagcaccccgggaagagcaaggagacatcccagatggaggccctgccaggaacacaggccatttcccttgcaaagatgaaattcaaatctgaggtggcatcagtgccaggggaggcagctgggcacagatgtgtcttgggaggatctgggggcagcggatcatgtcacatgagagcaccggaccaggattcggcctgacccctccctcctgtgactctgagccctcaggctgtgggggctgactgtcccaccgcccaggtcattctcggcactgccccagagccatagcggaggcagggctggcataaagggggccctgggacgaccccaggccctaaggcctccaggcctgtccgggccgcccagctagggaggctgagatggccgctcggccccagccagcatatgcattagtaatggccactgatcctgctggccccgcgccctgtttccagagtggggcagtaatctgagcccggctgcccactgcctccaggctccaccctacgttgctggggccattgaatgcctctacttttccttgttctcagctctgcatcgaaatgaagagaaacacaaaccagcgatgtctcctcaacgtcctgggcgttagctgttcccaccatcacttcatagagaggtttctggatgggaagcgttaggaaagacccagggaggcctctgaggacaccttgcgcagatgtgaggccttcctgggctgggcctcagtttccttactgggggtggacaggtctgttctgaggctgtcactggcactgatgttctggggtcctggggcccattgcttgccctaatgtggggggtcactctggtggaggggacccggtcagaccatagcaggctagaccgtgtgtggtgacagcaacacggcccagtggcagaggctcctgggggtggrggcattaggggatgaagcaggcctggaggatgggtggatccagagagcactggtgagtggggggggtgcctcagctcagggggcaggcctgcgggatggggggacccctgggacatttatccagcctgagactggaggcagctcttcttaccttcctgggaagggccttcagccctgcctctccccctgcacccacctggcaaacctttcactcccagcagctctgggatgtctctcgagggacccaggctccgtcctgagcctgtggcctgtctccggcagcygcccttgggtgggaaggtcctggctggccccagakgtttttcctaagagcctgtaattctccccggagagataaggcatggttacatggactcatatcacactggcagagaaagcgcctccaggaattaggccaccagccaggggatgggcaggcctgtgtaggaagggcagcctctcagttggaggaagtgggggtgtgggacagccgagggcactgagaaagtggggaagaccacatcttcatgggagggtgggaccagcccaggctgtgggagtggcctgctgtgtgacctcagagaggccacgatccctactagctgcctctaggaaaggaatctgagcatgaaggagtagtggggacagggagatttgcttttcactatataattttttgcaactttttgaaaaaagtacatttttttttgagagtcttgctctgtcgcccaggctggggtgcagtggcatgatctcagctcactgcaacctccacctcccgggttcaggcaattctcctgcctcagcctcccaagtagctgggattacaggcatgcaccaccacgcccggctaatttttttttttttttttttgagacagagtcttgctctgtcacccaggctggagtgcagtggcaccatctcggctcactgcaagctccacctccctggctcaagtgattcacctgcctcagcctcacgagtagcttggattacaggtgcatgccaccatgcctggctaatttttgtatttttagtagaaacagggttttgtcatattagccaggctggtcttgaactcctggcctcaagtgattctcccacctcggcctcccaaagtgctgagattacaggtgtgagccactgaacctggccagctgattttttgttgttgttgttgtatttgttttgtagagatggagtctccctatgttgcccaggctggtcttgaactcctgggctcaagcaatccactcacctcagcctcccaaagtgccaggattacaggcataagccactgagcctggcctctttgtgaaattttgtactgtgtttatgtatagcctatttaaaaacagtatttaaaaataatggctgggcagggtggctcatgcctgtaatccaagtgctttgggatgccaaggtggaagaatcacttgaccccaggagttcaagagcagcctgggcaacaaagttagactaatctctccaaaaaatttaaaaattagcagggcatggtggcacgtgcttgaggtcccagctactcaggaggctgaggcgagaggattgcttgagcccaggaggtcagaggctgcagtgagctgtgatcatgccactgcagtccagcctcggcaacagagtgagaccctgtctcaacaacaacaacaaaagaaatctaaacaggcaatcatttcatatattatgacaaaatgatggtctaggcacacaccatcaggatataccatccggatgtatgagaaagcaacagtatttgtcttagtctattttgtaagagaatacctgagaccaggtaacttataaagaacagagattctttttttttgagacagagtcttactctgttgcctaggctggagtgccgtggcacaatctcagctcattgcaacctctgcttccccagttcaaacaattctcctgcctcagcctcccaagtagctgggatcacaggtgcccgccaccacacccggctaattttttgtatttttagcagagacagggtttcaccatgttggccaggctggtcttgaactcctgacctcaggtgatccacatgccttggcctcccaaagtgctgggattacaggcgtgaaccactacgtccagctaggaacagagattcatttcttacatttctggaggctggaaaatccaaggctgagaggcctgcatctgggcctctggctgtgtctgtcatcccataacaagaggtggaagggcaaaaaagcatgagagagaaagagagagagagagagagaaagcaagagagtaccaaacttgcttttataataaacccgctccgctgataaggacattaatccacacacaaagtcagagcccttgcaaaaggtcccactctcaacattgctgcactggggattaagtttctgagacatgatcattgagggacacattcaaaccatagcagtattttaaacaatatggtgcccagcaaaataaaagcttcaataattgaaacaaaatgaagagtttggaagtagagctaatgaacataaatatttgatgtgagagaaagcacgtttgaaagcaaggaggtaggaaaagtgaatctctatccatctctctccctaggtccctaggtaacctcattcaattccacaggctttcaatattatctgtgtgcgaatgactcccaaactggatatatccacaaggccttgcccctgaacacagcacccatttctataatttcctgcctgacattttcacctgctgagtgatcctcttaaactcaccatatccctccctccccaaattcctcctgtgcctcctttctcatctcagtaggtagaattctcactacctggttgctcaaatagaagtccaggcttcatcatcaattcttctttctctccccagcacatccactccaaagcaagcccgccccctccattggcccatccttgcccaggccaccacctctccagcctggattgtgacactgccctctggcttccatgcatgctctctatctcatctctcctctcctctcctctcctctcccctccccttccctcttctctattcttttcttttctttgatggagtctcgctctgtcacccaggctggagtacactggcactatctcagctcactgcaacctccacctcctgggttcaagcgattctcctgcctcagcctcccaagtagctgggattataggcctatgccaccacacatggctaatttttgtatttttagtacagatggggttttgccatgttggccaggctggtctcaaactcctgacctcaggtgatccacctgtctcagcctcccaaagtgctgggattacaggcatgagccaccgcacccagccaatatattttccatacggcagctggagataacatcaacatattttcagtcaggcaaggtacctcatgcctgtaatcccagcactttgggaagccaaggcaggaggatccttgagcccagacgttcaagagcagcctggacaacatagagagaccctgtctctattaaaacaaactagccagctgcggtggtgcatgcctgtagtcccagctacctgggaggctgaggtaagaggatcacttgggcccaggaggttgaggctgcagtgagccatgatcatgccactgcactccagcctgggtgacagagtgagacactgtctcaaaataaattttaaaaataaaataaaacaaaatgtttttcacatccacttttacctggcctggctcccccccacccttctgaaccccacttgccatcgatggcattctgaaggttcattgcctctgggtacaaaaaccttcagagatgcaaacaaacgcataatttgaaaatctgctttggggatggctcccaaaagcttaatcaggcctataagtttccgggcctttccttgtcatttctgtgtatctgttaagggtgaagcaggggttaaaaactgtacttccaccaggcgcagcggccatacctgtaatcccagcactttgggaggccgaggcgggcggatcatgaggtcaggagatcgagaccatcctagctaaaacggtgaaaccccatctctactaaaaatacaaaaaattaggtgggcgtggtggtgggcggctgtagtcccagctactcaggaggctgaggcaggagaatggcgtgaacccgggaggtggagcttgcagtgagctgagatcacgccactgcactccagcctgggcgacagagcgacactccgtctcaaacaaaaacaaaaacaaaaacaaaaacaaaaaaagtgtactttcagccgggtgtggtggctcatgcctataatcccagtgctttgggaggccaagcaggcagatcacctgaggtcaggagttcaagaccagcctggccaacatgatgaaactctgtctctactaaaaatacaaaaattagccaggcatggtggcagtgcctgtaatcccagctacttggagggctgaggcacaagaattgcttgaacccaggaggcrggggctgtggtgagccaagataatgctactgcactccagcctgagtgacagagtgagactctgtctcaaaaacaaaaaacaacaacatcaaaaacctgtagtttgtggctcacgcctgtaatcccaacactttgagaggccgagagggaaggatggcttgagatcaggagtttgaaaccagcctgagcaacatagcgagaccccgtctttaaaaaaaaaaacctgttctttggtccttgttggggcttcagaattcaggtacattgtagaatgggggtgggaggtgtggggatgatgacatttcgcctctttcatactctagtgttgttgcttttgagaaaaagtccggctgggcacagtggctcatgcctgtaatcccaacactttgggacactgaggcgggcagattacaaggtcaggagatygagaccatcctggccaaaataagtgaaaccccatctctactaaaaatacaaaaattacctgggcgtggtggcgtgtgcctgtagtctcagctactcaggaggctgaggcaggagaattgcttgaacccgggaggcagaggttgcagtgagctgagatcacgccactgcattccagcctggcaacacagtgagaccccatctcaaaaaaaaaaaaagaaaagaaaaagtcccgtgaggccagggcaaagctggcatcagtaacaaagactgaatattaaaaatagcttcatctccacaccaccccactccactgagcagccacgtttaaatgtaagaaattctttttaggctagtctcagtatccattcttaacacagaccattgtctgagaagaacattttcctaaaagaattgaaacaatatacgttggagacactgatttttctaaacgtaattgcagtgttttgggaggctaccacattttttgaagatagattggccaaaactcagtttcataaattctatatgattgggttttctttctttctttyttttttttgaaacagaatctcgctctgttgcctaggctggagtgcagtggcgcagtcttggctcactgcaacctccaccttccgggttcaagcgattctcctgcytcagcctcctgagtagctgggattacaggggcctgccatcatgcccagctaatttttgtatttttagtagagacggggtttcaccatgttggtcaggctggtctcgaactcctgaccttgtgatctgcccgcctgggcctcccaaagtgttgggattacaggcatgagccaccgtgcccagctgggttttcttttttaaatgaacatgtgctttaatgagtgacatattttaaaacctatcttctcatgtcataaaatgtgacttgaaaatactgttccaattataattaaccttcattttattttgtctaataaagtgtttaatattttctcccatcaggaaaaataaaattatttgccagctgactaattagttcttatgcttttcttttttattaaagttactataaaagttagatcatgatgtctaacacaattaacggcattatttctgactttctttttcctttttttttttttttttttgagacagkgtcttgctctgttgcccaggctggagtgcagtggtgtgatctcagcttactgcaatctctgcttcccaggttcaagcgattctcccacctcaggctcctgagtagctgggactacagaggtgcaccatcatgccggtctaattttgttttgtatttttagtagagatggggtttcaccacattgcccagggtggcctgtctcgaactcctggactctagttatcctcccatctcggcctcccaaagttctgggattacaggcatgagccaccacacctggtcttgttttttgagataggatcttgctcccaggctggagtacagtggcacaatcatggctcactgcagccttgacctccctggctcaagctatcctcccacctcagccccttgaccacaggtgcaccacacctagctaattttttattttttgtagagttgggggtcttactaggttgcccgcactagtctcaaactcctgggctgaagtgatcctcttgcctcagcctcccaaagtgttgggattataggcgtgagccaccagcctggccccctgattttctaatacaagatttttgttaattattccccaaagggaaacccagagtatgaaacacacttgagcacacatttattgaaagaatactataccttcttcccataaccttcaagtcataaattatttatcatcttagtaacacattaaattgcacagatacacaataaataatgagtgtaaggacaaattgtccaaaacatggaaataaggcaacagcatggctgtcttttcacccctgccaccttgaaaaaaatttttaagtagaaatgggatcccactttattgcccagactggtctgaaactcctgggctcaagcratcctcccacctcagcctcccaaagtgctgggattgctggtgtgagccatcgtgtccaccgtgggattactcagttctctaggagaaggtatctgtgtttgactgcttgactgttgcttagggaccacgctctgtgaaggtacttgtgaacttgcatatttttgctcaggagagatgcaaattatttctgttgtgtagagaaggtaacctcaaagattacagttgtgtgtgtgtgtgtgtgtgtgtgtgtgtgtgtgtgtgtgtgtgtttgagatggagtcttgctctgttgcccaggctggagtgcagtgccatgatcttgactcactgcaacctccacctcccaggctcacgcaattctcctgcctcagcctcccgagtagctgaggctaaaagtgtacaccaccacacatggctaatttttgtatttttagtagagaagaggtttaactatgttggccaggctggtcttgaactcctgacttcaagtgatctacctgcctcagccttccaaagtgctgggattacaggtgtgagtcactgtgcacaccttagtttcctaacccttcggaatatgataggttaggcaagattcctgtaagtgaaaaaataacatgtataatttacagctactcaataagtcttagttaagctttcttggtatacttgccggaagttgatgaagggaattaactttagtgattgagtaaaaagaaaattgctttgcaagtcaggtgagttctacttcttagcttccagcaaattagaagagaactgaatagatttctcagcaggtagatcattaaaaataatttgtgatgatagattacgctttgattttggctataattcagaaaaaattcaggaaaccaggaggcagaggttgtaatgagctgagatcacgccactgcactccagcctgggtgacagagcaagactcctcaaaaaaacaaacaaaaaaaaaaaaaataaaaaataaagattaaaattattcctgaattttgtcctattaaaccatggatataaaaactaataataaaacaaacaaacaaacaaaacaaacaaccccaaacaccccaatcctttcattaagagagacatttctgtttttgtttttttgttttgttttgtttttttgagacagggtctcactctgtctcmcaggctggagtgctgtggcgtgatcttggctcgctgcaacctctgcctcctggctcaagcaatcctcccacctcagcctcccgagtagctgggactacaggcatgtgccactacacctggctaattttttgtatttttgtagagatggggtttctccatcttggccaggcgggtctcgaactcctgacctcaaatgatccgcacacctccgcctcccaaagtgctgggattacaggtgtgagccaccatgcctggctcagaaacattttataacagatttattgagatataattcacattcacgacatccactcttttgaagcaaacaacttagtgatttttcgtatactgtactcacacagtcatgcaactgtgatcactatctaatattagaacattttcatcacctcaaaaagaaacctgttacccattggccatcatttctcattctcctctcagcccagttcctgacaaccactcatttactttctgtctctatggatttgcctgttctggacatttcatataaatgaaatcatacaaatatgtggcctcctgtgtctgaattctttcacttagcataatgtattcaaggtccacccatgttgtagcatgtagtactattttttattccctttaatgactgaataatatttcattatatgggcgaattttattttatttatccattcatcagttgacatttgggttttttaatgagctattatgagtagcattgctatgaacactaatatacaagctttcgtgtggatgcatgttttcaattcacttgggtatacacataggaatgaagtttctgggtctcatggtaactctgtttaacctttgagaaattgccagactgtttgccaaggtgactgcaacattatacattcccaccagcaatgtatgaggattccaatttcttcacatccttatcaacacttgttattgtccatcttttttattatagccattctagtgaatcttttttttttttttttttttttttttttttttttttttgagacggagtttcactcttgttgcccaggctggagtgcaatggtgagatctcggctcactgcaaccttggcctccgggattcaagcgattctcctgcttcagcctcccgagtaaccaggattacaggcatctgccaccacgccttgctaattttttgtatttttagtagaggcagggtttcaccatgctagtcagactggtctcgaactcctgacctcagatgatccacccacctcggcctcccaaactgctgggattacaggcatgagccaccgtgcctggcctctagtgaatcttattgtggttttttgtttatttgtttagagacagggtctctgtctgtcaccccagctggaggctggaatggagtggcaggatcatggctcagtgcagccttgaacccctgggctcaagagatcctcccacctcagcctcccaagtcgctggaactacaggtgtgcaccaccatgactgactaattattgtggttttgatttgcatttctgtaatgactaatgatattgaggatgttttcatatgcttattggccatttgtatatcttctttggagaaatgtctcttcagatattttgcccatttaaaaaattatgttatcttttattgttgagttgtactagttgtttgtattttctggatactaggcccctattttaggtatgtgatttacaagtattctctcccattctctgggtcgtcttttcacctttttgatactgtccttaaagaacaayagtttttaattttgatgaagttccaaattrtctatttcttctgtggttgcttatgcttttggtgtcatatttaagaacccattacctaatccaacaaagatttacaactatgttttcttgtaaaagttctacagtttatagtgttagcttttgcatttaggtctctgattcacttttggttaatttttgtatacaatgtgagatagggatccaacttcatttgtttgcatatgtatagccagttgtcccagcactatgtgttacttttttcaaaaaaaaaaaattgagaaaggstctcactctgttacccaggctggagtgcrgcagcatgatcgtggctcgctgcagccttgacctcccgggctcaagtgatgttcccacctcagcctcctgagtagctgggtctacaggcatgcgccaccatgctcggctttttttatttattttatttatttatttttatttttattttttgagacagagactcattctgtcacccaggctggagtgcagtggtgcgatctccaacagatgtcttccaacagatgaagaaggaatatcttattaatatttatttaggtctttacattatttcaatgatgttttacagtttcaatgtcatattttgctttttttgttacatttattcctaagtattttattatttttcatgttactgaaaatggaattgagctagacaaagcagctcacacctgtaatcccagcactttgggaggctgaggcagaaggatcagttgagcccaggagtttgagattacagtgagctatgaccatgaaccgcactccagcctgagtgacagaaagaaaccctgtctctacgaaaaagaaaaacaaaagagaaaatagaattgtttccttaattttatttttggtttggtcatttctaagatgtagaaataagacaattgatttttgtatattgatcttgtatcctgcaactttgctaaacttcttcattctaacagaacttttttttttttttgagacagtcttgctctgttgcccaggctggagtgcagtggctcaatctcggctcactgcagcctctgaaccctgaaccctggttcccatgttcctcctgcctcagcctcctgggtagctgggattacagctgacctcctgacctcaggtgatccacccaactcggcctcccaaagtgctgggactacaggtgtgagccactccgtcagcccattcgaacagatttttaatcagtctattccttaggactttttatatacaagactgtgatctgcaaatagagacaattttatttattcctttccaatttgaatgctttttatttaattatcttgcttaacctccctggctagaacctctagcacaatgttagatagaagtgataagagcagccaggtgcggtggctcacgcttgtaatcccagcactttaggaggctgaggcgggtggatcacctgaggtcaggagtttgagaccagcctggccaacatggtgaaaccccgtctctgctaaaaatatgaaaaattagctgggtgtgctggcaggcacctgtgatcccagctactagggagcctgaggcagaagaatcacttgaacccgggaggcagaggttgcagtgagctgagatcaagccattgcattccatcctgggcaataagagcaaaactctgtctcaaaaaaaaataataaataaataaaggaagcagtaagagcagacatccttgtctcattcctgatgtaggggaaagatttcagtctttcaccagtaagcattatgctagttgtgagttcttttttacaggttgagaaattttccttctattcctagtttgtcaggtgtttttatcattaaagggtgttgaactctgtcaaatgcttttgctgcatctattgagatgattatgtgggttttgtcctttattctagtaatacaatgtattacattaattgattttcacatgttaagccaaccttgcattcctgcgataaatcctgcttggtcacggtgtataatacatttcacacgttagtggttttggtttgccagtatctcactgaggattcttccatctatattcataggagatattggtctgtggttctcttttcctatgatatctttgtctgattttggtattacaatactattagcctcataaaatgagttgaaaagtgctcctttctcttctatcttttggtaagagtgtcaaaatttggcattatttcctttttaaattttgggtagagttcaccagtgaaactggtttggcctgagcttttctttgtggacagttttcaaactactaagtcaagctttttgttataggtctatccagatattttatttcttcttgagttgttagtttttatgtctttccagtaatttctcaatttcatctaagttgtctaatttgttgtcttatggttgttcatagtattcccttttcattttttctttttagtttagagacagggtgtcactgtgttgcccaggctagtctcaaactcctggactcaagctatcctcctgcctcggcctcccaagtagctggaattacaggcatgtgccactgcattgagctccatcttttttatttctgtaaagtgaggttgtaatgtyccctctctcattcctgattttcacaattttttttcttttctctttttcccccctttagttagttagtttgtattttgcttggtcagtctagctaaaggtttgtaaagtttgttgagcttttcaaatagtcagtttttggtgtggttaatttcctctatttttttttaattttctatttcattaatttctactgtaatccttattatttcctttcttctgtttgctgggggcttagtttcttcttctttttccagtgtcttaaggcagaaacttaagattattgatttgtggttgttcttccttttaaatatagacaggtacggctataattttccctataaatactgttttagttgcatcctatacattttggcatgatgagtttttatgttcattcatctcgaagtatttcctaatttcccatgtggtctattttttgacccattgattacttatgagtatatgtttaatttccacatatttttgaattttcctaatttctttctgttgttaatttcaaatttcactccattatgaacaaaaaacatccttggtacaacttcattccttgtaaatgtattgatgctagttttgtggcctagcatataatctatcctagagaatgttccatgtgcatttgagaagaatgtgtattctcttgtttttgggtggagtgttctacagatgtcagttaggtctagttggtttatagtgttgttcaagtcttctgcttccatatggatcttcttcctatctacctatttagttctattattagttctatgtattattaaaagtgggatattaaagtctccaactatattgtgaattgtctatttttcccttcaattctgttttctgcttcatatattctgcggctctgtttttaggtacatgtttataattgttatatttttctgatggattgatctttttatcatcatacaatgtccctcattacttctagtgacatattttgtttgtttgttttgagacagagtcttgctcgttgcccaggctggagtgcaatggcacaatctcggctccttgcaacctctgcctcccaggttcaagcgattctcctgcctcagcctcctgagtagctgggattacaggcgccggccaccatgcctggctaatttttatatttttagtagagatggggtttcatcatgttggccaggctggtctcaaactcctggcctcaactgatctgcccgtctcggcctcccaaagtgttgggattacaggcatgagccactgcacccagccatattttgttttaaagtctattttgtctgatattagtaaagtcactgcagctttcttatggttaccatttgtatcattttctattaaaattttttcaaccgatttgtatgcttaaatctaaaatatatctcctataaatagcatatagttgaatcttgctctattcatatttttgaagctgattaaggcagggcatggtggcttacacctgtaatcccagcagtttgggaggctgaggcaggtggatcacctgaggagttccagaccagtctggccaacaaggtaaaaccccgcctctgctaaaaatacaagttagccgggcatggtggtgtactcgggcggctgaggcaggagaatcgcttaaacctgggagacagaggttgcagtgagctgagatcacgccactgcactccagcctgggcaacaagatcaaaaccctgtctcaaaattaattaattaattaattaattaaaaaaataaggctgggcacggtggctcacgcctgtaatcccagcactttgggaggccgaggcgggtggataacgaggtcaggagattgaaaccatcctggctaacatggtgaaaccctgtctctactaaaaatacaaaaaatcagctgggcgtggtggcaggtgcctgtagtcccagctagtctggaggctgaggcaggagaatggcgtgaacccgggaggcggagcttgcagtgagtcaagatcgcaccactgcactccagcctgggcaacagagcgagactctgtctcaaaaaataataaataaataaataaataaataaataaataaataaataaataaaaataaagctgattagaagctgcgtgcatggatgagcttgtcaactgrtgaccttcaccaattgtaatctgatagggcgatttcattgggaaactcctaatgttagtatctttgggtccttcctcttgagttggtctgagtacttacagaggagcccttccatttcctgcctgaatggaataagccttgctcccaggcttgtgggagctgmgttagggagggagaccgtgataccattctgcacattaactgtcactttaaacctagatttttggtatggtaatttcccctcagctgtgttcatatcccctcctagcagaatcctctagtcttctgctcagctgggaacgggtcagtagcctgggtacacagaagtggggaggagctctagatccccaaaatgtcttaagctttctttctttctttttttttttgaggcggggtctcactctgtcacccaggctggtatgcagtggcgtcatcacagctcactgcagcctcaacctccccgggctcaggtgattctcccacctcaggctcccaagtagctgcaactacaggctgtatgccaccacacctggctaattttttttgtagagatggggtttcgccatgttgcccaggctggtctccaactcctggcctcaagtgatctgcccacctcagcttcctaaaatgctaggatgacagtcatgagccaccgcacctgctgtcttaagctttcaacttgacctcctgttacagtccttcgtttacccctcactgatcagaggaacctggaaccactgatctttggggtggcagtttgcagtgttttgtttttaatctattaagttagctactacaagtacacctgttttctagttttcaatgggttgtttgtttgtttgttttacagacaaggtctcactgtcccccaggctggagtgcagtggcgcaatcatagctcatggtgacccagaactcctgggctccaacaacaagaatctttttgttgttgtgctattgttggtttgccaatgtctaatcttccttactttttatgtctgtgggttatgtgccttgcccacttttgtaaccctctactgtcattttagtggggttttgatgtcagaggagtgagattaacccgcatggtcaattggtcatctttttttttttttttttttttttggagacacagttttactctgtcagcaggctggaggggagaggcgcgatctgaactcactgcaacctcacctcctgggttcaagcrattctcctgcctcagcctcctgagtagctgggattacaggcacctgccaccatgcctggctaatttttgtattattactagaaacagggttttgccatgttggccaggctggtctcaaactcctggcctcaagcgatccacctctcctggccttccaaagtgctgggattacaggcgtgagccaccacacctggccattggccatctttaatcgaaggccaccttcttctatttaaagctttggtttagatttattcttttatctgcacttttggaagtctctcttcctaagtgtcaagataccgcttttcccattttggctactgcagactctaagaggacatggtaaacttgggctcataactgcacctttctgttcctcacctgaatactaaagatgtgtattagtcaggattattgattgcaaatgacaggaaggagcttgacgttttcccctgaaggagaagtccagggaggttctcaggcagcctctctgcaacctggttctagtctcaccagctytgagytttgcagtcccagagggaaaaggctcttcactttcccaatggtttcaacagaagccccagtcatgtgctactctctgaacggagtaggggacctgactggctggctgggtcagagggccccaccactgcggggagggggagttttggagttagcttccaagaaccacttggatgaggtgagggaggcagggttgttccctcaaatagcattgcagtactgataccagaagaagggggaacagatgctgggtaggcagaaataacaggtgtccactgcagggttatcataccagcctcatggccttgctgtaagttaaacccttagctgggtgcctgaaacattaaaacactagctgctgttgctgttgttatgactgtcactgttaacagggagactttgtggctcgcctttttatcctgaacaacacattcctttgctagggccagaaacaggcacagaacctgtttccctcggccttctggccatgcagttggcagcgaggctcagcaaagcctcctgatcccatgctcttctctcagttgggtctcctctccttatcatccctgcctcctcctccaggtgtcacaccttggcctcacccttctcactgaaagaacacacatgtactttgccacgtacttagccgctatcttggagtgactacttggagtgtgggtgttgtagctttgtgatggttgctcaaataagttataaactgctggggattgggccagggtcttacatgcctccagctaaacccctttctccaaggcctagaatgcaaacctggccacacacaggatccagtaagtcccaggcaattgaggggtctagctggtggcaaggcctggagggaggacatcagatcaccgggcatttggcccatctctgccagttaaggactgaggtccactgctagtcactgtgacagagcctgttctatatgttggtaaagccaacctctcctattccttagtaatattaatagaatcctgattttttagaattgcaaaatttcaaatatagaccttaagacttttacttaaaaacagactaaaggccgggtgcaatggctcatgcctataatctcagcactttgggaagctgaggtgggtggatcacttgaggtcaggagtttgagaccagcctggccaacatggtgaaacccttctctactaaaccattctctactaaaaatacaaaaaaaaaaaaaaaatagctgggtagggtggtacgcacctgtactcccagctactcgggaggctgaggcagaagaatcgcttgaacccaggaggcagaggttgcagtgagccaagattgtgccattgcactccagcctgggcaacagagtgagacttcatctcaaaaaccaacaaacaaaaaaacagactaaagaaatttttattatgaaaaatgtataacctatttaaarcagagaatggtataaagaatgccacatagccgtcattcagctttaacacatggctaaccttgtttcttctattacattcccaccccattattggattattctgaaacaaatctggacatataatttcatccataaattcagtaagtatttccaacaggtgatttttgaacatatacactagtaaatatatacatatgcacaatatcatataaaacacaatacctttatcacaaaacacaatacctttctcacctatagaaaaataatcaccaggtgtggcggctcacgcctgtaatcctaacactttgggaggccaaggcaggaggatggcttgagctcaggagtttgagaccagtctgggcaacagggtgagacctcacatctaaaaaaaccccaaataattacctgggcatggtggcgtgcgcctgtggtcccagttacttgggaggctgaggtgggaggatcacttgagccacggagattgaggctgcagtgagctatggttgtgccactgcactccagcctgggcaatggagtgagatcctttctaaaaaaaaaaaaatcataatttattcatatcataacatactacttattgtttaaatttccccaattgtctcacaattttttaaagagctgacttgttctaataagttccaaaaatgcaaggtccacgttacactagaaccccaattttattcaagggggcaatgtgcccaggtgaagaagtatatttcccaacttcccctaagcagggtgtgggcctgtggctcagttttgcccatgaggtttaagtggaagcgtggaggaggcttccaagactccttaaaaggaactgtcaggccgtgtgtggtggctcacgcctgtaatcccagcacttttggaggccgaggtgggtggatcacttgagatcaggagttcaagatcagcctggccaacatggtgaaaccctgtctctactaaacatacaaaaattagctgagtgtggtggtgggcgcctgtaatcccagctactctggaggctgaggctggagaatcgcttgaacctgggaggtggaggttgcagtgagccaagatcgcaccactgcactccagcttggatgacagatgagaccctgtctcaaaaaaaaaaaaaaaaaaaaaaaaaaaaaaaaaggagctgtcggctgagagatgagcaccttttctctggagctccagccactgtattgaaccatgaggtggccttccaaatggaagtcaaagctagaatgacagacagaaagaataggaaacgaatttcccattctattcttatttccagtctttattatagaatcatttaagattaggtttagttgtaataagtagaaaattaaaaaatttatagcagtgccttaaatatgctacaaattattattattattttttgagacagggtcacgttctgcagcccagactggagtgtaatgtcacaatcttggctcactgcagccttaacctcctgggctcaagtggctctcacaccttagcctctcttgtggttgggaccacagacgtgtgccatcacgctgggctgatttttacattttttgtagagacgggtctccctatgttgctcaagctggtctggaactcctgggctcaagtgatcctcctgcctcggcctcctaaagtgttgggattacaggcgtgagccactgtgcccggcctatttttctatctcacataaaactagttaagagataagcagtatggggaaaatacagtggttccaaaaaaccacagactattaggtatctattgctgcataatggattacacccaaaacttagaaccttaaagcagcaaacccgcattcccatctatttcccagtttccaagggtcaggagcccgggaagctgctctcaggctgctgcggctcaggatcgctgatgaggcctgccgcagccattctcagctgcaccrggtccgggcatccacagccggctcacgcgctggtggtcgccaagcctcagctcttgctggctgttggttcagggcttcggytcccagccagrtggggctctccaaaggagagggcagctcaaaacaacccgctggcttcccccagagcaagtgataggagacaggaagagggagctagagagagccctgaaggtggacgtcgcagtcttcactcaatcaatctccgcagggaacgccctgcaggcccaggtatccttccggtcccttcctcctgcccctgtgctccagatcccccaggctccagccctgcagcccgagccccacccactatcctcgcctcccgccctgccgctcggccctcccgcttcaggtctctgtctctccctttctcccttcccctctctctgtatcctttactttgtgcctctgatgcctgacctggccccaagccagcaccccaccatcccaccctcttcccaccctgccccccggccacgtgcccccgggccagccagaacgctgacccctccccctgagtccactccccgctccccgctccccgcacagcccgggccacgccctacccgggtgccctccctttacccagctccttcccatccagccgggtcctgatccagccccctgctccaggatgccccctcctagcggtgtgtgaggctttcatgacccttcttcctcctttcccgacagatcagcgggggaggtgggctgagccgcccctctcgtcgtcacccctgccttggccgcccagccgtgctgggagagtttggtggccgtggctggcactgcggcagtgcccatgtcagctctggcgcctctaccgaactccctgttttgggggctctttccctacaagggtcacgtcgatgaggaatctacgtccctcccagcccggttcccacctctcaggtggggcagatgccagaggcctcccgggtccacgcccgcgggccacttggaccgccctgccccggccaaccccgccccacccagactcccgcccgcgagcgggtgccgaagcacgaagcacgtacgccccctggtggccgtggcggggactgccgcgcggactccgcagccccgccccaccccgcccgcccagcccaatcccacccgctccgccctgctcgcccctgcctgctcacctactgggctgcgctgtccacgcctggagcccgggcagcttcagttccgcggaggacaggtgtaacccacagagtgattcctttaccggggcctgctaggctccggcccacgaggcaggactggcggcgttctcacgtcctggaagtcaaggccccaaggggaccgaggcgctgcccaggctcccctgactgccagctccggcctggccacccagtccgcccccagggaccggactgggtgcgccgtccacccttccagtacctggaacattctccgcggattgggaggttctgggttctgccctagattcccaagcaaagttgctcctttgctcttgtcacttgccagcttcgtggtttttgttttttgtttttgagacggagtctcgctttgtcgcccagcctggagtgctgtggcgcaatctcggctcactgcaacctctacctccccaggttcaggcgattctcctgactcagcctagctgggattacagatgtgtgcaaccatgcccgcataatttttgtatttttagtagagacgaggtttcaccatgttggccaggctggtctcgaactcctgacctcaagtgatccacctgtctcggcctcccgaagtgctgggattataggcgtgagccaccgcgccaggcctgcttctctaaagatccctgcagcacggagaggctgctagggcccgtgcttctgaataggtagccagctgtggctattgattatcacatttttcgtggtatataattttaattaatttttaattttaaaacaagtgtaaattgttctgcaaaacaactttgttttgtaggactatgcggcactttaaatattgaaagtgtagcgtccaaattgagatgtgctttgtgaaataccccctggatttcagagttagcacaaaaataacgaatcgaaactatctcattcctttactgtgaattacatgctgaaatttttgtttgttttttgaaacagagtctcactctattgcccaggctggagtgcagtggcatcatctcggctcactgcaatttctgcctcccaggttcaactggttctcctgcctcagccccctaagtagctgaaattacaggtgcctgccaccatgcccggctaatttttgtatttttagtagagtcggggtttcaccatgttggccaggatgatctctatctcctgacctcaggtgatccacccgcctcagcctcccaaagtgctgggattcaggagtgagccacggcgcccggcctcacactgaagtatttttgatatattgagttaaatgaaacatttaaccttttttaaaaaacgtggctactagaatgtttttaatgataaatgtagatcacattctatttctatatttctgcactaggaagtgggtttgagttaaatctagttttattttctgaccgtactgcaggtaccggaggttggggaaaccattgtcagtggaaatggggatgtgtatggggaaaggtcctgatcctcagagaccacgcccatagagtgagccctgggcaggaggtcagccagggagcatctcatagggcccaggcagcatgaggttcacacagacataggtacccacagccccagcgggcattgggggcaggcactgagcttggcacagcatgattcttggaaagaacacgtatggatggcctgaagacccaggttctagcatggttatgccactgtgtgactaagccacttggcacagcacaagcagttaatgtcctgttctactcaccgaagggctcactgcagtgagcgagactcgcgaggggaagccctcttcagccctgcccatggtggtcctctctggaggagggcatgtttctggaatcctgatttgttaccagcacataattttcaagttggcagaaatgcatcgtttagctgggtgcggtggctcatgagagcattcttatttttgtgctaactctgaaatccagggggcatttcacaaagcacatctcaatttggacgctacattttcaacatttaaagtgacacgtagtcctacaaaacaaagttgttttgcagaacaatttacactcgttttaaaatttaatcccagtactttgggaggccaaggtgggcagatcgcttgagcctagaagttcaagaccagccatgggcaacatggcaaaacccatctgtataaaaaatacaaacattagccggacgtggtggcttgtgactgtagtcccagctactcaagaggctgaggtgggaggatcagttgagaccgcagtgagccatgattatgccactgcactgcagcctgggcaacagagtgggatcccgtttcaaaaaagaaaaagaaaaagaaaaaaagaagtgcatctttaaaagccttgtcctatgcgcgtgaacacatgagtggtgcgtagcaggccctgatgcgctgcttacagaattgaggaaagcggaggcaaggctgcccacaaggaggccgcagcttcttcaaggagcctcttgccgcgtgctggctggccttggtggccaggaccccaggagaggaagctgagggaggcctgaatgccagccgcacctggcatccggcacccccttctaggttcattgccaagtaccggcagccagaagggtgtagttttctcttagggagtccaagtccgttgttgccacctctgacccctcgacaccaggtcctgggagccaagtcttgagccccaaagagctctgaggagcccaggtccacagaagtgccctttttttgaaaataaacacccttcactacataggtacacacacgcgcgcgtgcagacacacatgcacacacacacatacacacagccagagggaaatgctcctatcttttatcttctaacattaaatccctggtcaggataactattcagtcccaagacgttggggggtgcacacacagtacaccctgaggcccgagagagcaggcttgggcccaagttgcactgtccgggactcaggggggatgagcccctgagatgctacttacaaatagggctgctcagcctgccagggggctgcaaggcctctgcagctccagggattgtgggagtcagaaaaatcctttgtcttggttctgggtgggaagcgggacacccccagatccagtgtcacagccactcattcccaggaggacagagcagtcttcagagccagcaagaaagctgtggggctcagagcccactagctttcttttccaggacaacgtgcctcagaaaccccggtccccttcccaggaaaggaacaatgactcaggcaggtagtgacaagccacctgccacttgggaaacagctagactgaggctgagaggttgagtggtgctgggtgagattactggggttggtggaggggggaggtcgggggacccaagtgccggcgactgcactgagacttctcctgggaggggtttaaaagcagctgccttattgagatcaatggaatgactgctcacgtgacccatgtacctcttaagtccccttcaggctggaaagtgctctacacccccaatgctctgagtctaaaaactctaaacctgtgttgaaacgctggtgtttcgtggttaatatacagcatcctctctcagttactctatcctatgacggggcactgtttcgcagcctgggtggagttgagtcacaaggtggcagagtcagaacctactagtctagggatgtcagtttacagctcagtacccaaggtccatgaaagcccagtgaggagcctgaagttgcacagctaaaggaagggctgggactcgaactcatggctctgtggttcagtcctttggctaaagggtccatgaacgccacccacaaagaatgtattgaatgttttgcttctgggctctggaggcatccagggtagctggggggttccctgccagtgaggagggagcaggcactggcacaccattcctcagtagcccgacctcattcaatctggcaggtaggtatgaagccgggtcaaccggcgcgaatgcatcagcatgtagggaaggagaaaaaggagtttaggggaataaggagaaaacagtggaaaagagctggaatgagaacacgcgaacaaagcaacactatttcctttgtcttaaggtcctgctaacaaaaccgtctccattagactgagcggcatcgccatctggtggtaactaaaggcaaacgctttagaaaggaatcgaaacggtctaatccagcgattagcattttaccatgcaaaacccaccgttcctcatctcccaggaggcttagcacttggcagaggaccacctgtttaggcagatcagtcccagcaggaagctgcactgtccttgaactccaggccacggagtatcctcactcagcgtgagttgacagggcttagaaggtttaggcatgggggtagatagggaccttcgggctttccacggctctagtggaggagcctcacagccccgttcatagccagcagttgtgcatctgagttccaggttcaaggacaggcctctgggcagagcctcttggttattactgcctaagggtgccactcccttcccaaactaatttagtcatctgcattctaagagctgctcagccaaaagaagccagcgtctgctgctcaaaggagccagaacagagagggtattttagaaaaccagctgagagtaatcatgagggctattatcttattgatcaaggtccagccatttgccaaggtatatacacgtttatttaaaaaagtttacagttttcattatacacaactattaagaggttatagtcagaggaggcatgtgtcctgttgacagacgtgcctactagatcatcacaatgcaaggagaaaggtggaagggaggagacagggcgaggaaaaataagcgataaaaagcttcagatttcagttaggggctggcagtcccttttatcttttcaagtatcacacaatatgtaccaaatacaatctgtaaataatggccatttcttcccaagcccacagccaagatgagtgttaggctaaattcagagccctggctcttcctcagatgagtggaaaacctgcgcatgacagggccggctcccccttctcaaagggcttcctccc

SEQ ID NO: 96823 - DNA, 13737 bp, Homo sapiens
tgtgatgggaaggattctctggctttctgggccttgattttctggtccgacaagtctatctgtcctgtagtatcatgattgataagcaactgaagagtacttctgtaaacattaattccaacaaggatatggtatttactcaatctcactttaagttcactatctgtattgggaaccattttgcttttagaaacatgtgttttaatcctaagattagttattgtcctttgaagactacagaactatcaaaggcactgtcagaaagggtccttgggttattaccaagtatatttgaatttcaaagacctcagatatctatgtgaactaagtgaatgatacgatctgttactcaaaaatctggaaatatgtcagatgccaagtagttccccatctaatttagtcaggtcatttgttctctactcaacagcaaacaagacctgtcctccatcatgatgtggggacagaggctgtgtttttggggcccaccaggggccacccttgataggaccagtggagtgtggagtactcaggttgagttgaggctgggatgtctaaattttacaagattatttttcagcccgtgagttaagattgctgcaagggctccagtgtgagccaccaacatcattgataccagctctctgctttagtgggctcatccagcctcatccacaaatatacttcagaaagatggctgagacctgatgggagggaggagactgggtggcaggggccaacggggatgctgtacagaagcagggcaggaggccagcaagtgactgaagatttcctccctccgaactggctggatccttttgatggagagtctaagacatcagcttagacacagacccaacagagagaaaagcttgtctgatttctcgctcatttctaggtaactcatagcagttcaccccacctcctgacttctccaggttcctccataaagtggttctcagatctgaatcccccagccctagaaacaggaagaataacttcctcccagtttatttaacaagaacacacccatagcacttgctgtatgccaggcactgttacacgtgttttaaagtattaatttaatacttattttaaaattctacgatgcgggctcaattattatgctcattttacaagtgagaaaactgaggcattgcaaggtttagtgatttatcccaaggtcatataatcagtgaccaagctgggattggagcccagtcagcctggctctagaatccatgctcttgcccagtaaactatgctgcaaaagatgccatctgctacccaggattaaccatttctgaaggtaactggcagtgaagacatttattctcttctgggtaaagccctatctttgcctaccaaggtaaagtcttggaccctagaccatccctagggggcccctagaccccacatccaatgtggggaagtttttaaagttttggattattcagactaatctgtggtcaatacagagcatctttatttaaatacatattcaagttagtgtcaaaaagagtgcacaaagtgctgctggcactggaattagatgtttccttactgacctctggtatctcctgataacaggcccctcctgcttagtgttgggaaagtcccagattgatctagacacaactaacagctgatatgaaagatttgtcctggaatcacatgtctcctctctaaaatccagcaaacagcaatactccctaaacctggagaatctcattgttgctgaccacatgcccatcaccaaggagcctgcaggaaagcccaagacaaaaaggggagcaggtgtcactgggtggccccttgatcatcatgagggtgtgccacagttcaaagagaaacaagagaggagaagaccccaagggagggcagttctaatatccactgactccacacccgcaccccttaattcagaaatccaacagacatgacaaattagaaactgattctgctggtatgcaattcagaaagtctacatttgaggaaagatatgaacattgactaacggcttttttatctagggatcatttcattgcttttctaaattatgtaaatatccaaacgtcaaacactataatttttttttgccttttcaactgcatttgatatcaaaatctatttccttaatacctctgggttacttgccataacttacacttgtaataagtagtagaaaaaaattaataagaaagcactgtgagtgtaagttgcttgcataaactggatacatctggagctaccaatttagagaaacttgtgaatggttccccagagcacagatgtgcagtggatggtagaggaaagaggaagaagataacagagcaggctgtattgcagcagaccttgtgaatcccaaagtgctccaatgtggaagtgagatctagaccccaggatttatgagatggatgtgtccccaggtgttgtgagagaggagccaagtcacacaggaagagttctaaatggaagggtgtctcacaggacagactcaaagaggactcagcagctgtcttcacattttacactccctttaatttgaagagtctcctctctagctccaaagacaaagtgaaagagacagattttcaatacaaagaaaaacttagaagtcagcctatcagcaagtggaaggtgttttcttacagggcagtgaattctccattgtaggtgctcaaatggagataggaaaaaaccaagagttgggacatcggaaagtcagtcttctatgagactgacttttcagtccatgagattggactgaaaattagaaaattcttcagcttccttgtatatctgagattccaatgtcctgtgaaaataagagaatttggctactttatgaaacagcaaggttaagcagcctaaaaacagtagaaaaaaacaccaacaaggtgggttattttttccttcccaaactctaagcaaggaaacctaagaggaagaactggccagcccagccataataacacctggcacctgggcagtgcttaccgtgggccaggctccggtctaaatgatcttcagacctcagctgggttgattctgaacaattctcagtagtggctcctgagcagtggagctaggacttgaaccctggaaagctgactccatagcccctgctcttaatcactccacccctgccgcagtgctgtaagaatgcagggcattcgtttcctgtggctgctggaacaatggacggcagtctcagtgtcttcaaataacataaacgtgttctctcacagttctggaggcagaaactgaaatcgaggtgttggcagggccatgctgtctacaaagtccagctgttggtaacccagacattccttggcttgtgacagcatcactccaatctctgcccccatcttcacatggccttcttccctctgtgactcttttccttttctttataaggacaccaatcaatcagatgagggtccaccctaatccagaaggacctcatcttaactggattatggctgtaacaaccctctttccaaataaggccacattcacaggtgccaggggttaggacttcaacatatctgtttgggggatgcaattcaaccccttacatactgtaccaaactggaggcacctagaagtgttgactccaattggtagcgcagtccttgaggaaaatgacgacccaagcaaatgtttccttcaatctctgctctaccccgtttcaggtgctatagaaaaattacgggagggcattgttttagagtgagctcctgcactaggtcccaacagaccaaactaaagtggagtcactcatgctaagtgccatttaaccaagctgaaactttaagaaagctggtggtccccaaatagaccagtttttcttgaaaacaagagtcacagcaacccatcagaaagagttcagtctgcctgagtcagagtaataaggaagtcccatttgctttaaccatgacgagaaaagtagtctgaattaagctgacactaaccaatcaacctttaaaataatactgtttccttgttcccaccttacaaaaccactgttctgccattccccagtgggaactctaattctattttatagaatggaggctactggattcatgaatcatgaataaaagccaatttgatctgtaaataattttgtcttttgacaccaggagaacaccacctcccccctcaccagctgtgtttatgacaatgatgccagaggtagcctcttcacatccctttatgattcattcagtatggccaatgaaaatcttttactaaaattgtgcacttgcttcaccctgggctcacacatcttactcctctgctggagggctagaacaccatcccctcaatcctggtacttttttcttccttaccactgagtcagggagctgagaggtttggaagtcagtgggaatccacacagagaaagaactggatttagattgggctgttttccctctgagctttgtcctgttggcttccctatctcctcaacaccacctgcctcccgcacccaccgacacacacatctccagaatgtaactctcctggctgacagggaagcacattatttagggccgtattatcccctctgctcaaaaacaaatgagctcaccgaagtgtacacttgcatttatctgagaccatgtttataaaattcatgaatatggaaatgggcagccatctcccagaatccctcacaccaagagaactggcactgtctgctgtaggtgaaaacctcttcccttgaaggctcaacaacttctacccagaagaagaaaagaacagcatattctttctcatacacacacacaaacacacacacacacacacacgcacacagtatataccaccagtctgtggtcttggaagcaaagtttaataattgaatagctcaagcactaaactcttacatattattaagatactatcctaatatgtctcatttgtcaaagatggaaaagttttgatatgacataagggtttcaatcccaataggaatattaatggtaacaataaaaataacatagcaacacggtttctgttgaatgcctgccacatgccagcaactgctttgataattaaagaattatatcttatgttgattataatccttataatggcttcctgggtaagaaaggtttattactgttttacatttgaggaggagactagggttcagagagggtgccgaagtgagttacacttttgccaaccaggccagaagatgaaagccgctggattgggaaatgcttttgtatcaaaagcacaaaatgaagtggctagtgttacttgttggaaaaaaattaactttggcaagcataaatataattcagtatttgagcaatacttttaggagggtaacagagtggtttatgtgaattctccaaaatgccatcatgaaaattttgatgatgaaaatcacctaaaattgctaattacctgtcttagcctgtctagggctacaaagtaccatatgctgagtggctcataaacaatagaaatttatttctcacagtggaggctggaagtcagagtgccagaatggtcgagttctggtgagggctcttccaggttgctgtcaactctttgcatccttaggtggtggcaagagggctagaaagttctttggagtctcttttattgtattttattttttggagacagtctcactccgtcccccaggctggagtgcagtggcgcgatctcagttcactgcaacctccacctcctgggttcaagcaattctcaggcctcagcctcctaagtagctgggattacaggtgcccaccacaacacctggctaatttttgtatttttagtagagacagggttttgccatgttggccaggctggtctcgaactcctgaccccaggcgatccacctgcctcggcctcccaaagtgctgggattacaggcatgagacactgcacccagcctctggagtctcttttataaggatacttactattctcatccatgaagtctccactctcatgacctaatcacctcacaaaggccccgccccttaaaaccatcacattgggcttaggatttcaacatacaaattttggggggacataaactttccatccctaacattacccaaatagtatctatatagtcrtttctaaatatacacgtatttagaaatttctaaatagccagtaaacatacaactgacttggccttgatataactgttttcattttcttttattttcattctacatgacatattttgggtaattataaaataattaaaattagttgataaagtatggaattagaataaaataattttctattactatctaagccatgaaatgaattaggagatgctgttttcagtgaaacgtcttctagtttttaaagtgcattgtccaattcctttttattttgtgaagattttaaaaacttaaaaaaagtcttcaaattgtttgtgccttgcatttctttaaatcttatgtttaaacatcatgtgctgctagttgctagtcattttctctatcccctgccccagaccctctctttctcaggaaaggatatccagsgatccgggtcccagttagtcaaggagatataagaggaaggctatgaggctttctgggaaacattttctttttccaagagagaagtgttcagagggaaaaggtcctttctcagtttggctccctctttgtgttttagatctggtcatgtgaggctgcctggcttggattgtgagggcatctctcgacaatgaagtgacaagcctggggaggaaaatccacaggcgagaaggtggcagaatggagagatggtccttcatgacttctttgagtcaccaggtccagatttcccgccaacctccagtcttcttgttatgtgatctgatatcattatttactgcagaggccactgagtggatgctcttacttgtgtctgaaaatccaattcactaaattaatcaaaatacggcactcttcttttgaaaccttgctccagaacaaagtggaaggtaatgatggggtgcttttcaaagttccagggaggtgtccctacacagcagacagctgtccaaaggaatgtagatgttggctgcggggagatctgagttgccagactcagtcagaacaggtgtcctctcccttattttatcttaaacatgcatgtcatttttgcatgctactctatgcggttctttcagccagggaacattgctgagcacccgctcacgtgctgtatggagcgcagactgcagggtgcgaggggcgraggtgatgtgctaggcctgaattcaagagggggcgcagccacaggccccgcgatgccggggtggcctcttgtaacgwcgttttaaccgctgacctaagtggatccgctcctctcccgccgcccgctccctgcctgcagcacaggatggcggctggctttcccgagtgggcgcaggtgagccacgctttgctctcccgggtgggcgcaggtgagccattgtttgctctcccgrgtgggcgcaggagagccacgctttgctctcccaggtgagccgccgctcgctgtcccggtgaggggaagtgagccacgctctatgggaatccttcgaatcttcattcaatttccatcgcctccttgtatttatttgggagtacttttaaaaatgaagcctatgcacaatgatgtaataagcgtttatagaacaccactggtcggagctagggcctaggtggcggtgcccgggcccaggtgccgcgcccacgccccgcgcgccgaacgcacgcacgcacgcactcacgcactcacgcacgcacgtacggcgcgagtccgagggcgacagcagcgcgcaggcgcacgtcagtccccgcgcttttcggaggctgccagcgtcccacaccagccgcaggtaggatgcggtgacgggaggcggggcaggggcgctgctgacccctgtggagcatcagggttggggcgtaggggagaggcgggcgtgtgcctctggaatgctgggggtcgcggggcggtgacttcgcgggaggccgtgggaggcgggagccaggcagtggctgtgcccttttgcttctgtcttagcgggagggtggctgacccgctagcccagaaccagactcatccaggattaggaagctggggcccggcgtggacggcaggctcggggccaggtctgcgggcggcttcctttggcagagcctgtccgggggcggggccgcttaccgcaggcatttactgggcccagcggggctctgggcgcccacagcgggggtcagtcagttcccctgtgacccaggcaagctcttaatctctgtgatgagaaagaagggctcatacctttcaggggtcatcgtgaggaatcagaagaagcagtattttatagagtattttctaagtgctgagtcctctgtctagtgctttgcagaattaaaataccttgtcagctcagtgatgttgctgcgcttcttttataggtgaaaaccggcagaaagacattaagagattttcctgcagtcactgctggcagatgatagagccaggatttgaaagcaggcagcctggctccagaccctgtgctcttaactcccgttttgcatcaagaacagaatcctatgaaaggcttgtacagtgcttggtactgagtaggcactccgtcagtattttagtagctattattccaaaggacactgtattctaggtactaagacaatgtgaatggaatggaaaacaattcctccctgcagaagccaactgtctaggaagacagataatgacattattaaaataatcagaacattggcaaaataaagaagattgaaatgcagttcatatgacagtgctaattaatcatactttttagatctaggaaaggccataaaggttaaattgacttggaaatggtaaacaagacaatggttgtgtcactgatcggtgatggccagtttttggttatccttatttgccatttaaatgattgaattgaaaggaagaagtaagacttggaagatgaatattgaaggaaaggtgaagatggaaaagagaagggggtttattctgagaacagtgactagaactctgaggtatggtagaaatttcaggataacagatgataaaggggaatgaagccatggagaggaagagaatgataatattaattgtgaaagtttgtgtcaagtgttttctgagtcacctttctttcagtttctcatttctagtattgtataaatgagtttaacatcaaaatggtatagtgaaaaaaaggatgaactgcttgacagaagaggtcagatctagttttgactctagcttatttagctttacagctttaaataaattacagtgtctttaaagctctggatcttaagttttctaattgttttttaaacaaagatttgtgaacacctacttacaatgtgacaaatgtctttgtaaggcattatgggagataaaagctgcattaaacctggctgttgtacttacaagtaatttggaaggcaaaatttcaaatacttgaacctaaagtagggtttcttggttttcatttaattgaaatactgttaggaaacaaaaatttttcataaatttttcttgtggatatgtaagtaaattctatatatctagcaatatgatacatctatagttctgtttaaaggtaacaatgtgaggaagcttatgcgaataacttgacagaagaaatctaaagtaaaagcattttcctagtaggctagcttgttctcttatttcatttattgtaacagtttcactttttaataattatgtgaaattaggaaacagatattctagggcattctgtttagggtgatgaacttattcatgaatgttattaaaaccatttaaatatgccatagtttaaatttgtgatccatgctgttcaatctgtgacctaggatagcagcatcaaggagcattgtgtacatgcagaagtgcacagtacctggagtgaaactgcttgtgttcgatttctgataccattcataactggctgtgtgatctcaagtaagttctttaagtctctcagcctcggtttgtacatttgtgtgataaggataatgatagttttcagattattttcatagtcattgcttgatttgattcttccaatggttcctctcactttgcagataagaaaactgaagaaccagctgggcgcggtagctcacgcctgtaatcccagcactttgggaggctgaggcgggtggattacctgaggtcaggagttcaagaccagcctgactaacatggcgaaaccccatctctactaaaaatataaaaattatccaggggtggtggcaggtgcctgtaatcccagctacttgggaagctggggcaggagaagcacttgaacccgcgaggtggaggttgcagtgagctgagagcgccactgccctccagcagcctgggtgacagagcgagacactgtctcaaaaaaaaataataataaaataaaaataaaccatcagtgatagtaaaaagctcacttaagctcattcacctagttttatagatcagacttaaacctcttgtttattttgttttgctttatgtatctatagttccattgtttttaaaatttaaaattaattttaaaccttatgaatgctttccctacagataaaattatgtaactagaacaatttaactcatataaattattatttaatcaagtccttaattttgaagacttcatattgatatgtcttgaatacttgaaatctatagttaactagatatttctcttataacctgtccttataaatctacattataaataaaaagtccagtgtcccttccttcagattagcagaagtttcaaaattacatttaaagtattttctttgttttccttcatactgattttcatttttattgtttgttatagaacctctaaaatgcagacctccagctctagatctgtgcacctgagtgaatggcagaagaattacttcgcaattacatctggcatatgtaccggaccgaaggcagatgcataccgtgcacagatattacgcattcagtatgcatgggcaaactctgagatttcccaggtctgtgctaccaaactgttcaaaaaatatgcagagaaatattctgcaattattgattctgacaatgttgaatctgggttgaataattatgcagaaaacattttaactttggcaggatctcaacaaacagatagtgacaagtggcagtctggattgtcaataaataatgttttcaaaatgagtagtgtacagaagatgatgcaagctggcaaaaaattcaaagactctctgttggaacctgctcttgcatcagtggtaatccataaggaggccactgtctttgatcttcctaaatttagtgtttgtggtagttctcaagagagtgactcattacctaactcagctcatgatcgagaccggacccaagacttcccggagagcaatcgtttgaaactccttcagaatgcccagccacctatggtgactaacactgctaggacttgtcctacattctcagcacctgtaggtgagtcagctactgcaaaattccatgtcacaccattgtttggaaatgtcaaaaaggaaaatcacagctctgcaaaagaaaacataggacttaatgtgttcttatctaaccagtcttgttttcctgctgcctgtgaaaatccacagaggaagtctttttatggttctggcaccattgatgcactttccaatccaatactgaataaggcttgtagtaaaacagaagataatggcccaaaggaggatagcagcctgcctacatttaaaactgcaaaagaacaattatgggtagatcagcaaaaaaagtaccaccaacctcagcgtgcatcagggtcttcatatggtggtgtaaaaaagtctctaggagctagtagatcccgagggatacttggaaagtttgttcctcctatacccaagcaagatgggggagagcagaatggaggaatgcaatgtaagccttatggggcaggacctacagaaccagcacatccagttgatgagcgtctgaagaacttggagccaaagatgattgaacttattatgaatgagattatggatcatggacctccagtaaattgggaagatattgcaggagtagaatttgctaaagccaccataaaggaaatagttgtgtggcccatgttgaggccagacatctttactggtttaaggggaccccctaaaggaattttgctctttggtcctcctgggactggtaaaactctaattggcaagtgcattgctagtcagtctggggcaacattctttagcatctctgcttcatccttaacttctaaatgggtaggtgagggggagaaaatggtccgtgcattgtttgctgttgcaaggtgtcagcaaccagctgtgatatttattgacgaaattgattccttgttatctcaacggggagatggtgagcatgaatcttctagaaggataaaaacagaatttttagttcaattagatggagcaacaacatcttctgaagatcgtatcctagtggtgggagcaacaaatcggccacaagaaattgatgaggctgcccggagaagattggtgaaaaggctttatattcccctcccagaagcttcagccaggaaacagatagtaattaatctaatgtccaaagagcagtgttgcctcagtgaagaagaaattgaacagattgtacagcagtctgatgcgttttcaggagcagacatgacacagctttgcagggaggcttctcttggtcctattcgcagtttacaaactgctgacattgctaccataacaccggatcaagttcgacccatagcttacattgattttgaaaatgcttttagaactgtgcgacctagtgtttctccaaaagatttagagctttatgaaaactggaacaaaacttttggttgtggaaagtaagtgggatacttggaatcaaggcatctctgtattacagtcttctttattttttagcatagaaagttggggatgtgttaattgtatttttaagaatatattctaaattctgtacttcaaataatagcacagattttacatctgattgacatagtgtatgttaatgtaagttttgctttccagtgattacctgatacgtaagcctatttgaacaaagtgagaatgaacttttgtttctaagaagtctttatcttgaagctatataacatgaaaagtgagctcaaattttttttagttgaagattacatataaagttgtgtctgattaatattcatcttttattgaagaaagtgccttctgatggccacataattcttaatgtcagctagtataatggtttacatttggacaaagtattgcttagtgttatttaagtagatttaagatctcaaagctaaagtgccaatttttactttcttcagccaatttgttacctcttttatggtttttaatttttatcaggactaacattttcagaaatagcaaggtgtgatctagtattagattcacagaactgaaaggttaattaagaatgttggttattttcacgggagcgtgtgatatttaacattaatattttatttgacactacagcctgtaatactgctctctttcaaaagcaagttttcagatttttataacagacccattttgttttatgaaacatgttcattacagaaacatgagaaaatagagataagtaaaaagaataaaagtcactattatcctaccactttgcgggacacactattaatatttaagcatagattcttccaga

SEQ ID NO: 96824 - DNA, 14104 bp, Homo sapiens
gattttcagggccccatcccaggcctatcatttatcaaagtgtgaaacactatgagaatctgtattctttgaaaaacaccatgacgttcattttatttgaaatcttatataataaagaagttatagggatggggagactttagaaagttacccagaaaaaacactttaaatgagtcaactaacaaaaacaaaaaaactaattcatggctattagaaatcttatcagtggttacctggggcagtagaaggagaactccaacagggcacaagaaactctgggatggtggaagtattctctatcttgattagaataaaggctacaagatgtgtgtatgcacatcagcaattcattgaactaaatacttaaaatccacgtatttttttctatgaaagcatacaataatgaagttacttgataagtcggaaagcatttggaaatgcagactcctgggtccctctcccagagattgctaatcaatgggtcttgtagtgggaaccagttaatctgcatttttaactccaagccatggttgacccttcaaccatactttagaaaataatgacctagcataatgttctatgtccagtaattactgatcatgctttgcaaaaatatatcaattaatgataaacttttaatacaaaaaaatctaggtaattttgattcccaagtttaggaaatactaagaatattaagtggtaggagttccaggaagaagtaaaaagtaagacagttaaggaagcttgttccttcttccccgtctcccacaatccttcaatggctctccatcacctagtgcagtggttctcaaccaaggatgattctgctcccccacgtgacatttggcaatgtctgtagacatttttttcatttcacaaccagagagagcatgtgctgctggcatcttagcacgatgacagcagggatgctggtaaatactgtacaatgctcaagacagccctcccctccctcaaataattacaaaacctcaaatgagaaactctgacctggagcctcacctccaataaagctaccagaagtagtcagttgtgtcccagagttaaacaaaacaacagaattaagatgttacaacttcaggaaagtccatttttacttccagatcagtggggaaggaggaagaatatcatctttatatttcacataaagcaaacaaacattgaataaaatgcaaatgacacatgaatacttaagacttagaaaacttcaaaataacgtaagcaggagcagcttcaggctatccccccaatcacaggggatacttaattctcagctttcaaagtatagtatttttaaagttaacactggcctaaaacataatactgtacataaactttagcatgacagtctgttgctgcagcatagtttaacctagtgctatgcaaagtgtggtctgtggaccaatgagccagtctgtgaattatcagtttatgtcagagaaacacaaattgagagcacaaaaatggaaaatttaatagcagaataattttatgtctattgaaactaataataaaaaattggggcttatagtttatctttcttattccatttccactttttttatttgcagtatagtcatgcagtatgtccaacgtttggtcaacaatggacatttatgacagtagtcccataagattactatggagctaaaaaaattcatatcacctgtgatgtcatagcagtcacaagttcatagtacagcacatcatcttttctatgcttagaagcacaaacacttggccgggcgtgatggctcacatctataatcccagcactttgggaggccgaggcaggaggatcacttgaggtcaggagttccagaccagcctggccaacatggtgaaaccccgtctctactaaaaatacaaaaattagctgggcgtggtggcgagtgcctgtaaccccagctacttgggaggctgaggcaggcaagcacctgtaatcccagctactcgcgaggctgagacaggagaactgcttgaacccaggaggcagacagaggttgcggtgagccaagattgcaccattgcactccagcatgggcagcaagagcgaaattacgtctcaaaaaaaaaaaaaaaaaacaaaaaaagaaacacgcttaccatttgtcataattgtttacagtagtcagtacaataacaagctatacaagctcatagcctagaagcaataggatatagcccaggtgtatagtaggctctaccatctaggtttgtgtaggtaaaatactctatgatttctcaatgtaccgtattgttaacaacgcctaactgtagtttttaaaattacaatctaacctactctgactggtgtatctattgagtagcaaagccaagatttgcatccatatctaacatcaaagcccatgttctaaatcattattaagattttgaactcaaaccccaatgtgtaatccctacatctggatagctggactgcaccaagtgtaagtcacaaggatttagtgtgtgtctggtctacggccttcaacacttaatgccagccaagctgcctctttggcccctcttccccaagcccatgctcaaagcttagtctccagatctctgatgatgcaaaaggacacaggaagacaaaaacaaagaaaagattcatcctcaaggcctaaagcagagtcaccgaatgctacccttttcttttggaagccaccctggtttctggctatgggggataacatcctctcaaataggagtaggcctcagatctctctaaccatgcgagctacatggagtacaggataaatgaatccaaagtaagaaaaagccacacggacttaacagtctttaattttaaagtcttccttcctcacaccaagacctccaacccctaacataaggttcgaagaccttagatttgactcatccatactgtacattttgaccacaatccttaaaaaaaattacttccccacctagtacacaatacctgaaagaaaatttaatctccctcaaaatattaagtgcaatgtccactaatgggtcacaacctgcagtcttcaaaacactgctgtagagttcaatggtctacatttaacagtatgctctcatatagcgaactaaacccataatcaaactaccttacaattctgctccttaaaaacataatttttcttcagtttctattgtataataaagtttatctttacagtccaaacttagtacaaaaaaagaagtatacaaaaagttttgtctcaaaacttagtaaaagacataaatcattagtttaaaatgttcaacttataatcaaaaattgaagatagcttattaattcaaaatgtgaaacacatttctcagcaggcaatttagtcaggtaggaattctctatcggcaattcccagaatacagtctacaatgaatatgtatatcatcaaattatacaaagtctgaaactaatctgctctaccactatccttattctgactggtccctcatctgatcactctccattactgagaccttagaagccatagatgtaactcttcttcctccctcttctcccccaagctttgttgttgttgttgtcctagcatattcctctaaattctcctaggttctgtaaggattcctaacttgcctcagacttgttcagaagttctggcatggatttacttaaaatgacttctacgggacaatgtgcaaatctgaacaaccaattttatcacaaacttctgaaatacaatcttttaacactacctttcatgtattatgtatgcatcaaatatctccaaaccaaagcctgcaacaaaaattgttaagctacattagaaaaagacaatatcctttctttttaaaggataagaactaattaaaatcaacttaacatttctgttatttgttgtgaatttgaattctgtaagcctaagatgtggtaaaatatgtatttttaataactgtgttatgaagacctggttccatcatgttgtcccatcatagaataagacaatgctaccatgcaaatcacctatgtagcttccacatttatttcatagcttcactcaactcttatctcctttagtcccacccactgaacagctgaatgagatgaaagattgtttactgctctcccgccacgaccgtaccacccccccatcaccacccaaccaccccttactcattcccttgcagtctgaagaaataaagaatccaagcagcaatagctgacttggtcattgtttatatccccccttcagtctatcaggattccataaatttcatccctacctgtacacttttaagtctaaaatactctcctccccatgtctgcacataaactttagggggaaaaactgactatactcatcacctgcatgtgcataaatatgtaaaacaggttagatgcttagtaatttagatgatctgttcatttacattctcaggggcactaacaaagatattttttcctttcatcaaaataaaaaagccagaagaaagaattcttaaagctgaactatttagcaataaactcaagaaatgtagtaagttattatttcagtaactaagaaaacacctggacgtcacaaattctttcctaggactgtaaaaacccaaatttgaaacagtgtactcttcaaaagtaactcagcaaatggaaatgtcctagaaaaatctcggttgcttatttcttactatacacacagctgaaatggaactcaggagtggaaaatgtaaatgaaatggcctgttctttttccaacatgtgggggaggaaaggaaatgaaagggctcgttaagagaataactgagaatattgaaatattttcaaaaattaatttccctaaacttcgccactccacatctccgctccctcccttttccaaggacccttcccaccctttctatctcctccggggggcgcccttcccaggcgttctctttcccttactcctaaaaattaagcccaaattccaaaccaaactaccgattctccctccgttctcaagactcgcccgccatccaccggccttccgggctgcgcctggagagaggcaaccccgagaggcgggaggaggagcggggaggcgacgcggtgactggagctgcggctgcagccgccgccgccgcctccaccacagcctcagcctggtgcatccttcttcctccctccccgccgccgcccgcccgggttggcccacacagcaccctcgcccgagcgttcacactcgtccccaccctcctagccaggcccactgccccacgaggggacttctgccgagggggatgcggccggggacaggaggaagcggggccgcggacgccggcgggcccgggaggagactgaggaaaggcgaagggacggagagaagcaagggcagggctgagaccaccacgctcaggctgctccggccgcggaggccgcggctctgcgccgggggccagcccgccgcggcacaggaaatgccgccgcctcggctctcctcacgttcaattcaaactgtcaccgccgccgcctcccctccccccgagcccgccgctgccgcgccccgggcccgcagtggcccccatcccggctcccctcgccgctgcctccgcctcgcctcagggcgttccctagctcggtccagcggccgcagagcttcccggcattcggagccgctgaccccaagtcgcggcagcccgaagctgagactcacccatggtgctgctgttgacgctcctctcctcagcagcagcggatctcgcactgaccgacatcccctccccccctccgcgaccagccccagcggagcgcagcccgccgattctccaaaggcgcctacgccgattccgcagcgtagccgcccggcgtagctgccttgcttacgcacgctacagcaggcggactcctccacaggctctcgctcgactcccgctccctcctccgtcccccgccccctcagacgaggcttccgggcctagcggaggctggcttccatctcgcgagattaccgcctccccagctccgccgcctcgctccatttcgagcatgacttcattggcgtcagcaacgttttgctgttcgggtttagccgccatgtttaagttggccgggtttcgcaccactgaggtcatggatactcaggcctctttgcgtgtttcttcaacactgcttctaaggttaaccgcgttacatttgttggagaaaatcctgggaacgctgaaaaggactagtgggtggggtgcgagggtggggtcttgcccgaattaaagatggccgcagtcagctctgccccgcgcaatttcacgtcaasttttggagctgcgggagccggccagttggcctcagcgcctccttacggaattggcgtaaggcaaagaggcgcggctggaagaaccagactgagaaagtgccacagggcgggggccgcatccgcccctcggcttctggttactgacccgacggctttgtgagtgaaagtgaagagacacttcgaggcaggtgtctgtgctccccattcatccctgtttccgtggctatcttgactttcggggtgaraagtgaggttaggccctgtttccccgacccttccctcgcgccatcacactctagtggcctggcacagccccagaggtcggccgctgtagcccccattgcggactcgccacattcatattggctcaccttgtcggtgcccggttcggtcctcttggagctcacactccagttgaggaaatgaatggacacaggaactactgggtaacaaaatactaataaagggctgcgattgtgtgagtttctactgtagcgatgaatgtcgctgtcattggaacrttccccaagtgccttctagtgaaagccttacttcactcggaataacctgtggtcttttcttgaacgtgatggctctcttggttgtattcttcatgcacatgtgttacttttcctgtttaactacatgttaaagaaatgtgtatgttcctgtttaactgcatgttttaaaaaagtatgtgtatttttaagttataggcacgtgcaagaaagttcagagcaaaatagcttatattagtgaaacaataaatgtctactaataggagaatggatgaataagtgtcattgttgaacaaattgacatacaacacgaaccaaaaaatcagtgaactaaagctaccatttttcatatggatagagtcattaacctaatattgaggaagaaatgaaaagacaggttgcggaaagatatatatgacataccataaataaaagtttaataattacaaaaaagtaagatcaaactaaaaattgtataaggaaatgatagataccaaattcagaatactggttgcttccagagatgaacagaagggaatgtaacaagaagggttcatttgtatctataacgtttgttttctaccagaaatatcttgaaaatgtggcaaaacattaagctaagtagagggcacatgggtgttcacttgtaattatttcctttactgttctatatacttgaaatatttccaagtaattttttttaagaaaagaaacttatagaagcaacttattttgtatcttgatatatgccatttcgtaagtctacatttttactgaactgcttatgaagtctgttgcaacttatctgttcaatcattgttttaagtttctgaaacttcaaatgaacttttactttgggaaattttgttgaatttctatttttgaaaaaaagcagtgtaccaaggagggtaaatgtatatagcctccggagtcagactgcctgagttcaaatcccagctctccatttattaggcttgcaaccaagaacaagttacttaaactttcctgtgatccagtttcctcatctataaacggagataatacttatctaacaggattttgataagagttaaatagactaatacatgaacacggtgcttagtcaatgcttagtaaatattacctaaatatagattattttaaaatataaaattaaagcaaatacttatattaatataacctaatagtctaaaggaagtaaatctttgcctcccatctctattgataatatttctttgaggaagatctcttaatgggtatgaaagaggtgaattgtgttattttgtgctatgaaaatggataaattcttaatagaaactatattaaattccttgtctgaagtttgttcatgttcaccccacactatgatagcttcactacttttcattgaaaatcacacagagtggccgggcgcggtggctcacgcctgtaatcccagcactttgggaggccgaggcaggcagatcgcctgaggtcaggagttcgagaccagcctggctaacatggtgaaaccccgcatctactaaaaatacaaaaaattagccgggtgtggtggcggtacctgtaattcctgctactcgggagactgaggcaggagaatcacttgaacccaggaggcagaggttacagtgagcccagatagcaccactgcactccagcctgggcaacaagagcgaaattccgtctcaaaaaaaaaaaagaaaaaattatacggagtgttacaggcaatgaaataatgatattctgaggaactttctttgtagggaggtttcatagccaatgttctataatgtatatacatgtgttatgcaaattatacgtggtgcacgaggaaagagaattgtattgatcttatgatctctttattgcacttatttgcaatatttatgatctctttattgcatttatttgttaataaaatatagcctagactttactgactcagaaacagatttaaaaaaactgatctgaaattctggacagaccatatagatggtttccaccacatatttacagcgtccaaactcacgtgggccttcaactttaccaagcaatgcttgtttccctagttggctctctcttaatttccacaacagccacttctgattttctccttatttttcaaaccactcccctcacttattctcaaataagagaatagaaaaaaatagaaaccatcaaagaggaactcaggctgagcgtgatggctcatgcctgtaaacccagaactttggaaggccgaggcaggcacatcacctgaggtcaggagttcgagaccagtctggccaacatggtgaaaccctgtttctactaaaaatacaaaaattagccggatgtcttggcgggtgcctgtaatcccagctactagggaggctgaggcaagataattgcttgaacccaggaggcagaggttgcagtgagccaagatcgtgccactgccagccctggtgacagagcgaggctccgtctcagaaaaaaaaaacaggaactccaacaattttatgtctccatactcattctttcaagcttcacggtagattaggtgcccccctgtctgaggcacatatctctgccagttccctgtattccatctctttgtgctcgttctctagattctcactcctcctgcctttccaggaactgcagtcaatgggttctttattcaacaagcttctgggttctgcaactaccactccactgaaattctcaacgaggtcaccaagaacctcttgtgttcaatccagtagaccctttgtcttattttccttgacctctctgcagcatttgatactagaacccttggccttctgcattcatatgccttgatttgtgaaaccacactttcctagtttttctcctagatctctgtgtctctattttacctttcaggacccccttctggctgtcaaatatccatgaaccccaaagttgtgtgcaatttgtttctatctcactttttacattatcctttatgtggtctcattcaccttcatggcttcagccgccgtatatacactagtaactcctaatgcaagtttctagtccagttctctcttctgactacaaacctatatgtcttactgccttcaaaatatctgtcctggatgttccaagatatctcaaaaatcccaaactaaactctttattttaccagcttttatgtttctaatctctaaaagtgggtatcatcaacccgcttttgtaaaccagaaatatgggtatttactcagcccgtctctctctgtcagccattagaaagccctatcagtttttccttctcaactctaattttccatttctctccgcttcattactattctacttaagccataattatctcctgcctcaactccttgcagtagcttttctggccggtaatactgcaactcatcctttacatcgtacccagagtgacctttctaaactttaactatgtcagtcccctgtttaaagtcttaaaattttccttgaagaaacttgcatgacacattccctcatttctggctaatctgctataccttgctcaccctaaatcctagtaagccctgctgctcccacttcactctcctttttacatttgcattccttacctggtttttcctttaagtctcagcttaaccactattttctctaaaagtcttccttgatcaccaaaaactaggctaggtaccctctcacctcccatagtatcttgtgttttctcctatggtagttctagtagcagagttttgtaaatacttgtctcctatttaagagagacaaatttaagtctaaactccttaaagtcaagatctcttgtcttgtccacctctgtagcctcagcacctggcccaggatatggtattcattactttatttgacaattacttcttgagtgataattggatactaggcactagcacattggttgaagtgtggaatggggaaacctcaagagggaatctcttgagatgtgccaagacgtcaatgtcttaattacaataataagacgtattttttaccttttttgttcccattatttaatgagcacacagtgtcattttccagagattgtgtgaagtgtgatattgcaacagcttgaatgcaaaaacaaaataatccggctatcttctattaagctagacattaaaggggtttgcaaaaatgtaaagcaatggcactccaaactatttctttgttgttgttttggaagatacagttatttttcatcaaaatatgttttttacattatcatgtaacggtttagtgttatttgatgaattttaatgaattggttttttaatgaagtagtaatattttaaaacattctcagttttaatttttaatacaataaatatcaatagatatatttcacataaagaaatactctttggggttctcgataatatttaagaatgtaaaggagtactgagaccaaaagtttgagaactgctgcactagcacatatgtgagctcaatgtagatgtgttaaattataattagtgaatgtcagcttgccaaaactctggcacacagctgcttaatgtttcttaataaaggttcctcccaaatgcccagacttcgtgtctgaacaggtaaaaatattacccagatttaacatttgaatatgcataagtgaaagtattctttaggtcagtgtgctttgtaaactatggagtgttatgcaaatattcttgttttagtaattgtctgtgataaatatggaccaacattctagctggtagtagaaccaggactacctataataacctgaagatgagaatttttatagccagccatttcacattaatctcatttaatccatataacaattttatggaacaggtattacacccactttttaattgagtaaaccaaagttcaaagaaatgaaatgatttccctttagctcttcacattttataaggctctgagacaaggttcagagaactcatacttttccaataaatgagatctcaggtgaagagatttgtttccctattgtcctgaatcctatcctttatttgctggacattagtctggtgagagggtaagatgattgttacaattttcaggtacttttttacctttgatgcaagaagaaggaccagagaatggtattaggtctatatgaaggttctgtttgagggccaactcagaacataacagtaaaaatgagatggcacctctcaacagatctctcctgttttctgcgttaccaaaaattagcagacatggtcaggttgagtggtggaggggaagcttgagacttcaggtgtgtattttatgaaccaggttaggcaatccacaatattttgctattaacagtaacatccaagtatccaaaaagcccttgagtgctttatattcctcctttgaaggatattggaagaggattgagaaattatgtggaaaagaaagagccattaactaaaacttttttcttgtgaaaattaaagttatgtaacttgttcatgaaagctgaaactagggctaggcacggtggctcatgcctgtgatcccagcactttgggaggccaaggtgggtggatcacgaggttaggagttcaagaccagcctggccaacatggtgaaaccctgtctctactgaaatgcaaaaattagctgggcgtggtggtgcacgcctgtaatcccgctactggagaggctgaggcaggagagtggcttgaacctaggaggcggaggttgcagtgagcagattgttccactgcactccagcctgggtgacagagcaagactccgtctcaaaaaaaaaaaaaaaaaaacaagttgaaactaacttagttttgtatgaattaatttttttttcaggtcagatttcaaatatgaaaactcttcattcaagatatagccagcccctccgtatctgtgggttccacacccatggattcaaccaaccacagaaaattttttttaaattgcatctgtactgaacatgtacagacttcttcttgtcattattccttaagcaatatagtataacagccatttacatagcacttaccttgtattaggtattataagtaacctagagatgatttgaagtataagagaggatatgtataggttatttgcaagtactacaccatttcatatcagggagttgggcatctgaggattttgtcatccacaggaggtcctggaaccaatcccctctgatactgagagacaactattacacaagagaaatattctaccattcacaaaatctcgtttaagtgtcgtgaaatacaaacaccagggaatcaaggtaagtatggtttaaatatttttatatttaacttttgaatatttgaaaattatacattctaatgttaagttcatgattaaatagcatagttattagaggaaagttatcttgagaacaaagaatctaaaataattgacaatgttaatgttccacaaattcaagggaatattgacatgcccttttatagattaggaatctgtaaggtacaggaagtcaagtgacacttgcaaggctataaaactgatgaacaaagttgtttttttttttaaataaagcctcatagctttttttttctgtttaaaatcaaacttcatcccacaaaggaggaaaagccaaaagacatagtaataataacaaaacaaaagaaaataaaatgagagaaccatgcagcttgaagccccagagagttaaacagcaaaaaagcagagcaaataactcccattcttaaattagtcacctcaggaagagtttttcccaccagccaaggagggaagggggaggaagcagtgcagaaataggatgtttgaatccagactgcctcgggaggccggatttatctcaacttatcactggaggctcaaggaattttcaaattccagggctcttctggaaccttagttctaatgcagataagagcctcacttccctctcaagactccatatcactggtaatagactggcagcacggttgcctcagggaccaaaggaagagaggaaaccatttacctcggtgttctcttgccaatcagtgccttgttgtggagctatccaatctgattacacagtagaaatactgctgaacacaatactggagaaaaatccaaagtacatcaaagaaaatctattataagtggaaaaggccattgttgccaactccctttggcattttcctaccattgactcagaaactaactgaaataggaaacaaggacacatggttctatgggaaaccagctgccttcaacaaccagacttagtatattgactttggcaataagtgaatgcctcctgcactagaagagactcctgaaagtgaactgaattgaactttagtaattttatgtagatga

SEQ ID NO: 96825 - DNA, 63926 bp, Homo sapiens
  misc_feature (1)...(63926): n = A,T,C or G
tttcttacccgtaggaaagaaggaaagccctgtccatagtatccaacagcaaagtattcaggctgaggcctcattgccttaatgatgttctcataaaatgaggccctttttttctggaaaacaaaacaagacattccaaggggaggttataagtacacagttgggggaaaaaaaaagtcagactttgttttgttgtttcccaygtaacccagagcaatgaaaggtctttggaaaacaccctatgggcagaaaagggttatcctattctcggatcacaggttttggacctgggctccatgaatggacgttggaaggctgtgactccctgagggtgtatgctgaagtgtgtgcacgttggaattcttctgcgtaacggggcagtgcacaactttcagcagtttctcaaagtgggctcagggactayaaaaggttaaaaagtgcattctgagattcacagaaggcggctgcacttaaccagacacccatgggagaagataaagaaccttccaaggccaggcgcagtggctcacgcctataatccttgcacattgggaggcagaggtgggaggattgcttgaggctaggagtttgagaccagcctgggcaacatagtgagactccatctctacaaaaaattaaaaaattagccagcagctgaggcaggaagatgtcttgagcccaggagttcaaggttgcagtgggctatgactgcaccactgcactccagcctgggtgacagagtgagaccctgttttgaaaaaataataataaaataaagaacatttttaaaaagaaggactgtgtagttcatgcaggtggtctggatgaaagtgtctggtaaattataagtgcccagaaggtggtggtgatgttcggtttttcagtatctgctaccatctttatctttaattcttcacaagatgaggggctttccagctttggctcacaaggtcagccttaaagaaagcaaaatagccagccagacgtggacagctttgagcaatgacctgagccccctcccctacaatggttagcatgccattactcttctatctaggtgatggtctcgtcaaaatactattttcttagaccggtatgtaacatgttacattactaatatttcagctcagttcagttgatgaaatttttttttttttttgagacagggtctcattctgttgcccaggctggagtgcagtagcatgattacagttcactgcagccttgacctcccaggctcaggtgatcctcccacttcagcctcccaaaagtagctgggactagaggaaggtgccaccacacccagctaattttttatattttttgtagagatggtgtcttactatgttgctcagactcgtctggaagtcctaggctcaagtgatccatctgccttggcctcccaaagttctgagattacaggtatgagccaccgtgcccagcccagttgatgaaattaataagtcagttttttgcatgtgaagccaggggctggtaatagcacactggtaaactttttacaaagtgatcttgacacccagctcctcaaataaatgattatttcatgactatgggtgacctgatcttttctaactcctctactagaaattattaaatttaatattatggttgcctaccactgggcattcagaatggtggctgcctaccatcaggcattcagaatggtggctgccttctattgggcattcagaagagtggctgtctaccactgggcatttggaatggtggctgccttccaytgggcattcagaatggtgtctgcctaccgctggggcatttagaatggtggctgccttccactgggcattcagaatggctgcctcctccactgggcatttggaatggtgctgcctccactgggcattcggaatggtgctgcctccactgggcattcggaatggtggctgcctccactgggcattcggaatggtggctgcctccactgagctttcagaatggtggctgcctaacactgggcactcatttttgttttgctttactgatggctgggaatatggagggcccacagaaagaaaaatggcttcaggaagaatgagagagctgcagacagagatcctgagggatgtggaaagcgagtcactactatctgaaactcaatattccaccacactgtcgagacaaccccactccacttccagagatgtcctgaaccttctctgaaggatatttggcagaaatattgatcagagcctttggactacatcttttttcattctcatttcaagcaaagttgacttttccattgtaaaaaaacaccattcatcctgactttcaacttacggaaacattttcatgagygctaattttagcaaccctgtcagaggcctaacatattttgacccagactcaccaggaggttgccaaggccctcgtagtcaaatactttgctttcgtaagtctcagccaamtctttgctcagcttgatggccttctcccacatcttcagaaaaaggaaagtaaggttaaaagtggagaacaaggcagtcattgattcagtggcaaaagccactggcgagtcactgggaatgagcaagtggtctgggggattgagtttcggtagatattcctcactcgctttatcccttagatcagtgaaaccttcatttcctgacatcataaagacagtgtatattggcagctttgccaggggcgtcttctgtagttctgtttgcacggacattaagaataagtaccatgtgtcgcccaaaaaagcaatactgtgtttaacaggtcaagcacctacagcacttcaaagtagagaggaagctctgccagcccaggttcggaaagcatgcaagtctggttggagggggaagggaagtttctgtgggactttggttctgaaatgtgtgtgtacaggtgtgtgtatgggtgtgtgtgtgtgtgtgtgtgtgtgtaggtgtagtgatgttgtttgtggagatggaaaaaggctaacagtactgttgtgtggtgttgcaggaagtcagggaccccgaatggagggaccggctggagctgcggcagaggaacataaattgtgaagatttcatggacatttatcagttcccaaataatacttttataatttcttacgcctgtcttactttaatctcttaatcctgttatctttgtaagctgaggatgtacgtcacctcaggaccactatgataattgtgttaactgtacaaattgattgtaaaacatgtgcgtttgaacaatatgaaatcagtgcaccttgaaaaagaacagaataacagcgattttttgggaacaagggaagacaaccataaggtctgactgcctgcggggtcgggcaaaaacagccacatttttcttcttgcagagagcctataaatggacgtacaagtaggagagatatcactaaattcttttcctagcaaggaatattaatattaagaccctgggaaaggaatgcattccttggggggaggtctataaatggccactctgggaatgtctgtcctatgcagttgagataaggaagaataaacagtctcctgcagtaccctcaggtttactagggttgggaaattccactctggtaaatttttggtcagaccgcttctctgctctcaaaccttgttttctgttaagatgtttatcaagactatacgtgcaccgctgaacatagacccttttcaggagtttctgccttttgccctttgtcctgtttcctcagaagcatgtgatctttgctctgctttttgccccttgaagtatgtgacctgctccctgttggtacaccccctccccttttgaaatccttaacaaaaacttgctggttttgcagctcaggtgggcatcacggtcctaccgatatgtgatgtcgcccccggcagcccagctgtaaaattcctctctttgtactctttctctttatttctcagccggccaacacttatggaaaatagaaagaacctatgttgaaatattgggggtgggtttccccgatagtgtggaatttggcaaactgtatttccatgcagggcactgatttccctacttagtggatgagttttaggaaatgcctccgagcatgtataaccatgtaagttacaggctaaagcacgtcctcagtgtctgaggctagcagcccagattgagccttctaacccctttggtatttcatgagctgtctcttagacggatactattcaacttgcagcatcgggtcacctcctgcttcattcctgttcacaaggtgctatgttccattgtttctggcttctgaggaaatgtgtgcagagcccacaagccattgggaaacacttcaaaattaaatcttttaaaatcattgtttgcaaaatctgtccccctctgaaatctcagaattcaagaatacacaagggaagaataaacagtagctgtgagttattgttgtatattaaatcatgtatctggtcttggtcctgagttccggtgaattttcttagaatttctcaaataataagagtgtctttgttattcctggtgcccccaccccaggatcatacccaaatctatgctaatgaggtgactcatggtggtctcctagtctcaggatgggggctgccatgccagaaatactaatcatgtgactagaaggttagggctgtgagccatgcgatatcagcccaatcttcagggacaaaaggaaggctaaagatcaagttcattgtgtagttaacgattcattcaatcctgcctgtataatgaaaccccacagtggctcatgcctgtagtcttggcactttgggaggccaatacaggaggatcactggagcccaggagttctaggttctagaccagcctgggcaactggtgagaccccatatttaccaaaaaaaaaaaaaagaaaccccaataaaaactctgtacacccatggcttgggtgagcttcctgattgaggaacacactgatttgctgggaaggtgccccgagttcacagggggaagacacagaagccccacgcttgagattctcccagactgttccctatgggtcccttcatgtggctggccccagtttacattcttcctgatgaaactggaatggttaaatatagcacttcactgtgtactattggttgttctagcagactattaaacctgagggggcagtggaagccccccagatgtatacccagttgcccagaactgtgaatggactggggacccccaaatttgaagatggcatctgaagcgggggcagtctcgttggagacagtgccctgaacctgggtagtcagtgctaactccaagtggtgagcatcagaattgtattgcgatactgcggtcattttcctctttcccctagtacaaaaacaatccaatactcactttgcctttgtcgaaatatgatatgatttcttgatacagcttctctttaagctcttgctgggtataaacatagtaactgtccytctgaagcaaatgaggcacacagggcttgtcagaccactgaaaaggaagaaaagcgacacacggttaatacaacaaatattcagccccccaacatcaagaaaatattgtatatatatttgactcattgattttgtattttagattatgtattaaacacaaaagttacatatacacacatatacacatgccagctccaaaacaagagtatcatgccaaatgaaggagcactcacagcatccccccaaaatgccagcgacaaagcaaggtcgctaactgacatgactgtcgttgtactggggcatcagtaacacagtcagataaaaggaacaaattaggagtataaaaatgaataggaagaggtaaaactaccacaatttgcaaacattatggttgtattcctcacaatgcaaggcagttsactaagaaactgcgacacacaataagagaattaagttacgcagcaggaaaaacaattaatatacttgaaataaaatttatttcagatacacggagactaaatatacagaatagaagaatggaaccaaacaaaaataagtccaaaaagaacatttctaagagtgaacattacaaggaatatgcaagacttatatgcagaaaactttcacacgccattgaagggcacaaaagcagactcgaacaaatggaaagtcataccatgcttttggataagaaaattctatttcattaacatgtaaattctcactaaattaatttttaaatttcatctttccaaagtccatatggaaaaattaacaaaaaggaataggtaggaaaactctgaaaaagaagagcaatcaagagtaactaccaggtcataaaacacactatcaagaattaataattaatacagtatggtactggtacatgaacagacagagacccacgtaaaagcatatacaatctagaaagagattccctccccccaaaataagaatttagtaataaagatgggatcttataccaataagcaaaatgtgaactatacttaacaaacagcatctctattgaatagcaatctggggggaaaaaaagctgcattcatacctcatatcttacaccaggataggagagtttaccttcctgagtttcccaaatgaaaagacctacagttacagacactggggatttctttctgatcatacaatggcgaaatccacagtcaacaagcctcactttctaagctatatacagtaggttgctttttttttttttttcttttgagacacagtcttgctctatcacccaggctggagtatggtggcaccatctcagcatactgcaaacctccgccttgcaggttcaaatgattctcctgcctcagcctcctgagtagctgggactacaggcaggtgccaccacgcctgctaattttttgtatttttagtagagatggggtttcaccatgttagccaggctggtcttgaactcctgaccccaagtgatctgctggcctcagcttcccaaagagctgggattacaggcgtgagccaccaggcccagtccattatacaataagctttttaatgccctaaacttaaatatgaattgtgaatttcctttgggaagtggtgaggcataggaatcctatttttaactcatatgttcggacaatgcccatatattactttagtataaaatataaactgtaaaagaatattaatagctgagaacaaaactggaggcagagacaccaaacaggaggctgctgtagtgctcaaggtgtgacatgcttacgggatggaccaaggtggtagtcagggagataaagaaaagtggattggctagcatggtggctcatgcctgtaatcctagtactctgggaggctgaagtgggaggattgcttgagcccaggagtttgagaccagcctgggaaacatagcaagatctcatctctttaaaaaaaaaaataaagaaagaaaaagaaaagcggatargttaggggcatgttctgaacagaggggccacatctctcgcttgtggagaatgtgggaggtggtgagtaaaagagagaaattgaagatgactatgaggttgcctgagcaactaaatggatgggaatgttattagtaacatggtaacaaagtgaggtaggatgggctggggaggagcaaagagtgagaaataaargttcctgttacygccttgttcagtttgagctgcatattggccaatcaaagtttatatgtaaatccaaagttagagaaggtgctcagggctagaaataattacttgggattcataacatatagatgtatttatatctaaaccacaacatacatttatttagggagagaataaaaatagagtacttctatggtactatattcacttataactcatctttctgcrgttttctgcagttttacaaatttttttatgtattcatcaatgtgtgttttattgctttaattagagtgtcaattaccaaaggttcataagtcgtgctctgctttctaaggatttttaaataaaagataactgacattttcccatacttgatctacaaattagctgtgcctatttagaaagaactaaaaaaacttgtataaaaggatattcctggaataaagttctttcccatcaaaatcatgaaatgtatagaatttagtctgaaaggacactgtactccaccctgttgaaacaagctctctgagccattcacctgcagaagctcagcgtgcaagagaagcgtgtaggcagcttctgtgtagttctcacagtctcggtgcaaatctcgaagcttgtacagatatctggcaagaaggggagaaggaagcattttgtcactcgagagttttataggttttttagttctgttttgagacagggtcttgctgtattgcccaggctgcagtatgcagtggtccgatcatggctcactgcagccttaagccccagggctcaagtgatccacccacctyagcctcctaagtagctggcacgtgccaccaggcccggctaattttcgtatcttttgtagagacagggtttcaccatgctgcccaggctcgagagttgatttagtgttcagctcattccataaccagaccccagcctgcttccctgcctgacccccytccccactactgtacagaagcaattccttcctcttgagccaagaagtcggatcttccccatttcttcaatacactgtgcacctcctgcctccgtgtttctctgactccacctagactagtttctcttctttctttaaggcagtggtgtttaatgtttttaaatattaggtcttggacccctctgggaagctaatgaaagctatggaatctctccccaacaacatgcacgttggttacgtacaagtttgtttcatgttcagggrttcgcagacttcaagctaagactcttgggtgggttttcctgcctcttcctgtacagcctctcctgcccacccaggccagaagttgtctatccttcccctgatccctgncatgacctcacataggcactccttcctgtcgtacttattcatgtatctgtctaaagagtttgtcggttcagggtgaatggagcgtatcatgtacttttaggggtctctcaaagcagcaaacacggtgttgggaaagtatttgtttactgaagaaatcaatcacaaagccatgaaataaacagcagaagcaagaaatttccttcagcttaccttatgtatatgtcctctctcttcttttctttataaaagttctgccaggaaaaaaaaggatcacagaatcccaacataaatcaagagctattgacacaaaaatagacaaaccactattgttgcttttcaamagtttcacttttccaaagagatcactgtttccctttaacaaatatccccataagaaaaggggatatttatcctcaggatgcaaargcacaagagtgatataatggactttgggaactcagtggggaaggttataggagggtgagggataaaagactacattttgggtacagtgctcgggtgacgggtgctctaaaatctcaaaaatcaccactaaagaaataacctatccagccgggtgcggtggctcacgcctgtaatcccagcactttgggaggctgaggcgtgtggatcatgaggtcaggagatcgagaccatcctggccaacatggtgaaactctgtttctactaaaaatacaaaaattagctgggcatggtggcgcgtgcctgtaatcccagctacttgggaggctgaggcaggaaaattgcttgatcccaggaggcggaggttgcggtgagctgagatcgcaccactgcactccagcccggcaacagaacgagactccgtctcaaaaaaaaaaaaaaaaatccccaaaacttatccatgtaaccagaaaccactgtacccccaaacctactgaaataaaaattaaaacaaacaatcaaaaacacaccaaatttatcctcagggtctgtggctgctgatacctgtgagctgagccagccattccaattagacttaggaagacaccggctccacaaaggtgcctcagggcgcctctgtgtttgtgggatctacctagagctgagctgtagggtgcaggggcggcctgacagtrccctcscatcacaccggaggcatgtcacataccagcacgttcacagtgcagctcatacggttctccttgctctcatcttgcatgatgatggttctatartccagcaggttctctaagaggctgctgaccaggagggcgaagacctccccagagctggagaggtatttgtgtttccggcaatgttctaggagcctggaggggcggagggagagacaaaagcccaggttccatgctatcattccagcagcactgaccagcactgaccagggtctcagcagtggctggggcaggatttgatgacacagaacgtcaatgttagatattaagtgacacagttaagccgacacacacacacctcatgcaacaccttcctatcctgtgaccttcacttatgctgcgcttctttgtggactcgagttccagttttctttaggactcagctcaagtcccaacatcacttagaatcygagcacacaatgtccttctttcaatgtctgtttttgtttgtgttttattcagtcaacaaacccttgctcaaaaggttcgtgtgtgctctgtgaggactctaattagttgtatgagaccatttttcctatgtctttattctccctaaggcctggcactcagggcatcctctgaacattctggaatgcttcgtatggatgcccagcctagaggaacctgggaacctagtacatctcctgcaatgcggctctttagataaaagtgttagcttcagaaaaaaatgcagagttataaagaagcaaactgaggctaaactttcagtctaaatcctgtccctttggacccacacagagccaagttctggggcttattagattagataattaaaagaaaacctgggaaaagagggagagggaaagagaaagaaatgggtccaacacattaatccagatttagggttattcttgggcactggagacctatgtatccgtattttttctaagttagtgatctaggaagaatgaagaaaacaaagtaagatccttatgtaaaacaaatcagctgtaggatttaaaaaagtagcatatcatgtataaatattgtgtgtatatgtgcataacttcatttaattccatataagatcagaattgcaaaagatataaactgggaggtttgaagctcaaatggagagacttaatggaaacaggataaaaaagaccaacaaaaggtcttgtcactattaaaaacaaaataagaaaggcttctagtcctttaaaatacagactattcatcaattcaattattttttttatttttatttttttgagacggagtcttgctctgtagccaggctggagtgcagtggtgcaatctcggttcactgcaatctccgcctcccaggttcaagtgattctcctgcttcagcctcccaagtagctgggactacaggcatccatcacggtggctcacttggctcactttgggaggccgatgcaggtggatcacgaggtcaagagatggagaccaccctggccaacatcgtgaaaccccatctctactgaaaatacaattcaattccatttctcggtattcagagtgctggttccttagagaatcttcaaaaaagaatacagttgggagcactgtcctcaaacacagactctcatccacaaaactcacacacaacaggcgaacaggtgaacaactaagtgactgaggcaagcacccagctggagatgcagttggtcaacactagaaaagttcagggaacatgagaaagcaatggtctagagtagttacaacctgaatgaagggtaggcctgtaaataataataayaataatactaggccagacgtggtggctcatgcctgtaaatcccagcccattaggaagccgaggctggaggattgcctgaggccaagagtttcagaccagcctgggcaacayagcaagaccctgtctctacaaaaataaaaatgaaaaccagctgggcatggtggtgcacgcctacagtcctagctactagggaggctgaagtgggaggatcacttaaagcaaaatttcgagaccagccttggcaacacggcaagaccccatttctacacaagtaaaaataagaaacagctgggaatggcgacatatgcctgtagtcctagtacttgggagtctgaggcgggaggactgcttgagcccaggagttcaaggctttagtgagctatcattgcaccactgcactccagcctgggcaacagagagagaccctatctcttaaaaacaaacaccaraaacaaattgtaataataacaaccatgaacacyagagcagccaatatttattagtcatgaactctgcaacagatgctatgttagcacatcatctcctgtaattctcatgatgatatcaaaaaatagatgttattcttggagagggaaaaaaaatgaagtgttggataagcagaatcactggactaaagccaaactcttaatatgtggcgaaaacagggtttgaagttcaatctctcactgaggccaacacctatgtgtttttaatcactttcccactcttcattactccacatgtgccaaggagggcaagagggttataggtgagtgtggtggtgggggaagaggggacagtggtgataatgggagcccagacagaggtacagatgtgttggatggggtggatgacagggcaggaaaaagaccaacctggctggagacagaactgctttggttatatgtcctttatgggtcctaaggtattttttacatacacagcagaccttgaaatattttttcctttaaattgttactttgcagttataattagaagtgctaatacttttgttgaagttcaaaaattcaaacactgggcaaaatgccaccactctgcacctcctccttgcctccatctgctgtgttctctagggccaggctggccaggaaaataccagcatttgactcccacsagataaayaatgtcagctgtggacagtatacaccccataaccatactgaagaccacagtgggggtggccctagtgactctragactactcaattgctctatyggtgmaamaggacccctgtttttctctattactaaatgacaccactgacttcaggtttcgttcctgaaatactcacagtttttccagaagaaccttgtattgttcgtctcctctgcccccttctacctcctggtccagctttgtgatcagctcattctcaaactgaaagtagaggcagaatttcacaggataatgttgcatccttagaagaagacatggccaactttctagacttggccaacccattcgctgagttgtgaactgtttccagcacagacagggaggatcacagagggtcactcataaactgtgcaccaaggccctatcaaaatcttctaacaaagtctcatgttactttgtcctttgcattacatttgattaaaaacatattatccaaaacattgctttctgttacaactatkcatataaaaatagaataataattcttgtttttctattttacttcagtttcatgtctaagtctctgcagtgagattgcttttgcagaggttcatagatgcgaaatcgtcctttcaatattaatacactttgtagataagaaaacagaggcacagagaagacataccaggaaaatgacattctcaaagctacagggtaatggattagaacttaatccactgcactgctttcagccgtactataatagataggtttttaaattcaattcactacattattctctaggctatactgaaacagctaggattaaaatgcatgaagttaacttcctttaattttctacagacaggtgttgccttaggaaagacatgtagcaaaaaaatcttttccaggctctgggttgcactgtctgactctatctctaattgctttayaaaatgaaatgtaaagtgaactttcagatcaacatggacttgcattattaaggttactgcttctctatatagaaagaaatgagttatgatttgactatatgtccatttactaatattaygcggtctgccacttcttaccatatggaaattgccatttccactgaaattgaactcacactgcatcatatcaaagaaaatggggattgtggctttccggagctctacttcaggggtcagagtgacctccagaatgggacccaccatggatgggatgaatttgattttgtggggacctgaaatgaaagtgaatgaagatattaaaaaattatttcactgaaagtaaagtgttaaaatcttcctccacaagttccataagaaaagaaaaggttaaaacaactcaattcagaagtgagtgactcagattctgatagcatgtggatgccagagtaagagacagttcattgtcaatgaaacccacaaatcaactttcacttccagacacacagacaaatacatctcagggttatctggattaaaataaaaaaaagactttatcgtgggatgcttatcactcaraggttgtgatcaggcctgytcaaggctagacactcacccaggttataccacatgtcccggattctaaagccgatttcctttctcatgtccccatatctaggaagaagatcataaactagaaggaggattttcagtagaaatgaattgcataaacacaataagaaggaaagtaaaaacagtctgtgtctctcttggtcactcttaaggcccaaccttaagagatgaggttcatacctaaacgagcccccaaaaggaatgaggcgcacagaggccgggggaccttgtgccgcaataaagccaaatggaaacgctgaaaaatagctgagaagatgagattaacaaactcacttcagggagaagagtgaggcacagacaaagccaaacaaaacacggcaaacactgatgaaaaggaaggtgaatgaagtatgatcatacagtactgtgactaatgcctaacaggtgactaaatacttatatactttatagactgatattggggtaatatacatccattcyagcgtgtttttcaaaatattcacattggaaggctctacaccatgcactctcaatgggagtgatactgtccacaaagggataaatattggtccttgggagcaaaaaatactttgctgtttttgtatatgtaggcagtttttgagggaggaaccagaagtagagggacactaaataattttcctacatatcgcagatatcccaacaaggggaacacaactaaaatttcaaagtcttcaaataatacattcctcaagttattttttaacgacatggtctttggattccagtctctcaatgaaatgaaatgcttccctaaatctcttatcacttctgcacataattccattttgaattccaaaccaggaatctggagggcattttaatgcaatgtctgagacctggctttctctgctgaaatggcagggaggtggagcaactgtgctgaaggagtgtgctttgtgaagcgctatgaatgaggaggtactatgcctgcaatttggggaagctgccagcagaggcgcagctgttcttggggatgggcamgctgacagccaaggtccgtctccaggtacagatttgataaaaagcatgggatgactgatgggaagatggttgggccttaagaaaagagagctgaacctgggtgaatgtgaggcctattaagtaattagttgaagacttacctcactaacaacatgggtagccactaaatagtaatttctgtgatacctaaaatattgctctcaatgtaaacaaayggaagaagccccttcmcgatcttaactttaaaaggacacttactttttaacaattttgttgcgcttggcttgtgagaaggtttcaagctgaagggactcatgggtgagaaatgcaactgccaaatggaagtaattgttccagagctgttcaaaattaattgtgtgggtaaagggaaatgaaaaataacattaataagggccataataaaacaatgtcacatggtaaaaagtcattaacaagagattaatgaaagaacaaaatacaatctacattcttcttaggttttgattattcaatcctaaaagttttgagacttaatgttaagctttttaaaaaaatttaagctattatatttttctttactcctgggataaaggaaaactgctgccaagaagtgtatctatttatagtatgtactttggcactatgtttcaaaagtcctaaaagtttgccaaacttttgaattagtaaacacttttaggactttatcctgatgaaataaccatgaattttgttgttgttgtttgatccagagtctcactctgttgcccaggctggagtacagtggtacaatctcggctcactgcaacctccgcctcccaggttcaagcgtcctgccttatcctgacgagtatctgggattacaggcacccactaccaggcctagctagtttttgcatttttagtagagatggagtttcgccatgttggccaggctggtcttaaactcctgacctcaggtgatctgcccgccttggcctcccaaagtgctgagactataggcgtgagccaccgtgcccagccaagcacgaatatttttaaatatttaaaggaaggaagtccatcacagtgttatttaatataatagaaaatggaaacaatctaaatgttcgtaagaagaatttggttaaatacatcatggaccagtcatagaacagatgatattcagccattaaaaacaggaaaatattcaacattattgaaaagatcacagatcattgaaaaaggaaaacagattaacagagtaccaaagaactgcacagctcaattccattttggcaaatatacatacacatacatacaatatatattcatctatatgtgcatgcatctctgtgtgtgtatgtgtgtatactttcctctacttatgattttcaacttttaaagttctgaggcaggaaaacagggcctggaggcagggcactgaaggccaattcacactgacttcctagaactgaatcaaaaggaaaaccccacctctccacacccaagtaacaaaaggatcagaggctacccctttgcactctgtggcagwtgaaaaattgaaagtacctctgattagtcccctcccacaattggtgggagggtcagactggtcacatgctactccttcatttacatagggtgtaaccaagtaaccaatgggaaaacttctacagggtatttaaacgccagaaaattctgtaaccagtgctcttgagctacttgcttgagcctgctcccactctgtggagtatactttcatttcaataaatctggcttttattgcttcattctttcattgctttgtttgtgcattttgttcaaaacgtcaagaacttggacaatctgtagtcaaggacctccactgataacagttccacagatacacgcaaagacaaagaacacagaaagcacatcacccacaaaatgcagagtactctggaaggtaagctccatgacagcaaggaacttatctgccttcaccagggaaatgcccctaccagggcgcaaaacagggccctgtacatgtaagtactctaacatttgttaaatggatgaatggataagtaaatgaatgaatgaatgaaaatagagctagcggtcatccgttttgcaattcctttggactttcaacaaactgtgcataagaactgttctttagaaccaaactcatttgtcggtaggagagttacctgtgtgcttatttgtagccatgtgtgtctatgtgcatttgtgtaaatatacaargggtcaactccaaatgtttatagcgacaaggaggactatttatatttttgatcttctactattactctttaagattttttttttacatatgttacctttatagaaagaagaaaccacccctattttgttgtgtttggaggacagtgtgacaggcatatgtgctttaggaaatgaaaaaacacaggaaaacctttttcatgtgaaaacagtgaaatctgaggagacattttccaaattcatatagytctcttgccatggccaagaattctagaagcaggtaggtgagtcacatgcctacctgaagttcaaagcttgcctgatccatgaagaatcttgtgagaacttcagcaaacngatttatagcacggagaaaaaccctgcggaaggaaaacaccagataaagaagccaactgtatgtcctttgaaaccttttcccacctatattaagaactaaaccaaaccaaacctgaacttggcatcataagacctcataatctaacagtgtccttgcagacaacagcataacaccatccrcagatggggcacaggaggtcagtttacagaacaaacaagaagagccactcagggccacatcccaatttaggtaattgaaggtagatctgagactgcaaaccaggactcttaagcctcagaggagggtaatatatatagactctattatgatccttctgtttaagcttagggtttctggtgtaattttttaaatctaatctgtacatagcagagaaggcttcttctaatcaggtgttagagtagaattactcagaattgggtatcatgtagagttaataataatgcttacaataatggtttatttatctcattaaactctaacactcttttaatataatatatattcagttcatttcacttctgttcaacaagtatttgttgtgggctagcaattgcaaggcacaggctcacgtctgtgttgaaagacacagtttctgatcttaagaaatttacagcttggttggggaaattaacaacatgtacatctattacccaacatagaatctgaaaacaattctataagaaggtttgaatggggtatggaaaatcgaaggaagaagagatgacatccaggtcagaaaggcttcctctggaggtgacgcttcagaagaaccttatggaatagctggaatgctgacagccagaggttatggggaaggcactgctagyggaagaccggtgtgaggcagagcagaccatgtgttcagggactgggcagaggccagtttggttggagtacaggtagcatacacagggaagtagcagaagcaactagttagtttggcactgtgtatcaaaagccctataatttcaccaaacttttgaactactaaattattttaggagtatatcctgataaaataaccatggatatttttaaatatgtaaagcaaggaaggccatgacagtgctatttcacattaatagaaaatggaaagaatctaaatgttcataagaagaatctggttaaatacatcatggaccggtcatagaacagacactaactggtgagccctgaatatcaggatgacacaggccacgtggagccacggaaaggtgcagtggagagttgaggatgacaattaccatgagagcactgaagagacgacgctagagaagggagtagagagcccgaggtggagcaaaggcaattaccctgggaaaatcaagatcacragcacataaattaggacctctggagcaggaagatcctcactttacagatgatgggtttgaggcaaagggatttaaagacatttcccaaagttcacacagcagccttaggtattcagacaaatgcctcagggccagccatgggctgtctcacctgttttgagtcatattcatcaccatccaatctttggcatagacattctttccaatcaggtccttgaacatgataaaagtttccatgaggaagtcctgcggagaacagaggagtggttgggggaaaactgggttacgttcatagtctttattctggcgtgtatacaagcagaaccacaacctcagaacaggatgttcctagccccacagtaacagcccatctttcaagggttttaggaataacaaagcattcttacagctggctgtgatgcaatttgatttttatattgtaggaccctataaggaagatgaggacaaaaagaatcatccacattttacaaatggtacaactgaggctgagaaaaactaaaggactcacttaagggcatagaaagtaggaaggagggttgggtgtagtggcttacacctgtaatctcagcactttgggaggccgaggtgggcagcttggccaacatagtgaaatcccatctctactaaaaatayaaaaatttgccgggcatggtggtgtatgcctgtagtcccagctactcgggaggctgaggcaggggaatcgcttgaacccaggaggcagaggttgcagtgagccaagattgtgccattgcactccagcctgggcagcagagtgagactctatctcaaaaaaaaaaaaaaaaaaaagaaaagaaaagaaaagaaaaaaggaaaaaaagaaagtgggaaggagaagagctggatgagaacttggagctttggaccccaagtttgcaacccttatctctttcttcctctgctgccacaggttgtcagaatgtatctcatgcacttaaacataattcaccaacaattgtggggaaatggatacttttaatagatttcagttcaattctcctttattatggttagaaaaggacacagtgatacacacaagaagcagaatcaccactcttcctgcgccagggacgttatcatgtgcagcctggaagaaaggtcctaaacggtccttcaaaatggatcgtaacagtggctggtgatgactaataactaatcacttaagcatacagagctcttctgctccaaagggggctgtgagcaaaaactaattcagaaatagaacaatcagagttgaaatcaaagctaaaatgttttgaaggcatttttattagttagctaaatttagaccttttccactgggattcttgaaagycctgtccagtttctctggcactaacctacacagttctgcctggacacagtatgtgagagacaggaggcccaggtcctattgctaaccatatttttctgagatgctggtcaagctgggtaacttcctatactttggatgctgaacggcatggggaatgactctccctggccggccagtgtgtgtgtgcaactgtggattctcccctggttttatggcgagttagacatacccaccctcagttctgaaatcctagacataattaatgaattcaaattygtttcatcatatattttatttacttatttatttatttatttcgagatggagtcttgctttgtcgcccaggctggagtgcagcggcacaatctcgacttactgcaacctccacctcacgggttcaagcgattctgctgcctcagccaccccaggagctgggattacgggtgtctgccatcacccctgggtaattattttttgtatttttagtagagatggggtttcatcacgtgggctaggctggtctcgaactcctgacttccagtgatccacctgcctcagcctcccaaagtgctgagattacaggcatgagtcaccacatccggcctcattatatattttaagtgcttccaccaatttattrgccattctgttaacttttcttctaaatccataagaattcatggtttgtgaagcaaggattgaatttagatacttgttatttgcttcagatacagacyctctatttaactcctggaaatctaaattaatgagacggcatgatggaactcacagggaatcccaaagcctggttttatccaccacttcccaagggccttcatgcggttcactcagaaggcagcatgagggactgaaaggccactgggaggcaaaggcctagctgtgcacggtagctcagccaccggggactaaattcaggcaagttccctcatttctccaggtcttagttccctcgtgaggataatgatcctcttttaattacataatacagctggaggagctcaacaccatgctggcaaacaggaggtacgcccctttttttcttacttaacaatggagccaaattgtcacggtttgaccttaaaacctccctattttgcctgctctctgaaggaaatttgaaacaaaatccctagaatttttattgttaattttactttatatagcaataataatacaattattgttacaaacagctagtcctcataggcattagctacatgcctacctgcacgaagctgggcatttcccatgcatggagccaagcaacacttaattaaccctcaaggtgggtactatcttacagatgaggagactgaagttcagtgaggttaaacygcttgccccaaattgcatacaagggagtggaatggtcagaattcaaacccagagctgcgtgttctaaggcctgtgctcttacccgctacaccacctgcctgtagagaacacatggctaaccttggscttcctcctccaccccccaccccccatmctgggcctcttgcgcctggtctccacaggcacatctacatattgctatggttcccatgccatgcygcctgccagggtatggcccaagcagaggctcatggagaccttcagctaaagccacgtagtctaacacggcattgagagtccaccatggaaccaactaataataacaaacagcactttccttccaattccttgtatgtttgtccaccatgtgggcatggcagaaaggtgggtaatgggcaaggaaggagctgcgaatccatgggggcactggccatctactcagcatgacagaggcagaaagtggaaaatctagaacaaagagactggagtacgcacagatgatgggaagttatccaaagactagtgtcamcatgacaacagtgtgctaatccagcggcacatcctgtccactgctctgcaaagtctaataacaccttcakggacgtctgaagggccactaataatcccctgaagggaaggtgccgtgaagccacagccggaggcctaactcagcttcttagatgagtgcttcacagcaactatgagaacaattttcctgcttaaaacaatagagaacaaaatattttcatctgaagataacttacaaatattgtaaagcaggagtccccaacctttttggcaccagggacaggtttcaggaaagacaatttttccacggatgggggcaggaatggttttgggatgaaactgttccacctcagatcatcaggcattagtgagattcacataaggagctggcaacctagattcctcgaatgtgcagttcacaataggattcagctcctatgagaatctaatgcctctgctgatctgacaggaggcggagctcaggagttaatgcttgctggcctgctgctcatgtcctgctgtgcggccaggttcctaacaggccacacggaccagttgtaaagggcagggattacctctttttgttgccctctccaaaatgatggtatcaaccacgtcttaggagactttgcacacccctgccttctaaaatccttgccatgacatgagtagttactgtaccaagtattaagtcctgttttcagagcaaaaaacatctcccaaatgttgctaaataagggctctctctaaatccaagagagattaaagtgtgtgataacctcttggtatatgtgttgtactctttttcaaatcctatcaaagagagaaagtaggaatcagctctctcctttctgtaatcactgtggacagccacatagcaccggaggtgcgtgggaagagaaccctggactcacgatgctcagcttcagtcatttttttaaaccaaatwtaagaagtcttcaggttaccaggaccagtaaaggcaacttacgatgatgtcttgtctggttttgaaagtgctgatgtagtggctatagtggctgtcgtccatttgctgcagcagggcaatcatgcaagccacaaaactcccctggaaggaaaaggaaagcacaaatccaagactccttagaccaccaactgacaaaaacactatgtgagccccatgaacttggcttttcccacccactgagccaygcaggtatcccaccacactggaaacacgctgcattctaaaggtccaaaggccacgtgctttgcggtttctgcttcaaaccacctccttccaggtctgagtgaagaaatctcattaacagctawgaagtgtggaatcctatagacaggacacctcaatgagattaccagtgaagatgtaacaacttgtggggctttgggtttcttgttgagacagagctgtagtatagaattccatggagaaatgtctgaaatacttagattagttaaacaaatcttaacggggaggaaggctagcaggaaaagaggtggcaacactgagcatgraggagaggagggcaagcgatgatgatgaaaactccctgctagaatacctgtgatatgctttggctgtgtccccacccaaatctcatcttgaattgtagttcccattatccccatgtgttgtgggaggggcccagtgggaggtaatttaatcatgggaacggttacactcatgctagtctcgtgatagtgagtgagttctcacgagatctgatggttttacaaggggttttcctcctttttgcttggcacttcttgctgccgccatgtgaygaaggacgtttgcttcctcttctgccatgattgtaggtttcctgaggcctccccagccatgctgaactgtgagtcaattaaacctctttcctctataaactacccaatttataaactacccagtctcaggtatgtctttattagcagcatgagaacggactaatacaacctgataccgcttctccaactccagagcccttcagccagttgttccaacatactacccacgtgaattgtgaccctgacttgaagagaaaaaatcaataactagatgattcattaacactgcttccatttgtgagttcaggaattacatattcaaggtgctatcccctagaccaaaaaaatgtgaattatagacttagttttttagacagggagtaaagatccaggggtgctaacctcctgtattcatgcagctatgaaaataacacaaaggaatttagcacaggacagatgaacatacagctgtttctaaaacagagggaaagattccccaagcagaacaatgaaagactgtccatgtctatctctttctgaacgtatgccttagactgtctcttttgttttaaaaagtttattttttaggcctggtggggtggttcacacctgtaatcccagcactttgggaggccaaggtgggcggatcacttgaggtcaggagtttgagaccagkmyggccaacatggtgaaaccccatctctattaaaaatacaaaaattagccaggcatggtggtgggcacctataatcccagctactcgggaggctgaggcaggaaaattgcttgaacctgggaggcagagacgcagtgagccgagattctgccactgcactccagcctgggtgacagagccagagcctgtctcaaaaaaaaaaaaaaaaaaaaaaagtttattttttcaattataaagcagtrtaaacttattgtactaaggcctttgatatatatatattgccaaattatcatatagcttgttttcccaacggtgtctaacacaatttgtttctccaagaccttgcctattctgagtattagaggtttaatactcagaatttaacactgaggtttaatactcagaggtttaatctcactttgcactttcatttccttttctctaaattaaacagtctgtccatgaactttttggccatttagctttctcatgttgctgtttgcacccattctttactcatttttctactaaaacaatatctttgcttagtggcttataatagcttttgtatattaagtttattagccacctgtcacctatattacaaaatttttaaagcttgggacttgacatttaatttgcatatatatatatatatatatatatatatatataatcttcatatakagggatttaaaattttatctagtaaaattgttttcttgtattttaactataaaaaatccatgaatcctattcctcctcaaatcagttatctatttattattttattctagtgctttatgatacaactttttttaattgaacacttcactctgacatttattttgtgggtatagcatgaagttgaacaaattttttccaaattgttaactaattttctttttctttctttgagacagggtctcgttctgtcactcaggctacagtgcagtggcgatcatggctgactgtagcctcgacttccctggggctcaagcgatcctcacatcttagcctcctgagtagctgggattacagrcgcatgtcaccatgcctggctaatttttgtgtattttttttaagacagggtcttgccatgtttctcaggctggtctccaactcctgggatcaagcaatctgctaggttcagcctcccgaagtgctrggatcacaggcatgagccaccgcacccagccccaaattgttaactaattttctaaataacatttactaaaaaccttcattttccctttagaaaggtaatgaaatgttcatataatccaaagtctccttttcacttatcatggttctgttctgctgatatgtgtccactaagtctgacaggcaagctctccattattatgtattttttgtttttttssagacggagtctcgctctgtcaccaggctggagtgcagtggcgcgatctcagctcactgaaagctctgcctccggggttcaagtgattccccctgcctcagcctcccaatagctcggactacagccatgcatcaccacaactggctatttttttttttttttttgtattttaatagagacggggtttcaccatattggccaggatggtctcgatctcctgacctcatgatctgcccgcctcagcctcccaaagtgcagggattacaggcgtgagccaccatgccaggccccattattatttctatttggctatttatttgtaactagtatttatttttactctgatatttttgtgactaaattaaatagaatttcttatttataatctctaaatagcttccattgttaaagaacagkcattaaatatcatttattttaaaacaggttagaggctgggtgcagtggctcatgcctgtaatcccagcactttaggatgctaaggcgggtggatcatttgaggtcaggagatcaagacyagcccggccaacatggcaaaacctcgtctctrctaaaaatacaaaaattagctgggtgtcagggcacacacttgtaaccccagctatttgggaggctgaggtaggacaatcacttgaacctgggaggtggaggtcgcagtgagccgagatagcacccctgcactccagcctggctgacagagtgasaccctgtctcaaaacaaaataaataaacaggttagtttaataaattgtttattagttttactaaaatttgagtaaaccctcttgggttttgtagatatgctggtcatttcagctaaaaataatgacaattatttttacttttacaatatttatgtttagtatctttttcttattacattggctagaaattatagaaaaagctaaacaacagtgttgaaattaaatacctttttttttctaaatagagacaggttctcattctgtcacccaggctgaagcacagtggcaccttcacagctcactgcagcctcaatttcctgagttcaagcaagcctcctgcctcatcctcctaagcagctggggctacaggcacatgctgccatgcctggctaacttttaatttttttgtagagacagggtcttgctatgttgcccacactagtctcaaactcctggctttaagcaatactcctgcctcagcctcccaaagtgctgggattacaggtgtgagccattgtgcttggcctaaatatcttgattcccttttttaacgaccattgagtatcatgatgcctggtgatttcacgctaaaaagttccctcctcttcttgatttgggaaaaaatgtaacaataatcagataccattttggcatctatgaagaaaattataaggcttttttccttttattgaattgatgttattttataaatgtatttcctaatatttaaccattcttgaatatctggaataaactgtatcaagccatgtagattttctttttccacatctctcttcgcgactgtctgtgtctgtctgtacattttcccctcactttttttccttcttatgcttatcattcccacttcactttgcttcttttggcaccgccatcactccgtggatctaagtcattcccactctcatttcatgttagcggaagcacggcgggagtactgctgcctttacatccagtcctgcccttcccttcaaacatatggagctgatgtccttgagtgagtttaaacaagggagacaacatgcaatttgattcctaaaaggagctcaggaaatttgaattcaagtatgtaattatctatagccaatatatcatttcccatatcaatctttctttataatgtatgatagaaatggcttggcaatagcaattaatggtacattgtcttttcttaaatttcacaaaatatgtaaaatactctaaaagtatatcagttttagcataacgcaatgttcttcaatcctgtttttttccatcttgatctgctaaattgcactccatctgttagtaatttcagtaaattataaagggattagtgaagcaatgctgttaaaacatgcccaacttttaaacatataaaacatataagtgatttgactagttttctctcctacgttttttttttttttttttttttttttttttttaagacaaagtctcactctgtcacccagggtggagtgcagtggcgtgaccttggctcattgcaacctcaacctccacctcttgggtttaaacaattctcctacctcagcctccggagtagctggggttacagatgtgtcaccacacctggctaacttttgtatatttagtagagacagagtttcaccatgttggccaggctggtctcgaactcctgacctcaggtgatctgcccgcctcagccttccaaagtgctgatattacaggcatgagccaccrcacccagcttcctaagtcattcttacccttcaatagtcaatgggtggaaaagacagatcagttaagctatagattttatttttgcacaagtgattaacagcaatattatcagggcctagaaataaaaagtaattgatagattttaggttttattccctctttctgttggtaaaaaaaaaaatagtatttccttgccaacaatctgactgttctaaagataaaagccttgattttacatgaggaattctccaatttccatattagtctttgttccctcagatacttccttgagaaaaagatgtaggactagtctagttaactgataatccactaatacaagatctaaatccttttataatatgttttggatgagcttggatttttattttattttgttttattttatattttgaaacagggtcttactcagtcacccaggctgaagtgcaatggcgagatcatagctcattgcagccttgatctcctgggttcaagcgatcctcctgcctcagcctccagagtagctgggcgtacaggcactaatcactgcacctggctaattttttaaaaaatttttgtagagatggggtcttgctgtgttgcccaggccagtctcgaactcctcggctcagagattgggttttaatccagcagaaagacagttttacttgcaatcgtttctctttattcttattaggatcagctccatcaccctacaggttctgaccaggcatgtcttagggtttctgctatggctgtggcctctccctggaagacccttcccagatagccacatggctcactcccttaccttcctcaagtttttacccaaattttaccctctctggtaaaattcctaatcatcttatttaaaggtgtgactccccaccctcacttcccttatcctgctcattttttttctctctagcccctgttgcctcctaacactatgtagtttattttgctgtaactgctgtcattattgttggaatgtcagctcctcaaaggcagtgatttttctgttttgtttatgggtacctcttcagtgtccagagcagtgcctgttttatggcagtttttaaatacgtatttgtgaaataaatgaatttttcttatctgataggaatttgaaatagttcttttcctatgtcctctaattaaaatctaattcgattttaatataggaagcttttaatataggaagtaaaagatgcttcactttaatgatgacaccacttagcctttcaacagctacctatggcctctatcatagttgttacccggcatctgtttagatagagtgcacagaaaataagaggccagaccaacaatggcctttccacaagcatgctaaccacaggttctttaaaatgtttggtttcttccttgaatcaaaggggctgggtggttcatactggatcattttctttcttttctcttttcttcttttctctccttttttccttccttccttcctccctccctccctccctcccttccctccctgcttgctgctttttttttttttttctttttcaaaggcaggctattgctctgttgtccaggctaggatgcaatggtgcaatcacagctcactgcagcctcgacatctcacgtttaagtgatcctcccaccttagcctcctgagtagctgcaaccacaggcacgtgccaccaccacacccagctaattttttaaattttttgtagggatggggtctcactatattgcctaggctggattattttctctcaacagaaaatccatgtcagaatcaagatctgctaaggttataaccaatgacccatgatgtgagaggcccatgtgaagaatagtctcaagccactggccccgaaggcctcccgataggcaaaggggacagagaaacagcagcggccgtgggatccaacaaagagatactcacgatgtggggagactgccggttcatcccaatcactgtccggttgatccttctcagcagccgttccattataagctgaatgtgcaccgcagtggcaccctgcagggaacacaggatttgactccattccttctgactcagtttcactttctttaaggaacctcagatagatgagttttgtctttagatctctttttggctyttccctacaaagcaatctcttgtccaaaagtggaaaatggtctcacagaataatatataactttatgaagaaaatagttgaaaatgatcagtcataacacttaaaagatgaatgtggctgtgcagggatgagtgccttcttaataactcagattgctcaggttcactgagagctcactgtggccactgactcaacaaatagttttgggggacccccattagcatgacgtattctgttctgaggttgagcagattagaatcgctcaggtcaggccaggtgcggtggctcacgcctgtaatcccagcactttgggaggctgaggcgggcggattacaaggtcaggagttcgagaccatcctggctaatacagtgaaaccccgtctctactaaaaaatacaaaacattagccgggcgtggtggcgggcatctgtagtcccagctaatcgggaggctgaggcaggagaatggcgggaacccaggaggtggagcttgcagtgagctgagatcacgccactgcactccagcctgggtgacagagccagactccatctcaaaaaaataaaaataaaaataaaaataaaagaattgctcaggtcaattaggcacatgtgtgggaaattaaaggcaaaaatacaaagctcttaccaccttctgtgttggagggaaaaaaacaagaaattcaagtcaagggaattgttatggagtaaatgtttgtgtctcctccarattcatatgtgaagccctaacccccatcgtgatggtattaggagatgcagctcttgagatgtaatgaaggttagatgaggtcatgagggtggggccctggactgacgggataaatgctcttagtaaatgagtatcacagatgtggatctctctctccaccaggtgagcacacagcaagaaggtagctgtctgcaagctgggaagagagacctaaccaaaacttaaccacgctggcaccctgatctcagaaactcagtctccagaactgtgagaaaataaatgtctgttgtttaagccacgcagtctgtggtattttgttatagaagactgactgagcagactaatacaaggattttgtattctgactgtgtcatgtgtgactttgagcaattattcaacttcgctgagcttgcagttttcatagctgcaaaagggggacagtaacagttttcttattggaattagtagggctgatgtacacattctttctttcaccttctttccttttttgtagctagatattaccctcatttggctccgacttacccacatgcaacttgacttttcatagcctctatctgtccttgctttatgatagatactttgaaactcctgcttaatgcttcaaataactaaatcattgctatttgtatttttttgcttaacatttttattatcttttacaaatttaactggcaaagactgtacttatccagcgtgtacaacatgaagatttgatccacgtaatcgtgtaatgatttccacggtcaaattaacacatctattgccacccatgccatacattagattcccagaacttgctcatcctataaccgacactttctaccctttgatcaacatctccccatcctgcccctggtaaagaatgttctactctctgcttctaggagtctaacttttttagattccacatagaagtcagatcaggtaggatttgtctatggctgtaggaattttctttttgatttcaatagttttgggggtacgagtggtttctggttacatggatgagttctttattggtgattctgagatttttgtttacccatcacccaagcagtgtacactgtacccaatgcgtagtcttttatcgctcacccacctcttagcctttccccggaaagtccacaaagtccataatatcactcttaagcctttgcattctcatagcttagctcccacttataagtgagaacatataatatttgattttccattcttgagttacttcacttagaataatggcctccatctccacctaagttattgcaaaagacattattttgttcctttttatgagtgagtaatattccatgatgcatatataccacactttatccactcattggtcaatggacacttagatgggtttcatatctttgctattgcaaattgtgctgctataaacatgcacgtgcatgtatctttttcatataatgacttattttcctttgggtagatgcccaggagtggaattgctggattgaatggtacttctacttttagttctttaaacatgtttcatagttgtyatactaataatttgcattccctgtttttcatagtctgtttttcatagtttttcatactgtttttcatagtcgtcgtactaataatttgcattcccccagcagtgtaacaatgttcccctttcaccacgtctatgcccacatctattgttttttgacttctcaattatggtatggctatatgtattttaattacagtatcaagtacctggggtccaccctccctctctgcttccctctgtcccttcttctcttcctccttcactttttattagtcatttacttgtttcccatttccctgaatgaaagtgattcataaaatcagcctctccaggagatgctgctttcacttccatttacataacatttccttagkgkggccctaaatagttgtgcaagttacacgctgtgccttgtggggagggtatgaaatgaataaggctcctctgagcctttagagatttctattgtgggggtgcgggtgagtggtacataawtttttttttttttttttgagacagagtctcgctctgttgcccaagctggagtgcagtggtgtgatcttggctcactgcaacctctgcctcccgggttcaagtgattctcccgcctcagcctccagagtagctggggttacaggtgcgcaccaccacgcccagctaatttttgtatttttagtagagatggggttttatcatgttggtcaggctggtctcgaactcctgatctcgtgatctacctgtctcagcctcccaaagtgctgggattacaggcctgagccactgcacccagctgggacatacatttaaataagcataacacaagaatctccctagaaggtgggctcctgggggtagggtgcttgcttctctagttcactgtcatagccctagctgatcccagtgcctggagcataagagcagcttcccaaggatttgtgagctgcattcctaactcaatgtacaaagtgataaaatcctcaaaagaaactcaaagggagcatgaaaagaatgagtagaatttggcaggaccacaccagagacaacttcacagaggtgcttactgcagctggacttgaaagaaccaggacaattccaaaacagagctgtggggagaggagggaatcctgcaatgtttaaaaaaataaaacaaaaggcaggaagaacaaatatcagtaattagagctttgagttaactaaggagatgagaggataagagaagagatattgaactagtgcacatatttcaaaatgtttatgaagaaaaaaaggtaccatcatgatggacaaaaaacgattggacttactactttaccagagctccaagatcgataattttgaatgtctctgctcattacagggaacataatattgggaataccaaaataaaaagctaacttaaatctccttgcacaggatttaaatacattcaagtcatttccaaagagtctttctgggtggtgagaaggttggtagagatgtgatgtattaaacaatagggtcagaagtggaagagactaaagaggtcgtctagaacaattcctacatacaatggactgggttaggagactgaggcactgagatatttgactaaggacaaatagctgcagagtggtaatattgggactagaatccaatgctctgattcttgtgttttacattaactttggatcataaacatatgatttctagaacactgatccctggctaaaccaatgtgccaggtacattgctgccaaatttatagggcgtggagctttactttattattttaaggaattattgaattataagagttacttttaaaaaagtattgagtttatgacgtgattggtcacatttacgtatttggtgcaaagtccttggttaggaaccaaatctccaatcgcaacatgctttgagaaaatgtattccattttataatgtggtttctataaacatacttaatgaaaaaaagggggaatgatctataatgaataaatatcaagtaagcagtgcaaagagtaagtgggctacaggggcttagggaagtggagggacagagattggcggagcagctagagatggcaatggtaccctcacatacttctgaggctgcaatgtggattcacagaaatgtagacatcccagtgcaaaccatgagcaggagaaaaggtgggctgtagtcaaacggtggtggaccctgacaagtgaactaacggtttagctatgggaaaaggtgtagtattcatatcctttggtaggacagaatcccaagatactggaaagataaagactttaggtgatgacaaagagtggttttcctgttctgtgggaacacctgtgccatgaaaccaccatagacgtggtaactataatttgtggtaagatgctttttttttctcagccctcaactgttcgagtgaacacattctgcaaagttctccagcttcctgtgtgggggctctgctaggcctgtgggctgcactatttctaggacatggtgaatccagacaggttcagccctatgttttcttttttttttttttggagttggagtctcaatctattacccaggctggagtgcagtggcacaatcttggctcactgcaacctccgcctcccaggttcaagggattctcctgcctcggcctcccgagtagctgggactataggcgcgtgccaccacgcccagctaattttggtatttttagtagagacagggtttcactgtgttagccaggatggtctcgatctcctgacctcgtgatccatccacctcggcctcccaaagtgctggggttacaggcgtgagccaccacgyccggccttagccctgtgttttcaagagggatgggggccaggtcacagagaaaacrcaagatgagaaaacataatttccattaggttccagagaaagtatcagtgtccaagaggatatggaaatgagaacttctcagcagctcagaaatatcaggttgttaggcatcagaggataagaaggaagaggtgtctgcataaaaacagaaaggcctttgattctttattttttattattattattattttttagagagacaaagtcttactaagttgcccaggctggtcagtcttgaactcctggactcaagtgatcctcctgacttggcctcccaaagtgctgggattacaggcctgagccaccatgcccagtcaggtctttgattcttaagaatagtcacaggggctgggcgcgatggctcatgcctgaannnnnnnnnnnnnnnnnnnncaccactttgggaggccgagatgggtggatcacgaggtcaggagatcgagactatcctggctaacacagtgaaaccccgtctctactaaaaatacaaaaaaattagccgggcgtggtggcgggcgcctgtagtcccagctactcgggaggctgggacaggagaatggcgtgaacccgggaggcggagcttgcagtgagccgagatcgcgccactgcactccagcctgggcgacagagcgagactccctctcaaaaaaaaaaagtcacagggatctcaatagtgcgcacactgggcaagccaggaaaatcagcctgcagaaggccccagcagtaatctgactttgcactggaggctctggcctccctaattatctctaaaatgggcacagcctgccctaataccggagctggaaactacctgagaataggaaggccacggagtcactcctgtctggtgcaaaggggacagtgtgaactctgtgcagcatcagtgatgactcaactcaccacatccttcctgtccagcacctccaggatgttgctcagaagctgcgagcttgcctcgtggtcaggcttgttggagttgtcatctaactggccgctgagctggtcngtcagcagtggcagcagcacttctctgcactctgagaaggaaaacacagacagctcacacacagcagtgccacctcctgaactgcctgtctccttcctgcaactctncctygaccagtaccagtagctctaagctctgcaatcagccctgcagggatgcagcccctccaggccacccaggaacacctggttttaggcacggaactttacccttgttcaatgcgcagatgaatgaattaaaaaaaaaaaaaatgacccttctcacaggtgaaggtgggaacttagcaaaatgtttaaattatttaacaatttctctagcttttcaaaacgccaacctaatgcacgaaattgagggtcatatgaaacaaataaaaccaagcaagttatacattttttttttcaaaaattttttcacctaatggagaaaatttactgaaagaagttcctataaataaagttcctataaatactgagcttccctagtacatgtcaatgacattctgctcatgtctgtgcaggcgtgtggatttcagaaagtaaggtatgacctattatgtcttctgagatctttgctattgtaacacattttataatgagttcaggtactctgaatgctacagaaatgactgttaaccrtgatcacactctaagtagaactatccagtgcatgcttgctcttctgctcaaacaccttatctttactatctcaattaccttttctgtatccttaaaaagtgatcaaagcatattaaaatgtttagtaataatttgctttagtaataaatgttttctacttatgagcattcactaaccttttgcaggcattacctctacctccaattgtgtcttaggaacatttgcaatttcaaagtgcaaattcatagggtcagaaaatatcagagcccaaggaggctactgatacgatctagctcaagtccttccttccacagaactggaggctgagacttagagaaggccactcatttgtccagttacataactagccaggggcaaagccaggaaggctctcccaccaacaatccactcaacttgtttaacgttgaggagtcctgctggtcttcagatctccaggcaatatacatacataaaatgaggttacactctgggagcccctgaccaggtagttagccccagaagaagtctccgtggctgcctcactctagcaagtcttgagtttattgggaaggcccaggtgctggacctcctgtttatatcagctttgggacagaaacacttggtggctatttgctagactctacttacaaaatgaaaagtattttatcagtgtaagagtttttcccctccatgccccactcctctcccagcagaatactagtaatctggcttctgccagcctaccccctaaagaaaacagcttggccaggtgcagtggctcatgcctataatcccagcactctgggaggccaaggtgggtggatcacctgaggtcaggagcttgagacaagctggccaacatggtgaaaccctggctttactaagattacaaaaaaaattagctgggcatggtggtgcacacctgtaatcccagctacttgggaggctgaggcaggagaattgcttgaacctgggaggtggaggttgcagtgagccaagttcatgctgctgcattccagcctgggcgaaagagtgagactccatctcaaaacaaaacaaaacaaaaaaacgcttgctttatcatgtttgccagttaccctggtgtaaagacttccaccatggtcaatttccagctactaatgtgatatcactgaacgtggggttgagaagggatgcatgtaaccagctctcctgtgggatccaacacattgctgtttccctgtcccctggtttttaaggtcatgcaataagtatagactaaagaagaataatttcttttaaaagggtcatcttttcctacttgcttgttacttcctgaggttcctgttttaaagacaaaattctctaattaatgaaccacttgcagattgttctaattaaagattaaggaacacatgattttgctcttttaggaactgttggaaataccgagctgactttagattctccttaaaaccgctctcccaggaggtccttacatacaactggcaacaatattaatgttgccaacaaacaactggcaagaatattaatgacatttttaaaaaagaaaagtcaagtgctgactgggcacggtaattatgcctgtaatcccagtactttgggaggccaagttgggcagatcacttgaggtcaggagtttgaggccagcctggccaacattgtgaaaccccacctctaccaaaaatacaaaaaaaaaaaaaaattagctgggtgtggtgatgtacacctgtaatcccagctactcagggggctgaggcaggagaatcacttgaacctgggaagcagaggttagagggagcagagacagtgccacagaactccagcctaggtgagggagtgagattccgtcttaaaaaacaaacaagccggacgcggtggctcacgcctgtaatcccaacactttgggaggccgaggcgggtggatcacgaggtcaggagatcaagaccatcctggctaacgtggtgaaaccccgtctctactaaaaataaaaataaaaaaaaattagctgggcttggtggcaggtgccttgtagtcccagctacttgggaggctgaggcaggagaattgcttgaacctgggaggccgaggttgcagtgagccgagattgcgccactgcactccagcctgggtgacagaatgagactccgtctcaaaaaaaaaaaaaaaaaaaaaaaaacaagaaaaaacaaacaaacaacaaaacccaagtgttagctgcagaaatggggctgtcatctcagcatgcagcagcttgttttagctttttgagatggagtcttgttctgtcacccaggctggagtgcaatggtgcaatctcagctcactgcaacctcatgcagcaagttttgaaggagacttacctgactgtcgaaaaagagtgctctctactatcttggtcatgcagttaagtttctgccgaaccagctggttgtcaggaatgctttgaatgaatttgcagaagagcacgctgggagagaaacctcagggttagtagtgtcttcgttctgccaaattgaaggcatcattataaacttttctcctccactctgagatttgggcatggagagatttacctggaaaactacaaaatgacctgagagtttatgacatggcagcaagggagattttatcctcacttactggagggctctgccttagagctgagtatttaaattgccaaagaacacccacgtccatcatcactttccagacccgcctttatgaaaatggctttcttggcaactccactctcatgttgattgcagtctgactttgcactgctgggatacttaggggtagggctggaagcatgtcattatacactatcttttgtaatcgattttatgtctgcatgtcttgttttcccagagaaagtgcaaacctctctcagggcaggttttggatgttcttttgcatcttccacagaactgagcacaaaaaggtattcagttaatacttcttagaaaaataaaagccaggtgtagcagcccaggctccagccaagcaggggagctgtttctgttagagttaaggaacaaaattttgttttgctatttacctgagctcaacaggatcaaatacaagtttgacatcattaattatgctaggaaggtacttcaaagctgccccctgtaagaaaaacaccaaaggcaaattcagttgccaggcaagacaaatacagtatttactgcttgatcccaggaagaaaaggctgtgcttggaacttatatagggaactggacacagatacccttacaataaaaaggaaagctggcattgctctacacgatctcctaaaatgcttttcctgaagatgccagggggtacagctttctggtttctactgccagcaggctctgtccacttggagttcatttctctgcctaaggaggtggttaaattcttgaagcctctcttgcaacatggccataaagagcaaaaaataaatattaatagtaaagttcacatttgagccttcagggattatatatttcatattttttwaaaaaattatgataataaagatggtgactttgcacttctgggtaaaatgagggacaaaaaataaaaatttgtcacctgtagtgcattgggatcagtttgctgaaatcatggggtcaaacagggttcacaatggcctttcaagggatgtctaattgggtagcttgtctttggcaagttgacacttgaaaatacaagctctgtagaagttaaaatggattttttttcctttattttctgtaaatcatactaaaattcataagctatgcatgaaccatgattcactttgtttctccctcatgatggccaattytaagcggtcccagaacatccttaccacagcctaagaagagttacccatgatgctgccaggctgaccttgatcttgacggcttcctccagaggcctgtccatcagcatattgaaagcaagaaataactggcgaattgaattattaaactcatctccatctttgctctgcccataaaatcttaataggaaaaagacaaaagcagttggactttccattgttaaaagaaattttaaaatagatttgttgcctccctcacttctccttcatcgtatcaccctaatcattctgactcacctaattaagccccagtcatctgaagtttcaggcaatgggttagagaagccgctcaacccggaaaggctctgatccccaacccagcctacaaaaccatttgttccactttagccactgaactgcccgtgccgatgctggcctgctctaccataagggccttccaggacaagaccccytagtcttcrctgatacatgcttgccttaattaaagtactctacttgtctccaaaagatctgtccaccaactcaaaagtgggttctttctcataagtagaaatcaagagatatttgggcactttccaagacacacaaaagtcccaaatgaaagtgcatatgcacatataataggtggcaatttcaccactaactggtcaagaataggatggcttgaattcaaaatttcatgcacacactcaaatacacacatgtacatttaaattcatctcctccattcacctataccttatatagtacccaaagaatatgaacttcactgagatcgttaatcagagggttaatggtaattctcaattcacccattttacagaactagaaaagaactttatttgcaatgtagtccccaaagtatctcaaaattaacacacctacaacagaattcgcttgatttccctgctcaactctaagtattacaaatgtcagcaaacagcatcacctcgaacctagatccaccccaaacctagatgttatctatgtttcttctctttctctcattgccccatcaaacccaacagcaaatcctacgagctcgaatcagtccattctctccatctgcctctgagatggggctggagtatctcacatttaaaccacaatggcctcttaaagtggtcactggcttctacctgtagccttcgataatccattttccatgtgggagatgagatgatcatttaaaatataagccagattttattacttctctagttgtcccccaacggcttcccactacacttggaataaaatccaagctcctcactatggcctacaaggccccacatcatttactatttgctggccactcccgctctctctcccgacactgggttctcgttactcctcacgcatccacatttggtgccctataggtccctgcctggggcaggtcctgctcccactaacccttacctgacatctctggaggctgcttcttcatctttcagtctcagctcacatgataccacctcctcctccacccagctcagctcaggcagccttccctgctggttccaccactccaacactgccttcatttaggggttgatttctttactccttgcctccctgaactccatggaacccacacacaccatcatagtgggagcctggtcacatatgctgcaaaagccctgcaccaatgcagaacacttggcactctacgtatgtgacttgattttttttttaagtactaatgatagggggctaagggattaagatcaagcttctcaacatcctattgggagcaatttacaattttttcttggtgttttgctgattgaggtgaaatccagccaggtaatgagctcataagagagatttaagctctgaggaaggcaacagggggcccagggaccaggtgacattccactgcagcctccagacatggccagtgcactgaagtgaccattaaatctaagcaaccaggggacgcacattgccagtctcttccccagctcaggttcttctttaataacatataagggaaaagtaaccacacgcaggccatcacagacartgtgtaatgaagcaactctcctagtcaatttcatgggtcctctgtcgccctaaccttttgttttccacactcaccatcctttactgtcctatctggtgtctagaatgaggactctgatgtgcytcaacaaatgaagaggaaatgaactagtgaaccatccataagaaaatayattttaatttcacactcaggttttctttctgtggtttaaagttgatactgatttttggacatcagggtttactatacatacaaacttttgggtaagagaatattcccttggtcgaacactccatgccccaaccattctgaatacatggaaatgtaccataactggaaaatataatgaaacaactttaaaagaagaccttctgaaaagaaagcaaatacagagactgagcataaattatgtgtggggaaaacactgcccacttccacctggaaaggagggacagtcattcagccagatgggtttcaagtcattaaacattttttaaaaacaatcagaaaggtacatattcatttaaaaattcaaaaaaatataaaaaatagcaaataaaaatagaataataaatgtaaatcaaatgctgaaagaataaaaacataaagaatgaaaaaataaattacaaccctgtcacatgaagttttcatactattgacatttcagaccaggcacggtggctcacgcctgtaattccagcactttgggaggcggaggtgggcagatcccttgagcccaggagtttgagaccagactgggtaacatagagagaccctgtctctacaaaaaatataaacattagctgggcatggtgacgtgccctttggtcccagctacttggggggctaaggttggaggatcgcttgagcccgggaagcagagtgcagtgacccaacatcatgccactgaactctcgcctgggtgacagagccagaccctgtctcaaaaacaaaaacaaaaaaccctaaaaaactctaaagaaacaacaacaaaaaaacactttagcatgtgatctatccagtcttctttactatacatatttcaaatctgtattattttaaaaggaagatcatactgtactcatgcttaatacctttgttttatcatttaagaatgtatcgggccaggcgcagtggctcatgcctgtaattccagcactttcggaggccgaggcggggggatcacgaggtcaggagatcgagaccatcctggctaacatgtcaaaccccatcgctactaaaaatacaaaaaaattagctgggcatggtggtatgcacctgtagtcccagctactcgggaggctgaggcacgagaatcgcttgaacctgtaaggtggaggctgcagtgagccaagattacaccactgcactccagcctgggcgacagagcaagactccatctcaaaaaaaaaaaaaaaaaagaatctatcatggtcgtctttcctcattaacataccctacatttgaaatgactgaatgtacatactttcacattcatttttgtcatacctgataagattttttttttccattagataaatttctagatgaggtattactggacaaatgtgacactttttcctttcccttaaaaatcttcttttttgtttttattcagactatctatttctatcctgaagaatttatatctccattagcatcaaaactgaaatacaggaccaatttttgcccaatctcatcaaggacaaagatgtctaatctttttcaaatgtataggtaaaagatggtgtgtgtgtgcatgcatgtgtgtgcgtctgtatcaaaattcttttgatagtatgaaattttttaaaaagtttattgaccatttaagtttttcttttgtaaattacctgtttttgttttccattagggctatttatcattcttttattgatttataaaagctttaactgagaaaagctattaaactttcatctgtactatatgtaacctttttgcaggttgtttgcctttaattttatttttttcaataaagtttcttttaaaaatacatatgctcaattctacaaaccttttctttcttccttagaaaaaaattttaacagtttggaaatacagctatttctgaagggtaggaaagtcactggggttgtgaatgttccctgcaaaggtacttgctcttttgcagtttcttctgtttttgatggaactgttatgctagaaatccaaacagggaataatcctgtctctagtgcttagttgcccaggtagctaagcacagtgtcaacaaggaaacactcatctcaggcaacacctcccctgagatgactgctgcttctgctagcgacagcagatcatgatcctagatttgcacactcaatattgtcatgaagtcatctgctgtattaggtacaatctttccacaggaatctgcttccccaagtcctgaggtcattactgccccagaattttgctgatctacaaaaacttctcatgagtcttctccaacagacacgcagcccaaatccatcttcagccctgcagttctgaaataaggcaattctaagaactaactgctcacagagctgaacaccactgtgcagagtgagggaaaaagcacacagagtgacagctgataatctaaacatcttcactgcagttaacattacctcaagtagagcactcgggattggatgatgaatctaaacaagtacttcaaggctttcaacgcagcaaaaagcagttcagtcttgctggagtcatctgcattagccacatagaagttcagtaccttggagagtttccttagaagaatgagaaagaaaaattaagccaatgagcaacaggatactctgaggcttgggtaagttatctaagaggggaacatggcatcctggaagtagaagtcataactaattatatcttctagaatatgccctgaacagcaaaattaactcttttccaattaagtttcctcatctgccatctaggtttggaactacsttctgctgagaaatactagaaaaggtttctttccctttgtgggattaaaccggagggttatgaaatgaaatggttgaagtgacccaaattgctaggatattttaatctctggtatgcaattctgacatcttcagatgctcccataaatgagggattatgcctgcctacaggagttgacttaaaagaagcctaattccttttattctgcctcaacccaytgggatccatcaatatggagccagatagaaactttatggagtgaagaaagaggagctcactctccagaacattcatggttctaagcattcaacagataaagctgttctggggttataggttgctctttgtgtctttctagagtttttgggctaggaatggtcttcattttgtgctatcccttagactttggagggcactgatattttaaacttaaactttccttctggggatccttgagctttcctagaataataataatagttatatmcaataatagtcatacataataatataataatagtcacttataattattattattattattatttagatggagtctcattctgtcacccaggatggagtgcagtggcgtgatctctgcctcctgggttcaagcactcggccgaattattattttttaaaaaggaaacatatagaattgatcaagtcttgcaagtaaacccagattactaccacctggagtgctgcatttggctcggtatgatcacagtgatgggatttcctcatttgtagctattgcccacctggatgtgaggctcctgggtggaacggccactgtcactggtgttcttgctgacaagtcagtgggcagcaatctacaggatgtggcttaagccactgtcataagaagatcatggaccaatccagctacattcctwtcactatttatcacattctgcacaataactggaaggcaacgggtgggtgtggcaggcacacacaatgccatggtgagctgagtgctctggggaggaatgcggagtggacatcagttgctttccttagtcaggggcccataaaccaatgatagaaggcaggctgcactacaaaaaaggtagagaccactgcctcttatgcaaaagatgggaaaacgaaatcttctcatatcctgtaagcaatacattttacaaagcatttgtggtacagggttgagggcatgaccttttcttctatcaaacttggtcttgtttaattcatggtttgatctccttgatgtcccacgccaatcccactgacattcaacctctgagatcctgggttgagtcatttgttattgattttgctcgttttttttttttttttagatactaagtcttgctctgtcacttaggctggagtgcaatggcatgatcacagctcactgcagccttgacttccctgggcttaagcaatcctctcacctaagcctctcgagtagctaggactacaggtgtgtgtcaccacacctggctaactttttaattttttgtaaagataggttcttgttatgttgcctaggctggtcttgaattcctggcctcaagcaatcctccccacaaagtgctggaattgcaggtatgagcaaccacgcctggcctattctggatccttaaggaaatttcgcctgatccagaatgaaggccctgatcttagccccctttccagagttagaatacttagatggttccctttttccacccggaagcttagaataagagttctgccttaacaggcgtatttactgaatagtaataggtccgtctcgtttctcaacaatccagtcctaagagtacaaatccaaagatccaacaacatgtagttccttcagatcatacttacacatatgccaaagtggcgctgaagtgcttgtaaatgtaggtttcaagtacaggattaaaatgctggaacttgatgtctcctatcagtgaaataataaatacctgccaaaagtgaaaaatagaaatagcagcactgcacaatcccaagtattctgtcaacaagccgcattttaacatctcggtgccttctttcctctctggatcttttctgcagcattcccactctactattccagagctgatgtcaagtcttgaggattgtatttatttagcataaatagagagactattatgtgtcaggcactatgttaaatgctgtgaagaaaccaactcaagccagcatccttggcctcagggagctgactatctcaaagacagsrgagtcgatgcccaggtaacctaacgggcaggaggaaggaggctctggaaaggtgttttctctaatccaaggatgcagctaatgaaacattccatgacatttttctcctgtgtacactatgagtgcccccagtaacaactgcaccagagttttatctcccaattacctcttgtatattctcttgcactgctatcaggcacatgacctaaaatcagccacactaccctgtttaagacagaggggtcagaagaaagaggcatttgggatttccatctatgcccactgccagctgctatgtccctcaggaatctgtttccagaccttgtcccacagcaaccataaccactgtctctctttcccataaacccaagtccaaccagttggatctcaastaggtggccttttctttctttatcttaaaccttagctttaataccctaatcatttcctaaactgactagtttctcaaagctggtaaatcgcctaaagctgcaactgaccttcctcctcagctgtggcattcaggtaaaatcctgtcctgaaatttcaccccaccaaggtgaaaacgatgcttgctttgagmctttcagcttcttcccctccaccctcacctcyggctttcccagattctgatatcacttatccctgatctgatttcaattcttgcaatgggttgtaggtttaagtgctttgtgcgacaaattcaattttctgctgggttgaatattctgcctaatgaggctcagattcacctctgacttgtgaattcagtctcccttgcataaacacaccagtgcacacacaaatccaacatgtaacaatgctccagatcatggtaatgtgagttaaaatgattcctgatttctaataaaaataaaacatcttatcttcyctaatgagaaagagcatatcaaaaaatgagacctaacaggaaacaaacaaaggcctgaaatataagtcatttgtttctaatagtacttctaggaattcagcctaaaacaataaccagagagatgtaaacaaatayttatgtgagaagatattcacacaatcacttataatagtgaaatattgaaaactacaaagttgcaacaataaacactagttaatatgtttaactgcttaccagtgcgtcaaacacaaggaagtcataggtttcactgtctgacatttccatcattatgttaaagagtgcatctagtgtatcttgcaaaaactgaagataagaaaaacggagaggttattttgatgctttcattcagccccacaccacagaaatctgggtacaactagtttaaatcaaagaggtttaaaayagcattttttaaaaaactagcacacttgtttaacaacgtagattttatatttacartgaatgatttaattttaaatggtgaaccaattaggtataattagataggtatatatatgtaggtatgtgtatttctaactatgaatatataaacataccttaacaatctctcctccatccacttccattaacttctttaggttgtgtttaatgttctgggagttggaacgccaatttaacaagcctaacaggtcaactaggaagaacaaccacaaacattagatacaggtgagaacaacccagacmatttcaggacatagctaaagaattctctagaacaggtaattgctctcaatagtggctaattcaagatgccttatatattcttttaatttactatctcctatctaagtcagagaaaaccttgtggtcctctttcattcttcaaagagaaaaaaattaactattaatgcataagaacttagaatatctgactgaaactaacatttctcaaataatgacatcatggtcataagaagtaaagctaagaagcatgctaatgtaaccttcctacttttaatttgctgccttatttaaattgtcccttatcactacctatgtctgggtggattcagagggaaagaggaacataggtatgtgtgtatctctctctctctctctctctctctctctctctctatatatatatatatatatatatgcattaatttatttcaacatcatgactgcacagattttatttttttcatcttttagatgaggaaactgaggctttgtgaagttaaattacatgtcttaggagaggtagaaatggaattttattacatatttatctgatttgaaaaaccaactccttgctactctatcatactgttttccccagagttctttgaagaaatagacaagcaaatcagacaggtggctatttcaaacaaaaggtggaacagattcataacccttagcataagtctgggataaaaatcttaagacattttttgacttacaatggagaattttgaaactttaagccacttacaggtttaataaatgttgagctattaaaaatgtcaaaggggctgggcacagtggctaacacctgtaatcccaacactttaggaagccaagacaggaggattacttgagctcaggaattcaagaccagcctgggcaacatagagagaccctgtctctattaagaaatacacatatatgtgtgtgtgtgtgtgtgtgtgtgtgtgtgtgtgtgtgtgtcacagagaaactgcagttatctggactgttactgtattatcacctagtttagtacatcaagctactatttctattcagagcactatctagtaaatgtagcaatacatactttttttttctttgagagacaaggtcgctctgtcacccgggctggggtgcagtagtgcaatctcatgcagtggtgcaatcacacaatctcagctcattgcaacctgcaacctccacctcccaggatcaagcattcctcccacctcagcctccagagtagctgggactacaggtgcaccaccacacctggctaatttttgtattttttgtagagaagggctttcaccatgttgcccaggctggtcttgaactcctgagcttcaaaagcaagcctcctgcctcggcctcccagagtgcctcccaaatccctcccaaagggattacaagtgtgagccactgcgcccggctgatatttttcaatcaatgaatttgtagaaatatataagtagttacacatgtatttttcataaatagtcaaagtccttcttgagggtgtttatcaacaccctccaaaacctagtgcctagggattcctcgtgtctacaggataaacttccaatgccacatagagaatgtaataaggccccacctatatcactcctgcatacttccaaccaccaccattctcttttaycctttagcagtcagagaaatccaatcactacagcccaaccatggcaggttctgaaatatctctgtgtctttgtgtatattcttccctttgcctgaaatacccagaaatactatgtatttggtaagatgtacttggtatctccttgactcttcccatagttctcagccatttgaaggcaggaatcatatagtattcattcttttatcttgccttagtactagccatctattaggtgttcaatacatgtttgatgaaggaataaatgaatgaacggaaagggaaccagtagccctaaggaaactgataatatgctcaacccaatcattaatatattcattcatccactaggcaccatctacttccatattctccagctcttatttctgtcacaggctagtcgaaggtatcactcattccatcacttgactcatagctgctggaggaaaaggatttagtcccttcaccaggggtgaatattcacccagcagcttcagctctggcaaagtacccatctatcagcccagaggtttatttcctagtgatatctgcatgccagatcactgctcacataggaaaatattttggcatctggtgaattgttaaggtcttagggccaggagagcagtgacacggggttacagaaagagccccatgcttgctgtgtttctaagatttatacaggtttatccatgtagctctagttaattttttttctcgctgtatagtgtctattcaattgtatgggtgtacacaatttgtttatccactctgctgmtgataaacacgtgggttgtctctagtttttttgctatcataagcaattccgccatgaacattctcatacgtctcctggtatacaggtagagcagcttctctgggrtagaaaactaaggtgggatttctggggcatcaggaagaatatcttcaaccatattaaatattatgcaaagtcactgtcctcattttacattcttgtcagaaatgtgtaagaattcaggatatttcaaatcttcagtaatgctgagtaaaagcgcaagttacatgatttcacacgtgacacaagacttcaattagacagttcaattattaactacattaatactgtagactgtatagtactgtatactgtatacttgaaaattgctaagagaatagattttgagtgttctcaccaccgaaaaataagtaaggtggcatgcaaaagttgccagctgcaggagattactgagcacttgaaatgtggctagggcaactaagggactgactcataatttaatttattaacataaaattaaaaaatgcaaaatgaaacaatataccttaagggctacagatgtggcaaaactataaagagaagcaagagaataacaatccccacatttagggtagtaactgccttctaccctaaaggagagaatttaagaacacatacttttaaagagaaaagaaagacaaagctattcagactcaaaaggttaaaagtcactggagttcgtaacaaacagatcttggagactctgtaactgcaaaacgataaactataaactgtttggagctacaaagagctgctttcaaaatacaagtccacgacttaggagcttaagaaagattttttgccactttaaaactcaattttctgatcaataagctggagatgatctggcaaagttggtgctggagggtgcaatgactgactgagtatgaacctcctggcccaaggccacgcacctctggggacctgcacattcctctctttttcctggraaacaaatctattcttaccttccagtgggcccagaaaccaatgatcccacacaaattggtctgttttagtttctaaaaaacaaatcragtaaacaaaagagtctccaagatctgtttgttaaaactccagtggcttttaaccttttgagtctgaataactctcctcaggcgaaggagaaatgcctttgttcaccctctcagtgagaacactgctaccctctctactcagtcaacaccctcacagaattagctgatggcttattaatgttcttcagctttttattaaatcaaattcattctttataatttccatcaagtcagaagaaagcaaatgcatgaataatctgcaatcatttgtccctggaataccccattttccctgatgctcgtgatgcctttgccaagtctccgtctttcyctctctgtaccctgttccctctccctgctcgcagtctgtttggatggcagctcactcctctctgactcagacaaggtttgcctttttaacccttctttgtaataagatattacttctgactttttttgtatgtgttatgatgagtttgtctttttttttaatcaaaacatcaggaataaggatgacaaaataaagcatacagtgtcatccaaaggaacattctgtgatgatgaaaatgtatatccgtctgcccaacacaaaactcaccagctgcagaagaccagaatgcttgaaatgcgactagggcaactagcggactgatttataatttaattttattaataaaatttaattaacaaataaaaattgtatgtatttgcagtgtacaacatgatgttctgacacacacacacacacggtagaagggtaaatcaaggtaattaacacacacattatctcacttattgtttggtggtgagaacacttaaaatctactctcttaccaattttcaagtatacactatactattaactatagacacgaggatatataacagatctcttgaacttatccctcttgtctaattgagcttttgtaccttttgtccaacttctccccaatctccccaccctccaattttaattaatttaaattttacaagctacatgtgtctgggggctaccatatcgggacagtacaggctagttaagaacattcagaagatggggtgaagtagatgtatcagcaaacgaagggtctacattgagaactgcgggttgtcaggaaaccctacatttttgacagggagataacaaacaatgtaacaatatggttatctctaacagaaattccttttgcttttcattactagttaatttcacaaacttttattcttgttttctttattcttctttaatctgtagtccagaaaggataatctactagatgttcaataagtgttatccctctcaaatatcccttgatagttttaaaagaacattaatgctttatatagtatactaccatacttagtttaaaaaataacattttgacatttcatagttaaaaatttggaaaataccaaaaagaataaagaaaacaagaattatcaaactttgggttagtcctattcatcgttttctgtgtacaaatagtgatgatgatcgtgatagctgacattatagtgttcactatatagatcgaatgtgagtttttacgtgttttaatttactgcattctttgaaatagatactattattgctcccatttgaaagacaaggaaaccaattcacagagatatcaagtcacttgcccaagatgaaacagctagtaaatggcagagctgggatttgaagccaggcaatctgcctgcaggttgctcacatatacttaaataaaactgggatcatactgtatatagtgttaaaaagttcaccgtgtccttcactatgttttgaaataccatatttagcagctgcatatatttcatcacttaattatattataaaacgtggttaaactgaccctgactatcagacatttgggttgtttccagtatttccctgttacaaataatagggaaacaacatccttgtacataaatcttcgtgtccatctctcattgtttacttaagtgcaacttccaggaatcaaatcacaggctcaaagggtctgaagacagttaaactccttgatatgccttctaaattatcttccataaatgttgtacccattaacctaccagcagttcattgttaatggattcgctttgtccataacacggggtatgttgctgacggttttgtcacgtcttttatgtttctggcttcatttttggtgaggatgcttttacttgcacatacggattagccctaaacttcactctgtggagtctagccacttgtccaagttgaaatacaatccttatctttttgtcaaccacgacttgttgaaacaaacctaacactgagcccttctaaagatcagggatctgatccctgggtttaccctataactacacttttttgtctatcttggcaccccttaaggcagagctcttgcctgtacctcactcaaactgtctacaaggccaaaggcaacagtctctacacrgcatatgggagacagaatttctagcgcaagtcccctaggcagctcattcttggtttactacatccagtagggttccttacacattacttaagttaaataaataagaagttgatattggctagcacatgtcataatctacacaagagaggttaaaattgatatcagagatttgaaggaaaaaccaaatgaatccctctttgmactattcagctgaatttatggaaaatccctgactgcttggaaaaaaatgggaaagaagagaatataggagggaaggacagaactcaaacaggaagccctgccatacctgtttggacaggaaactgattatatttctttgccaagctcctcctcttactaccaacatctcttcctgcacatactacacagaatgcactatcagggaacatacggcttttgaattttacagttgctgttaataaatgcatttataggttttawgatattaaatactaaaatgtttttcatcctgctctaaagtggacgatgaaacttcagaagaggctgtgcaatgtgatcagcactacccagaataccacttgaaaagcagagagcagaatccaattggccaacatcctacctaataagacccagccccatatagtccagccctgtgagcctaaccaaggagcccagaaaggctgagcaagaagcttatttgtgtcagtgtattcaccrctcctaccattctgggtgagctttgtggagcagatgagggtggcaatctgaaagctgtctttagtgctatccttgcttggggtgaaggtgaccaggtttttrgatgcttgaagctctttttcttccatctccatcttggttccaggcagggtcaggtagaatttagcrtcttccatttttttgttgtcaccctaaaaggaagcatgttaggaacaccaaatgatggccaaaatctcttatatgcaaataaaaacaatttctatcatgcattttcagcatgagaagcgtggacttatcaatttatcctgaagatcccttccacctctgagatactctgatatctttctgtaaacattgagcccagaaataatttcatgattgaatggaaacagaataagttgtgaactagaaaccagaatatcctagtctctgttagagtaaatacacatatttcagaataaggttaaatttcattttcttcagtctctaaatggggacaattccaacaatgatagactggattaagaaaatatggcacatatacaccatggaatactatgcagccataaaaaaggatgagttcatgtcctttgtagggacatggatgaagctggaaaccatcattctcagcaaactatcgcaaggacaaaaaaccaaacaccgcatgttctcactcataggtgggaattgaacaatgagaacacatggacacaggaaggggaacatcacacaccagggcctgttgtggcgggggcggggaggggggagggatagcattaggagatatacctaatgttaaatggcaagttaatgggtgcagcacaccaacatggcacatgtatacatctgtaacaaacctgcacgttgtgcacatgtaccctaaaacttgaagtgtaattaaaaaatggggacaattatactttattgggttgatggaagaagaattagcttgccatcccttccaaaatgattcataaactaagatgttaagaaaaatattcctcaggtagatgcatctcaaaagagcagccaactgtggggaaatccccagatattgttggcyaaatgagatcttccagcatctactttatactctaaaatctcagtagaagtgggagctcagcatcagttggaaggcaagaacaaagacaaaactttcagggaaggaaataaggcccccagagcacagaaatagtatgtggctcatggtgatgggaaaaccatatccaccacacactactgaagcccaacagtgcacctgtccatgtgccatgcaggatgatgaaaagagcagatcatgagaggccgaccccttaccattcactgctagggaacaccattcacaggacctctcccgtgagaggtctaaggaggtgagagcctccttagaagactcagtaataatgcaactcactctctccagaaagcaggtgggaaaccacaaagctggagggcccagagccctctgggtttctagatgttaatgggcaagtacagaaagctctagaaaggtttctgatgtttgtacaaataaatatgaaaggagtcttaaatgctcatttgaaagggagtatttttctcagccattttctgttagcaccaccttataaaccaccagatcgtgcctcccatcctgcagagtggtgccatccgggttcatcagcttcacgaaggccaccccaaatgctcgctccgatttatctctggctgaaaargcagaaagacatgtctgagcagtgcagagagacaccaggaggcgatggctatgacacgatttcacattttgctcgggggtgcagcgttcaaccatattctaataagcacaactgagcaaactgcaataagccacgtaccatgtgccactgaaactgcctggcacccccaagtatgctctcctcttcctacatcccctaataaatgagactagcatctgcccagtcatccaaatcagaaatgtgggtgttgacaccaactccaccccacgtcaactccatgtcctaaacagctctggagcctgtctcttctctctccatcttgctgtccttcctgacttcaggccacactcacctcttctctttatttctacaagaccttcccagcgcatctctctgtctctaggctctcccaccaaacacattctctatgttggaatgaggtttccaaagtccaatccaatcatgtcaaccacgctgcttcaaaacacttgaatgagagatctcaatttatgttgctctaaaacaggctctgcaagatatttattctactctagggtttatggtgctgcccaaagtttctttacccttcctccccagaataccagctccagtgccaggaaagaagatctgcatgccctgtggcagctgggaggagggtgcagcttcatgaggaggcagagctcctctctcttggtcttcggggccagtctctgaactcaccgggtcccctgcttcagtggctctgagtagggtaacctgtggcctgtttttatcataggcacggctctgtggtctgctgtgccccttgggtccccacagtggtggagtagtcatccattgtatgatcatacctcaatttgtttatccattctcctattgatggggatttaggctattctagtgttggagtactatgggtgaagctgttatgaacatagaccaacccctcccaaaacctcaaaaccagaaaccacccttgaattgcacctccttaacatggctgaaaaacatcttcagccttcatgatccggctccagcccagctagaatcagattgtctgggtgctaacccagcctggtcatatgctagccttgtgaccacaggcaagtgcctaacctctccatgccttagtttctttgtgtataaatgtagataaaagtagaatgtaccttgttatattattgtggatactaaacaggaccatgtacaaatatagcttcacataatacttcatacaaacttgatctttgttaattgttaattgacaattgttagttattatgcagaaccatatgaaatggctgatatttggccatttagacctaaaaaatgccaatttcacacgattcaacctgatactattattgctccactggtcctgctttagccatactgagttcatttggttctccaaacacacttctcccatcacccttcactgggctaatttctactcaccttcaagtctcagctaagatgtaggaggtcatatgcataaatcccccagactgggtaaggtgctgtgctacgcttccattacaagtctttgccccttgtaatgtacatatcatactattccgtacataaccacccactttttcgttcatcttcctaaccagaccacaaagactctgcgtgggagtgtccagctggctgtcatagaccagggcctcgcctgcagcctgttgtgtagatggtgttcaacacatgcatttttggaaggaggggttacatttttatgcagtgcgaaatgagaataagacgattccagaaattttgtgatcaatctgaaaacaatcaattttcttctctgcttacactttagtgtagccatttcaagaactgtgacctaagacttgaaagagttttttcatgagaaaaatgataatttggggagacaagtgaataaagagttttcttgctactgcaacatggcaacacgcattgtgaacgtctaggagggagatacaatgtatatatagcctttcctatacctatttgattgtgaaatacaacactttttgttatagagcatctagtagcatcttagagcaggggacctcaaaccccaagccataaacccataccagtctgtggcctgttaggaactgggctacacagcaggaggtaagcggcggaggagcaagcaaagcttcatctgtcttcacagctgctccccactgctcgcattatcacctgagctccgcctcctgttggatcagcagcagcgttagattctcacaggagccgaaccctattgtgacctgtgcatgcaagggatctaggttgcacattccttgtggaaatctaatgcctgatgatctgaactgtctcgttgcaggaaaacaagctcagggctcccactgattctacattatggtgagttgtataattatttcattatatattacaatgtaataagaataaagaaaacaataaatgtaatgtgcttgaattaccctgaaaccatcaccccacccctggtccttggaaaaactggctttcacaaaaccagtctctggtgccaaagattgaggactgctgtctttgagaatattagtgttcacaaaacacattttgaggaaatcctaatatagagtgacaacacagaccttgcacgcccagcaaaattcattatgctgatttccttagcaccagtgagttacaaaatacagctgccaagtctctagtttccaaatatcttgttctccagcttcacaagatggctgtcaagccagagcaaattttttttaagtggaaatatgtcatagacgtcttaatacttactttcctgagatgacctgtgtcggaaggtaaatcttatatgacagcgtgtgacttcttctatagcaatggatacctgtgtcatagtaagaaattaatagtttacagacacacagtactttgcaagcatggtttatttcatggaattaggctcaattttatactttccacagcacaaattactagagagtgagatttggtataggtttcattcaaaggagactgagctattttcaaatcaaaagaatctcagatcatcttgctgtttatcatagattctgagcatagggatactgtgaatttctagcattttctgaagtaagaaacagtaatacttcagaggggaaatactggtattttgaggtccacacaggatctttcagactgcaagatgtgtataaatatagtaataattggatctataagacctgattattccataaagagggggaaaggtaataattagggctcataaagcagttttctgctgcttacctatctacaggggagagaagaaacagagccttagggcactcaaacgagcagagatttgtggtgtgcagtcaaatcatggcatgattatactttggaaccttatgcaagtatctaaaatacatatctgaagaatttatatgcattgagataagtagttttaaaaagcacaatataaatttgtatcaacagcatcattcaaaacatatgaactatagaaaactgttgaaaatggttaattctaaattgagatatatgaatgcaattaaaaaatttttttttctatgaagaactcgtgtgacttcgacaaccagaaagagctgatggagcccgggattcagaagaagtggactctagtttgggccctgataccagtcagctctaggatcctgggaagtcactgaactttgaacttcagtacctaatatgaaagatggcgttacaacacctgcttgttctagttgcagagcccttgtggggctcaaaggagatgactgatctgaaaagcactttggaatgtgtaatacacatattgaagttgaaaagaggcccagaacacttggtgagaggccaaraawaaaaaaatgttaggaaactgtttgcacagtgtgaaaatttctgtttggttttgtaccatcttggcagtctattatatccatcacrtcaaccacaagctttgctattcaaattctcatacatcactgagtttcttaatgataaatgctcttaatacagaattataattactgattcatttcttactgcacaccataggcaacttatctaaaaatttcaaaataaagtaggaataatttgggggtaaacagaagataggaatctaactgaggtttaacagataacaggggttacaaatgactcattctcaccttgacagtctcataccaacagggctgcttgacttggtaatagactactgatttgtattctgaaatgccttcatatccagcaccagggtgaattgctttcttcagatggaaggaaaaaattagaagggaataattttgtttagaaaagtaagaggaccccatataccatgcacaagcccctcacccccaaacacgtccacacatgccctacactggcactgatcggctgattaagtttgggggatgaagaacagagaagactgaatttccaccactttattcaagggtctataatatcaatttggtagcagctaaggaacccagcaccgcctaaatattcttctttcctgtaacttgtattttctcttccctccccaggcatgcattctcctctgattctttcctcttctctctcagggaacatgacgatgacgagaagttaggtgacaactgcagacgcgccgctatttgcagaaaagcatttctcttttcctgtctacattctgttttagggacttagggtattggcacagcatattcactcaactcagggctgcatcttttcctggtcatgaaccactgagcttagtagaaccaggccttggtggggcactatcaaacgaaatgaccaaccaggagaaggtgtctacgtgaaatgagctcatgtgctcttatcaacagcacaaataaagcactttcatacagtggctcatagcattcagtttctccctctcatgcagaatacgacttgccttagtaaactgcctagctatctgcttccttaatagattataacatccatggcaagtga

SEQ ID NO: 96826 - DNA, 13883 bp, Homo sapiens
atattaaagaaccactatcaatctcatatatacatgtgtatatattatatgtaaatatacacctatgcagacatatgtgcgtgtgtgtttataaaactatacacatgagttatcttacaaatgcatgataagtataaaggactttctcttggagatgagctgggaaaaggttaatgtgtcacttctcatttcatacacttcaagacagaaggaaggaaaaaagatgactagaatttgatgtgtatgatttgttcacttgtttaagctttagagttgacataaggctaataatttcaggatcatagcatctaattaccattgcatttatgttcagtaaaataaaagtatgcagtgcaaaatagaaaaaaaataaagcctggtgaggatttctggagattttgctcttgtttggaagagaaaaataacagtcattaacacatgattagccatatgaaagcatatatttagacatgatctaagttggaaacacaaaggaaaaagattatccaaatcttgatcttgtgtttacagtaacacaaaagcagagcatgaattcaaacacttaatgttcatccctcttatggatgattgttccagtatttccctacaggttacagctgctcctggacatagtttttttttccaaattcagacctccaataactctaggtggcatttagctaaaacagctttcctaccctcttacctttctccctttttgtgcttaacactatgagggccagcacagcctcttcacattctattttctttcatttcttactttcattttactcaaaagaaagaaatctaagaactgacccagtaaataataatcatttttatctagagcatgcagagaataaatggctctgaattgtcatttattaatcatttttctttgttttctagtgataacatactgacaactcagcagtagataggtattagcatatgtggtggtcaatacaagtgatacagagtatggagaatagcagatatatttaggaagtgacccaagaaactctctttaatggaggttggatgttcattggatcttgagggaatgggaagatgtggattgacaagtcagagaaaatatccctcacagagagaagggagaggccaatggccctgataagggagaattgcaggtgacagcacaggagcagccaaactatctgcccttcttcagacaggaatgaagcagagctggtacaagggtggcacacgaccaaatgcattggcaatgggggtgatgtcaatatcctttgggtcaacctgagatttcaggttaaagttctgcaaaatggtggtcaggaataaaaacagctccatgcgggccaggccctctcccatacacatccgttttcctgaaaataagagacataggggatttgttccttgaacattaggtcatgaacagtcacaaagagtatgcagtaactatttgataaatgattaaatagatggatggatcgaaggcagaatgactggaaggatggctggatacacagaaaaacaaaaatgaatacacttcctatctacttaatatcttattttactaggcacccttcactcaacaaatatttatggagtatcagctctatgccatgcacttcactaagtgttcccacgttataactgctcttttgacactacaagtttccatcagtctttttctagaaatgcattcacagggaagatgggctgaaaagagaaggctcatatagtgtgttcccctttgtacttctggcacaatgtttagccaaagattttttttcctagtgtactttcaaaagtacatgtctaaacatgtcagtctctcattttacaactttaaacaacacccatctgtcctatgggataaaggccaaatggcttgacctgactcttcacattctgttcccagtctgatgttctatatcactccttccattcttcatctcctccactctcagctctaggcatatccattcttcatcaatttccaacacaccacaaagtttcaagctttatctcttgctgtcacatctgcctaaaaagctctactcctatgcttccttcagaagctatgccccatgtcatttcctctttatgatttctgtgatccctagtcaatagaaactcaccctctctaggtttcctcatcatattcatgcttccactggagcatagatcaccgggaattctattatctgtgtatttacttttctatcttgctaaaacgtgaaatccttaaaagaaggccttagttcttgacatctcagtgtatacagtgccagatccaaagcagggatcaaaagccagaggaaaaaatgaagggaactctatgtccacagactcaccacacactttagctgtagagattgaatatccaagatgtatgatcatgagtggagggagatcaaggtgctctggaattattgcagactatccttccacattcccagggttttcctgaccctgaaatttgttggtaggttctgaccccctagatctacagaaaatgtcctgctactatggtccattacctctgtaaaagtgccttgccttctcttcttgtcctgtttcctgctgcaatgaggcagcttaagtttccttcctcttggaagtggtatggcctatgaatgagcaggaagcaggcagattcccccactgagctccccaacatcctgcgctttcccctctggcagccttcctcctactagattacaatgatctgtttacttgtctacttctctaaatcaggagtgagcctcttaagagcccattctctgctctcagatacttgtatctccagagctcagtctagggagctagggacaccacagggaagatattcaaagttgtggaattagatacttttctcatggcagatgagaaatgtctaaataagtttcacccattaagaagagctcttgggtagctcagtgatgtatctagaggcagaattaaattaacctacattctagctttttcagtttgaaaaactggatcaactccccaaagccccactaacctggcccaataatggggatgttcatcagcagggaaatcgcatgggcatagggaatggtgctaatgatctgcaaagcaattcagccaaacctcagaggtggcatcatgtaagagtcaactgatcccaaaaaggtatcatgtgccctgaaggacagatggaaatgaatatctattacctgctgagaaaggcatgaagtagtcacttttcttaaagttgccactcttatccagaaagtggccagggtcaaacatctctgggttggggaattctttgtcattgtgcagcacagaagtcagggatgttattatggtcgtgccctgaaaatagcaaaacagacaaactaagttataaagaagtcaaagagtgggaagaagtgatggaaatcacctagtccaatctcttttatcaatagataagaaaattgaggtccaaagaagttacattcccacccagacagacctagtaagaagcagtatgactttaaggcaagtggcagtgactttgctgaagtcccctccaattaattgcacttgaagtcctgagcatttgagtactcgggggcagccttctgaatcccggtttatcatcaagcttggaccctggtgtacatccccacttgctgctgtatttcatcacttcagttttcacacacctcacacatggattaccttttttgttgttgtttgcaggactgttacatgggtatattgtgtgatgctgaggtttagggtacaaataattccatcacccgagtagagagcacagtatccaacaggtagtttttcaacccttcctccccttcagcccccatctagtagtccccagtgcctattgttgccatctttatgtccatgagtactgatgtttaactcctccttgtgagaacgtacaatatttggttttctgttcctgcgttaattcactccagctgcatctatgttgctacaaaggacaagatttcattcttttttatggctgcatagggtttcctggtgtatttgtaccaccttttctttatccagtccactgtggatgggcatttgggatgattccaatcctttgccattgtgaatagtgttgtaatgaatatacaagttcacatgtctttttagtagaatgatttattttcttttggaaatatatccagtaatgggattgctggatcaaattgtagttctcttttaagttctttgagaaacctccaaactgctttccacagtagctggactaatttacattcccaccaagagcctataagtgttcccttttctccacagccttgccatcatgcattgttttttgacttcttaatcatagccattctgactgatgtgagatggtatcccattttggttttgatttgcatttctctgatgtttagtgatgtgaaacattttttcatatgtttattggccacttgtatgtcttttgagcagtgtctgttcatgtattttactttttaatggcattatttgttttctgtttgttcaattgtttaattaccttataggatattagacctttgtcagatgcatagtttgcaaatatttcctcccattctgtaggttgtctgtttactttgttaatagttacttttgttatgcagaagctctttagtttaatttgtaactaaattatcaattttaagtaacatatcaattttttttcattgtgattgcttttgaggacttagtcatgaattctttcccaaggccaatgcccaggatggtgtttcctaggtatttcttttgcaattcttatagtttgatgtcttacatttaaaactttaatccatcttgagtgcatatttatatatggtgaaaggatggggtccagtttcattctgcatatggctagcctgccatcccagcatcatttattgaatagggagtcttttcccattgcctgttttttgtcagcattgtttaagattagatggctgtaggtatgctgctttatttctgggttctctattctgttccattggtctgtgtgtctgtttttgtaccagtactacgctattttggttactgtagccttatagcatagtttgaagtctggtagcgtgacgactccagctttgttctttttgcttaggtttgttttggctattcaggcttttttgtttccatataaattttagaagagacactggtagtcggataggaatagcattgaatcagtagattgctttgggcagtatggcctttatttttttattttattttttttttgagacagagtctcactctgtcacccaggctggagtacaatagtgtgatctctgctcactgcaagctccaccttccgggttcacgccattctcctgcctcagcctcccaagtagctgggactacaggcacttgccaccttgcctggctaactttttgtatttttagtagagatggggtttcaccatgttagccaggatgttcttgatctcatgaccttgtgatccgctggccttggcctcccaaagtgctgggattatgggcatgagccaccgcacctggcccagtatggccattttaacagtattgattcttccaatccatgagaatggaatgcttttccatttgtttttgtcatctatgatttctttcagtagtgttttgcagttttccttaaagagatctttcacttccttggttagatgtattcctagggatttaatattttgtggctattgtaaatgggattgcgttcttgatttggctctcagcttgaacattattgatatacaaaaatgctattgatttttgtgcatttattttgtatcctgaaactttactggtcatttatcccttccagaggcccttttggaagagtcttcagagttttctaggtgtagaatcatatcatcagtgaagagagatatttcgatttattcttttcctatttgaatacgttttctttcttcctcttgcctgattgctctggctaggacttccagaagacagtttttaaatagaagcctctaaacatacctggtcttcattaattcctctttggaactgggaaagagatccctgtggctattaaaaagtggggagggttcttatacaccactaattatgaagcaaaaggtttatttacttaaaatgtcatttaaagatacttaaactgcatgcaaactttatttactgtacagagttctggatgtatttatcaaacagaaaaaccacccttgacttggttgttcacctgttttgtgatttcccttgaaaagagaaatgaattgtcatagctattgatattttactaggtaatgttctgttacactgaaagggatgtttttaaaaaacattatttggaaacaagttttcaagtagggggacagttgcttacataatatcttgtatattcacatcctaaaaattttcatttatgagtatgggatgtgtatatatgacttagccccaagttaactgtgctgattaacaagtacttataaaaatagctaaaatagaaaattaatgatcagttgtactagaggaacatcatagaagagaaaaatccaactctttatattaaaaatgaatacaataagaaaactgcaaaagagaccaaaatgaacgtgttttgtaaattgttacaggagcaaaaacttctcaactagttttcaacatactttagatttaaatgttgtttggacagttttgtcttcaacttggaccagttgtagattgttacaggcttcctaggatttagcattcctattttctctaccaaagtttttttagaagcatcccaactcttctctttgttgataaataagcctttcctgtcatcttcattttaacttgctaaaaccctagatacaaaagtcctccctcatttttcccacgcagcccctgtttgggaatttgagattctgggtcatgctggtgttcctttcagaagtgcttgaaattgagttctcttagccactggacacctagttttcagaagaatgtcccaagattgtttatatatacaaaatggcaaaattactgtttttcgaattgataattcaagcaaaaggcttctctttaccatcactggtttttttygtttttgttttgtttccttgtttctatttccttgaagctttgaagggaggagaagcagaaaattttgtttttgttttttaaaaatcagaactacttaatgctttttgccacagcatatttccttgcctgttggagctgttaggaagattacccatgtcctaatcttcaacctgagaagatttttgactcttgtgtctactgttgattattttcttgagttctcaaagacctgtggccaggtattttaaaaagtcatctgtttctttctagttgcatcaacttgcacactggtgtctacctatatgtggtattcggaacttawaattcttattgagcagccattgcctatattttctcagctcctcactgacttctttatatgagctcagctgacaagcgaatacagctatttggttgccctctcttcataytggaccatcaacaacagtgttctaactcatccatgatggtctgtgagatgcagactattacacaagattcaagttactcgtaagcaacttttagatagagttggtcctgttaggaggagactcttgatgtcaccttcagtatcttgaaagcgggtcccctcccgaggctcttaatttttggaaaacttgatgctgtttcagctgaaaaattagcaagactgttaaaaaaamaagttgaggggagctgtttaagaaactgaaaagtaattgcaaactacattgggtaattgtgactttcagttgttgttctgtatcagttgaatttttgtgctcttttccctgtgtacatggtggttctatctccaataaaacttttgttaaaaaaaaaaaagtgaggagaatttggaatctgttcatagggttttttaaaatggaggtctgatctaattaaaaatgacttctgagatgatatcaacaagtacactaaaatttattgaggggttgatcacagaaatgctatatgtttcttttagttaaaacacgtgggggaactcttcatcagagatgaatccaacctaaaaaacacagaaggaaggataaatttagaaaaatcatcatttttgcagccattcaggtaggaccatagattcgggcaaggatcatcaattaactttaaaactactgggtaaattatttgggaaagtaatattcacaggatcttaaagtaccatgccatctttttattaactgcatatgaaaaacagaaccccaacaatggagagacctagcagatacaggcttacaaaatgtggaccgcacatatgatgcaatggcacgtatataacatcacctatgtaactttcttgccaaaaacacataactggaatctaattgtcaaaaaaaaattctaacaaaaccagactgagcaacattttacataacaaggggacaggacttttaaaaactgtcagtgtattaaagtgaaacaaactaaaaaaaactgttcgtgatgaagaaggattaacaaaacaagataaccaaattaaaagcttgttccttgactggactacaggaagtccatcaaaaaaaagctataagagatattttagtataactgggaaaatgtagttataagatattagataatattaatgtattgataataattccttgagtgtgaatgttattattattatgtaggagaaagtccttgtttttgggaattatatactgaagtacttaggtgttaaatgtgacagattagattacataggtagatagatgatagataaatgcagataaatgtatagattaaaatgtagatgtatgcacatttccatatattatatgtatactatatacctacacacacatatattcattctagaaagatattatgctacataatagttgctacagattttctaacactcccaataatgtggagagtggggagataccatataattgaatacatgatatttcttttctttcctcttttttttttgttttttttgagacagggccttgctctgtcacccaggctggagtacagtggtacgaccatagctcacagcagcgtcaacctcttggacaccagcaatcctcccacttcagcctcccaagtagctgggactacaggcacatgccactacacccagctaatttttttattttttgtagagatagagtttcactatgttgctcaggctggcctccagctcctgggtgcaaatgatccttccactttggcctcccaaagagctgggattacaaatgggaatctccacacctggccttttctttagcaaaacattaatatttatacaaagtatgataaataaggaaaataaatacattcactccacgcaagtaaatgtttagccaaatgaaattacacccaccttaaatggtttttaactactcaggcttttaatattacataattgagaatgagatatttctaaccctgtattacagaaaattaaacaatcagatatgtgttctgtagcacggtagccatgaatgatccatggctatttgtatttaaatttaaagtaatgaaaagtaaataaaattttaaattcatttcctcagttgcattcattacacttccggtgctcaataggtacctgtggctagtggattccatatggcacaatacagacattcagaattccctcttccctataagatggcaatagtgatttcaaccttatcaaactccaatcctttttcctctcaaagttaaattttcattattttatttctttataatggcaatatgtactcgcttcaagtggaatggagcagcttgcagaatagcaactaaaaagtctcaataaacacagaaaccatgtgttagaaggcactggaaaagatgttgagacaaaaattactcaggcttgcaggcatgggggaactcagagaggttacagtcaatttttgatggctacagtcaatttttgactgtgtttcgtatgtttattgtggcactattcacaatagcaaagacttggaaccaacccaaatgtccatcaatgatagactagattaagaaaatatgacacatatacaccatggaatactatgcaaccataaaaaatgatgacttcatgtcctttgcagggacattgatgaagctggaaaccatcattctcagcaaactatcacaagatcagaaaaccaaacaccgcatgttctcacttataagtgggagttgaacaataaggacacagggagggtaacatcacacaccagggcctgtgggggatgttggggctaggggagggataacattaggagaaatacctaatgtaggtgacaggttgatgggtgcagcgaaccaccatggcacgtgtatacctatgtaacaaaactgcacattctgcacatgtatcccagaacttaaagtataataaaaaaaaaattgaaaaaaaattttttttgactgtgttgatatctaattctgaatgaaggtagaaggtgttgcataattctgtctgcctagcatgggagggatgaaccctttctggaagaagatgaacctcatctgacattctgcattttttcatacatcataactggcacttaaccaaaatttatgagtcactccaaagacagaactaagtgagcacaaaaagaatagagaagggagaaaagattataaaaacaaccacaatacagaacattatcttccttattttacgaagccaacatttcctcaatatcagaaatctgacaagaaaattttgaggaagaaaaattgcaaaccaatgtctcttgtaaatataagttcaaacaccctgaaaatcatagcaaataaaacccagctgtgtatgtctctgtgtgcacatttgtgtgtattttaactaatatatatattatatctatagacaggacaaaatatatggccatatcgattgatgcagagactccatttgatcaaattgtatacacattcaagaccaaaaaaagtcatcaaaagtagaaggcaaccttctctaatctgattttttacttatgaaaatatacataaaacatcattctcactggtgagatgttaaatctccacccatcctgaacatcatatatgaaacaaggatgcccaccatcatgatttattcaacgctgtcctggaaatcctaaccagtgaaataaaacaataaagagaaaactgagttataagaattgaaaaataagaaataaaataaatattaaaagagaacacagaatacatagaaattacaaataaatttacaaacaaaaaattagcaatgccaagtaaatttgcttgatgtaaggtcatcaaaataataaagtcaattatatttccatgtaccagaaacaaagaaatggaaaaggcattttttttaaagtatattatttaaaagccaggtgcagtggcacacatctctaatcccagctactcaggaggaagaggtggaggattgcttgagcccagaagatcaatctgtgcaacatagcaagactctgttttgaaaatatatttttaatattatatatatttatttcatattatatatattttatattatatattaaatacacaacttacaattacatagaaatatcatttcagaaaaaaaacgtaatacatgagaaagccactgaactgaagacaaaacattactgacacaatagaagaaagcccaaataaataaagagcataatcatatccatgaattgaaagattcaacctgtcaggacatcaattatttctaaattgatctaaagatttaatgtcatcatgataaaaatcccagcacagtgttttgggaaattgacaaaatgatactttcaacacttacttggaaatgtaaacacctgagaatagccacaaaaaaaaaatactaaagaagcagaacaaatttggaagacatacactgctagatactgagacctgttataaaccttcataggcccaaactggaatggaaacagcagagtccagaaagctgccccacgtatgaattttacacttctctcatcatgtgttgttagaggattgggactatactatgaatttggggacttgaagagcatggagatgtagtgtaggagaaacaagcttaccttggggatgaggtagtttttgaatttaacatcacaggtcactgcatggggcaggttggtggggaggaggtcaatgtatctctggatctcgtgcaccacagcatctgtgtagggcatgtgactcctgtcctgcatacaggggctccggtttctgccaactacacattcaatctcttcctggactttagctgataagacacaagtaagaaatgatggaaaaggaggaaaatggcacatttgttgtagcaattcaggttacaagaagcataaggaaggggtcccaacatcattataaacttataggactgaaagtacacctagacttagggaagaaattactacattatagatacatccaactctcctacaagctaagtattaagataaatctgtaaccacctacatattagcatacaagataatcagtacaaatataaatgataaaatacttcaaaatataaatatttagtacattataaactcaagaaattactgttcttgaagaaagaaaaaaatcaaattaatgttgtatcagaataacatataatgttttaaaactttaattctactaacagatctatatgtatggatggatttgtgtattgtgtgcatatgtttatttgaaacttgaaatgatattctctctcatcctcacactccacaaaggtgactatgttgaaacattctagaagtttcttctgaagtttatattcatatttctaaatactgactctctttttattttttaatttatctttgaaaatttctaaaacctcatggtaagaaagatgaggacttatatctccatcatcaccccataacaaatagacacacacccacaaacagaaacatgcacacacattcacacttcccccactctagtttccccaatgtatttatatcacatttttattatattaatactcatgttcacaccattattatttcataaacattgaccacaagtgggacagctgtaattatgtctcttttttgtatattcttggacttgtgtgtccatttcaattctaattttcatatgccaatttagaattactgcaaatgctcagaaatgtttcaaactcttactaataattttctaaacactaaaaataatcaaataatcaatcaacttttctttgcccttaatgtcttccctcacacctccatgatccacctggtccattctaaagcatttgttttctagacctggtatccagcagcctccctgacacttccatcctcctacatgagatctcctgatccctgcagcccatgatttcccctgaattggtttcagacatttggatggaaaatattctctagtatctttctaagaaaataaacacaaagggcaaaaattttttgccaaatgcagatctgaaaatattctttatctacaaatacacaagatgacagctgctcttgagaattctaatgccattctgattcctgatccttcacaggtgacctaatttatctctgaatgtttttatgactttccctttaactctgatgttctaaaattccccatggtctggtgtcttggatgaatattttccatttcattcactttgctggacatttggtaagaattttctatctaaatggtgaaaaatggaggtctttccactggtgctacttgtcctctggagtttacacctggctgctgtattttaggaacaagatagaaaaaggcgctaaaggccttagaattcaagtggactcttacttaacccctcactctttcccagtctctgtctgttgtccatgagtgagcctctt

SEQ ID NO: 96827 - DNA, 13767 bp, Homo sapiens
attttgttttcaattgatcttatttgaatcatctctctacttttcttggttaatctcactaatggtgtatcaattttatttatcttttcaaaaaatcagctgtttgtttcatttatcttctgaatttttggactgtttgtttcaatttcatttagtctgctctgatctttgttatttcttttcttctgctggatttgggtttcgattgttctatttaactccagttccttgaggtataaccttagattttctatttgtgctctttcagactttttgatgtaagcatttaatgtaatgaactttcctcttgcaccacttttcctgtatcacagaggttttgataggtggtgtcactattatcattcagttcaaagaattttttgatttccatctggatttcattgttgacccaacaatccttcaggaccagggtattttatttccatgtattttcatggttttgagggttctttttagagttgatttccagtttcattccactgtggtctgagagagtacctgatataatttcaatttcttaaatttactgaaacttgttttgtggcctatcatatggtctatcttggagaatgttccatgtactgatgaatagagtatattttctgcagtcattgtgcagaatgttttgtgaatatctgttaagtcaatttgttttaaggtataatttaagtccatggtttctttgttaactttctgtcttgatgacctgtctagtgctgtcaatggaggattaaagtcccccatctatctcatttcttaggtccaatagtaattattttataaatttaggagctcttgtgttaggtgcatatatatttagaattctgatattttcctgttggacaagtcctagtccttgtatcgttacataatgtccctatttgtcttttgtaattactgttgctttaaagtttgttttgtcccatgtaagagtagctacttctgcttgtttttggtgtgcatttgcatggtatatcttcttctactctcctgaaaatagcacatacttggttggtgaatgcttatccatcctgccattctgtatcttttaagttgagcatttagcctatttacattcagtgttagtattgagatgtgaggtgtcattctattcatcatgttcttcgttgcttgaatactctcagcatttgttttctggaaaagactctatctttccttcatttatgagccttagcttcgctggatacaaaattcttggctgatacttgttttgttgaggaggttaaaaataggaccccaaccccttctacctagtagggtttctgctgagaaatctgctgttaatctgtcaggttatcttttataggttacctaatgcttttatctcacagctcttaagagtctttcctttgtcttgactttagataacctgaggagtatgtgcctaagtgatgatctttttgctatgaattttccaggtgttctttgagcttttagtatttggatgtctagatcactagcaaagccgggtaagtttttcttgattattccctcaaatatgttttccaaacttttagatttctcttcttcctcaggaacaccaattattcttacttttggacattaacatagtcccaaacttcttggacacatcttttatttttaaaaattcttttttctttgtctttgatggattgggttaattcaaaagccttgcctgtgagctctgaagttctttcttctgcttgtttgattctattgccgacactttccagtgcattttgcatttctctaagtgtgtccttgattcctagaagttgtgattttttaaatttatttcactgaaaatttttcctttcatatcgtgtatcatgtttttgatttctttaaattggacttcacctttctctggtgcctccttgactagcttaataattgactttctgaattctttttctggcaattcagagtttattttcttggtttagatacattgctggtgagctggtatgatcttttgggggtgttaaagaaccttgttttatcatattaccggaattgtttttctggttccttctcatttgggcagaatatgtcagagggaagatctgggattcaagagctgccattcagattcttttgtgccacagggtgctcctttgttgtggtgttctccctgttcccatagaaatggggctttctgagagctgaactgggtagtaattgtttttgctcttctgggtctagccactcagggtcccggctggtactggggagtgtctgcaaagagtcctgtgatgcaatcagtcttcagatcttgcagccgtgaataccagcacctgcttcagtggaggtagcaggggagtgaagtggactctgtgagggtccacagttgtgtttttgtttagtgggctggttttgtgttagttggcctccagccaggaggtggacttttaagagtccatcagctgtggtcctatagggaggatgcaaacttgccctagggacacctggttaagtattcaggaatctcagatggtgatcagggctgtagagctcccaagagataatgacctttgtctttggctaccagcataggtagagaaagacctaccaggtcgggggcacggataggcatatctgagctcagcctctccttgggaagggcttcctgtggctattgtgggggatggggcgtggttcccagttcaatggagttatattcccagggggattatggctgcctctgctgactcatacaggtcaccagggaggtggggaaaagccaggagtcattggtttcactctgctcctctgcagtcggtagtcctaaaggtcaatttcactcccacttgtggtcccctaagagtaccatgtctatttccaggcaactgctgactagggcagagaatttgcctcagaacacaaacctcgccattgagaaagcaagcagactcaggtttttggcatctcaggtagcctgcatgggtgatccagttccttcaaagagtctgtggattctctcacctttcctagtatgttcctgtggtagttcttggagcaaaggactcacaaaaatgtgagtcttcacgtgctgctctgtctgaccaaatgggagctgcagactttagtcctgtcttctatccatcatcttaatcttcagtatccaattttagacactccttatgttgtagttatcagagtgcttctatagcgtggaagccttacaaatgcactctcctggacggcagagaagcccagagatgtgaggcagacacttggaaccactttttcgccaaggatttgctctgaggagggtggagatctgagaagctgaacagtcatctgtggttgagaagtaagaaacttaccagcgttttggacaattgcacagagttgatgagaggacataaattggaatttgaggctaacctgggagaaggatcctggattccacaccaaaatttcagttgggcccctgagaggatatgccttaggttaggtgaagagaaaatatgccggcaatcacagtaagtgaagccagtttcaaagcaagtcaatgtccatttgtattaaggttacctgaacactgtttaattgattcttgaagcaaacatttttggatgaaaaaacaatttgagttttaagttatcttgcaatgttttatacataatttcttgctctcatgcaaaaataatcaggcatgcagcaacacaataacagcagcaacaacaacaacacacacacacacacacacacacacacacaaactgaaagcaaaccaaagaaagaaaagaaacagaaatatcacagtaaaactgccaaaaacaaagacaaagaggaaaattataaaggcagcaagaaaatagaattagagaagcccgaaaaaagaatgtaaccttcaaaaaacttccccaaagaaacaatagaagccagcagacaatgggctgaaatcattgaagtgccaccctagaaccccagaattcaataccttgtgaaaatatcattcataaatgaagataattgttaatttctgaaaaacaaaaactggaagaaatcagctgtgtaagtcccgattaaagaaaatgctacaggaagatttttttggcactggaaaacaatcacagatagaaacatggggataaagaaagcagagggaagaatgtggcaggcaaatttgaaggtggattaaatgaaattgactaaggaaataattatatgttgtagaactttgtatataatacttatgcacaattaagtacatattatatatatgcatgcaccttaattaaagcacatatctacaataaaactaaaggcatggggaaataactggagacaggtgttctaagaattctgagaccccgatattgtctgaaatctggaaatattctgggaaacacactctgtcttatattagtcctgtattttattttatcattaatgagttaagtgtatcttataaattttatatgagttgtcaactaaaagtaaaataataactagcaaattatccaaaaagaaaacggaaattgattaaaaaacatataatacatccaaaaaatggaagaaagaatgaaaaaattataaaatagaaaagactctacttaaacacacgtcagtaattagggtaattataaatgaattaaacaacatattttttaaaagtttgtcacactggttttaaaaaatatatatactgcctattactatcaaaactccatatagtaaatataaggtaggtagagtagtatgaaaaaaataaacacaatgaaaacatttatcaaaatagaatttgcttaccaatatacagagaaactttaacctatgctggcatgtgatttgcattaaaaaaaaatagcaattatttttattacatctcgagtttgacctcgagatgttattgtctgggtttatttttcattctctacccttcacaatgtttaatttttctcccacattgcttatttcagaattttctcattccagaattatctgatattgatactaccattgatgtatttattagaattctgccataaattcttcataacaaactcaaaatctcaatggcttacagaaagtttttttttttcttttttacttatagaaacatgggcttacatattccccatgagttcctcattctggaattagcactagccttggttatgctcttttcaaggcagatggtagaagaaatgtaagagcttcacaagcacattttaagcagaaactcatggcatctcctaatatcctattatcggccacaagaataatttggtgaagccttcatcaatgtgatatgctggatggtctgtgttctctcctggaggaactgcagtcacatggcaagtgttgatgtatcattttattacaagaagggagtgaagagatggaacaataattttatgtattacatttggcaaatttacctttacatttgttcaattgtcacttccataagaaatcatgtacacaatcccacagtgtaggcacaatacagtaatatattccagcagtgtaccattttgtcctaggagttttattgtgtttcttgcccatacatacacatttgttgagaataagctctgtgtagatgtatatgtatgtgcaatttacatataagtttatataaattacatatttttaaaattagttcaatatgattataatgtgttcattaaatacttgaagaggcttgtccagagataacgcattatctcaattgattgttcacagtcacagatcgaacttctgttctactcttttcctccttctcattattgcacttgactagtcttaaaaaaataaaaataaaaaaataagtacttgttaaggaaataaaatttttgagatggagtctcactctgtcacccaggctggagtgcagtggcatgatcttggctcattgtaacacctacctcctgggttcaagtgattctcctgcctcagcctcccgggtagctgggattacaggcacccgccaccacgcttggctaatttctttttttcatataagaaaatggttttattcctaatttttagttcccatacagtttacaaatacacttttactgtgataatacagctttgcaactagcaaagctgttgcactaacattcataaatataggtggggagaaaattagcattcactaatatttctctacatmaactattcttttaatgtcattttttaaaaaacagttgcaaatagactacataatatacttgrgcaaaaargcaattaagtgaatytcttgaaacactaaatgtatgataaacagcatattatcaacatttacatgagtcacatcaaaatgatgacatcctaaaacatattccttttaaaggatagatttatcaataaatattacatatcttttaatactctggtacaatacttcatatattgcaggaaaattaattgtaggtctagtcatcagcttaatcagggatccttttcccattagcttttattaataaaagaatcacaattaggtcrtaaataaacaggcaaattattaattacatgatttgaggcttatgatgaaagcttgtcaaaattagtttgatacacagcaaagttatacracacactaaaaccaactgttcaatggtttytgccttgtgtgaactgcccgtagtgaaaaacaaacaaatttttagtgatgaaagatactataaactatagtttggaatgtttcaagaggaagaaggaaaaaagatttcaacaaaattaagggcaaatacagatcctaacaaaggcatcctgacatcagggaggccacgtgcttgctatatgtgaaacttgagttccccaacaacatacagaaaacaaaagctgcactggctttgtagttatgtctgtagtctaagtttcccttatggatactaagctacaacaaaacacttcaaaattgcaaacctttccacatcatcctgaattaaaaaaactcaagatgctattggttcttaaaatccccaataaaataacctctaaaaataatattgaccattttcttggcttccccaaagcaaatgggctctttaaagaatgcacacacaccaagaaagtcctacccatgttttctcatccccaattagccacatttgaaaagaccttgatttcagtgggagagatgaccataagtttcagaagggccacacacyagacacgaagtgmcttttagtttttctttttttttgaaaaagttactaagactgtgaaatttggctttttttaaccccaataccatgtgccagataaatctttcaccrcgaaatataatatcctatgcttataattttaaaatcctcagtgagctatggaatattgtgcatatttaatacctaccagaaacctagaagtaaatggcatccatgtgtctgtcacaccgactttccaaataacctgattcacccattgctgactgctcyggccctgggctctctgacttcctcagaaaccacctctttggaacttgcatttccacaattttttttaaacttgcacctmgagctttctccatcatcccagcctctctgcctgattccatcccgtgtaaagtaaactcttctgagaacttgcgatcaccttttaccaaacacatgataagccttagcaatctagggtctatgataactctggccctggcctaagttcacataagaacgtgatagtttgttgacctcatggagggaaatctaaatgaaatcagtatcttgtaacaaacaaagctagccaagatcaggtatttccattctgagtataaaagcaactgatcttaagcaacaggcagagatgttaatgcaggagatacatttgcacaaactcttgtgtgctggtgaaagactttacccccaaagtcaagtcaagacaaaaccaaagcaaaatggagagtgagtatatgtaacaatgcaataaaaagaacaggattcaagcttcttgctgcaaatactgaactgaaatctttttctttacaagtttgactagaagacagcagtcacaacatttccctaataagggaataccttcaggccacacctgtgttctgaagcaattcaaagttcaatgaatattggggggcggggtaggggctgatatgtattttgtcagtgagaatggcagccaaactaccttagagtgtcaagagactgagagacctcagaaagcaactactaccagggctggatctcggccttcctttcaggagccacagtcagaagaatccaaggagaccataacttcacggcaaagatgccatagcattttattaccgttacaaaagacaaccaatgatgttttcattgaaatatctgcattgaatgatgattcaacatatgaggcaaagggatgtctttggagaagggacttaaggtagaatattagcaaatcttaccagttggctaaaacaaaaatgagcttgttcaacctggctggaggcctgttagggctgttccttctcactgtggcctgactgaaaaccagtggcattaagaaagagtcacatttcccaagtctgggggtgccccagtggggtggtgctgctctcaaaagccctgagcccctaaacacatccatcctcacaagatcagtttccccatgtgctgtttccaaaaataggctcagggttggcagaaatcattcaggaagcttcttgaaggccctttcttcatttctcagtctgactttcagcttgtcccagctactgtaagcaacttcggcttcccaagttcactagcaacttctacttttgctaatatccttggttttccatggccaaggttgtggttgtgaccatctgttagactagtggccccccaattagctgtaactccatttcacacccttttcttgaatctgggctgggcttgtgacttgtttagtaagtagagggcatactccagctctcttctgattagaaaaaatcatcatcatcaatagagggcagtaaaaggaacactgtgacaattctgcacttaagtcttcagaaggcctggctactgtgcttttgagctcttgggagctctgagctgcatgtgagaggtctaggtaccctgccagccaccactggctccatgaaagagactacatggagaaggagagactcaggactgcaggcagagagataagcccagccatcccagtctctccgctgacctgctaaccacatgaggggccacctgcaggctggcagaagaacagcccagctgagcccagctcagattgaagaacagttgggggtggtgattttttaagccactaaagttttagggtaagtttgtcagcaatacttgacaaccaaaaacactggtcattcatagatgccttttttctaagtacaagacaattactcaaatgcaaagaaaatatggcaaacgttttcccaccacaaccttctcagtcaacagctgaactataattggtcatcgactgaaaaaaaataaaaaagccacgcctcttatcttagttcataaatatccatgattcttttcctatgactctttaatgccaatgcaaaagtagaccagtcagcttctgacagtctcaggcactggcttagttctcatttggccaaaaatagaagccatcaaaatgaattatacactactggatacatgacggtaaatgagattgttctcacttttctaggatgtcgttacttaattttcccagatcatttcttcttatcatcccccacaatgaggaaaaaaacttaaactggttaaggttataaaaagaaaaaaaaaagcctattactagaatttgaatccccatcatctgcaaaatacagtgcacaagttaactgcttcctcaatttaaaacaaattctataaaatataatgttgtctacattgaagagatgatttcttcttatctgaggaaataagtaattgggaagcaggtatttttgagttaaaatacagtgatctttaaatggtttcaaattttgcttatcaaaaggtagtcaaccacaatgcaagccttccagatctaaattctgtcttcacataaactttcttgcatctgttcttgatcttttcagagagagggtgaaagtccacttctatttctgtgctgaagttttggcaggttttctcatctgaaacttttctgctgctgcatcaggcccacgttttcagactctagcactgtcttctctcatttctgcacagggtggcgttggagtacaaggcaggagggggctctgatctccactcttctggtccgctagagaatacttaatatttatatattcgtgccctttcctcttgcttttttgctcttcttcaatcctgagctgcagtgtttcaatataatgctggactgccgtatagataaatcggtactatgcttctgtctggaccatccctgacctctgagaccgcatcatctggatggttttgggaacgtcaatgttgcagtcaacacctttctctctgacgatgtcagtaagaatatcaatcacaatgaacgtccctgtcaggccaattccagcactacagtgcaccacgaccggccctgcatccgtgatgctcccctgcttatggtacacctcctccaggaagtccagcacgaccccggggtcgctgggcactccatggtccggccaggtccgaaagtgatattgcccgaccgttctctccatattccctggtccaatctttgaaagttcaagttctcttagtgtatagtcatgagctgcgctttctttgacgttcctaacacgcatgacgccatattcttttaaagcatactcatcaggccagtatttgacacatttactctttcctctatccacttcttttgttgtcatgacaatcactcgggagttttcttggaacttcatctgccaaaagtcattcactgtgttttgctgacagccttgtgtggcaatgtaacacgttttgggctttgaattgttgcacctggtttcaaattcaggcatgatggtatttgcactgatgtaatctgaaacaggctcatcgggatcaccgtcgtgtaggacaaccctagtatgatcaaagggtaggatgtttttatatctatttttgtttttgttttcttgcctttgaccctcttttcggctgtagagaagtttgcactcctgttgttgtagtgtctcaaatttttcccaaaagccttgtttgactttgtctgtggtctcagctaatttgcttagttctcgaactctgctttctatttcagcagcatttatatgagtcgtgttaaggggatgcttgagttgtagtactgtacccaaggtttccaccatggaattcttcttgtaatgttcttcaagatctgtcaaagaatcaaaccgttctcctccaccaacgtcatatttcagttcctttcagaggtataatctgcacagttcagaagatatttaagctcaataacatctccattcttctcttttaattgcctatgatgttccatgtaatactggaccaactcagccaaagtggcacatttctcctctccatagaggtcatagtaatcaccagtgctctaaatgtgggtgacagctccatttcttctaatggaaagtgtgaagtctccagggttacttttattaggccttgccaaaacactgccatcaactcctcttgtcaacagtaggttttctgcctccacaccagtgatatttgggtgaaaccatctccgcgatgtcatgttcctcccgccctccagctctgtgacggacccgctgcttgctcaggctccactgggctgggtcacatcgggctagcccaagggaggcctactcgggaccagacgaggagacagagccagccggctgtgcacagaccccctctccaggcctggggatcccagagactgtgcagccgcccccccgccgggtccggcttgctcctcctccggctaatttttgtacttttagtggagacggggtttctcacttttggccaggctagtcttgaactcctgaccctccttgggcttccaaagtgctgggattacaggcttgagccaccaggcctggtcgggcctctatttcaatatgatttttatttggatggacatctggagaagcctatactgtattatattgctttgctttccataactaattatagaaatatctatattacaagctgtatataatttcatgaatttcaaataaaacactgaagatctgagcatgggattcaaacatacaaaatagtaattgtaatatccaaaattagaaagatatggattttctgttattggattatctgactatatttttcttagcttataggaataactgaagaaaattatggtgtattataggatagacaagattttcctgaatttccaataaaattctagaggctctcataagaagaccaacaatgtaaagtagtaaaactgataaattcactactagaaaaatgcaaacttcataatgatattcttgccatttgatagaattgcttttgtacatctatacattcagagttttgttttctgaactggttatgagaagaaacagaatttttaggaaatgaaactttattttccgcagtattttagttttgtacattaaaattctttcacttaaaatattttgtatttattttctagcattttttcttcttctcatacttattatgtgttgactcaaggggtacctgataaaacagatacaattgattactcctataaagatctgtatgcctcgaaaagtagaagttgccttactttttcataatgtttctttatgtttgaataacacttacatgtaaagattacatggtgaatacagacaagatagatcttatataatctattgttttacagaccttttaatatatacttctgagactaaaaagtaatacctaatatttatgctatctattaggccatgtattagactcattgcttcatgaggatcctcctagtttcatgaggatgcataagtacattttaggcatcactgcatttttaatgcctagtattgagacaacagtatgggaagggctcaatacgtagtttttaaatgtataagtctggtgactaatttcagcaggaaattaatgtataaatatttatcaaaacactattgagcccttaaagttgtcatgattttttataagtgttgataacaaaaacagatgtgactttggcctactttgtactaataatccagagatagaaaagcacattaaacacaacagacactataaatgtgtatccatcattactgctatataaaggaactaactctttgaggacttatggaagtaagatttgacataattatgattagtgaaagtggaaatcaaataatggaatataatgcattaatggttgaataatcaaaaaaccagataataagtggggcagcatagagaagccaagacacaggaaatagcacatgaagtgtactgtgatatgcaggggcattattaatgagtacagagactcccgaaagtaaaagatcagagatgacaaagcaaagaatacaatgaggatgcatgatatgaaaaaaagctgaagagacacttagggagagggtgttagatttttattgatcaggataacagttgtctttttctttgtcttttttttttttgagacggagcctcactctgttgccaggctggattgccgtggcgcgacctcagctcactgcaacccccacctcccggattcaagctattctcctgcctcactctcctgagtagcagggactacaggcacccgccaccacgtccagctaatttttgtatttttagtagagacggggtttcaccgtgttggcca

SEQ ID NO: 96828 - DNA, 12348 bp, Homo sapiens
tgtcactgctataaagtacatcactcaatgctcacattttgctaactttgactgagtgttctcattgcctgcaagccacagctaatgctctggggctttgctgctggaactcaggtctggcagcaactttggcatcacttagttgctcatgcaggccacagagacctgttgaatcagaatttgaatctgtatttttaacaaggtccctaggtggttcatagacacatttaagtctaagagacattgtacttagtccattagagaactgttggagctatgagagccgagaggttcttctctctctatagatagaaaacaaggtcccagagggctcaagagatctgcccagttataattaagcaggttagtggcagagatagagtcaggtcaggccctgtcccacatgttggtgacatctgttgtctctcagcagaccatccccaacctgtatgtagcaacctcagcattgtctctctcttggtgaagtccagtctgcactgccagtcaaaagcaagttccttgcacctctctaccttgcctccacttacagggaatgtgactcaagatgggtcaattagcttctcactctgggtcatgcaatcttgagtgaagacacacagggatgcaaggtacctggagttggatcatctagtggtagcactacagaggaagacccatgggctctttcctgttgctgctgcaggagaagagctgcttcctgtggtagcagagttgtccagcacttccttctattccattccttagaaataaccactatcaattctttctttataaaaaatccataatcctttcagaatttccaggcataaaccagtgtatgtgcctttataaattatgtaaatttcctcatcccacagacactattctacatcttgtttgttcccttagtgtaagtcgtaattccttgtggagagttcagaatcttgcattttagagctgtaatacagtgcacacagcgaatgtcatacaatactactagtggggtctagggcagcaccttataattaaacacattaaattttttttggaactagaagatatgagtattctattcacaccaagttagataaattaagactttacatattcttgtgtcaggtcagtatttgatgccaagtgagtgtaggattggccatgttttgccaccaattaagtttctaaaaaaaaacaaaactaatttctagagtattttggattttggaattgtgtataagaaattatggaacatataattcatcttgaagataggattttcaaatcagtacttatagatctacctcaatatttttcatttctgcagacatattccgttatacggatgcaacataattcatttaaccaatcttctattgatggacatttagaattttccaatgtctggtcttacatataatgttgcactgattatccctgtgtgtttattttaatgtacttgtacaaatagaaaacaacaatttaaatgtatgaacagggccaatttgaggaaaaatgtttctcatttgctggttgcaattgatttctcccattgtggaaagacatttatgtagaaaattctacattatgtagaaaattctaaatccaatggtggaaaataccttggtattgtggaaagatctcagtgctgagagtcagaacccatgttctagttcagtccacaccatttaacatgagcaattccagttttttgtgcatcattttctcagtccataaaatatagaattgtaatatatcaatcaatatgatttccactgaacaggtgctgttttaggtgcgtaaaaaaaaatcagtgaccccaaaaacacaataatccctactcacatggaacctacattttaatgaaaaagaacaacaataaacatgataactaagtaaaaatttagtatgtaggatagtaaaaagtgttaaggaaaaaaagaagaaacaaggcaggaaaaggtaataggataggtcaaggaggagaattaaaatttagacattagagtcagggacaacttcactcaaaatatctgcacagagcctggatgaagcagataaactatccacgcagatatgtggggatgaacagtccaggcagcagaactagcaagtgccaagatgctaaggcaagatcattccaggaatgttcaagaagttccaaaggccagtgtggctaacaatatggggtggggaagaagaaggaggtgagcttagacagacagcagggagcagatgaaagggctttataggtttcaggaaggaatttggcctgtagtctctgtgagatatgaggcccttggaggattgcagacacaaaagaaatgtgatctggttaatagtttcaaagggcctctctgttttaaaactatactgaaagggggcaagggcaaagtggggagactaggatggaagctattgagccgatccagacaaaagataatggtggaaagtgttgagcggtgagaaatggctaaattctggatataatctgaagataaatttaataggagtcattgatggatttgatacaggatgtgggagtaaaagaatttaacaatgactctggagtttgttgtctaagcaactggaagaatagagttgtatcaagtgagatgggaagcagactgcttggctttggatgtatggagtttgagatgtctaccagatattctagtaaaaatgtcctatccaagttgacacttggatagagatgagtctggagtttaagggggagtgatctaggttggagacataaatttggcagtcatcaatgtgtagatggaatttaaaaatttaaagctttgagactggatgggatcacacagggagtgcgtatagtcagaatgagaggtctggactgaatctggaggaatttcaacaattaggggtgaaagagagaaggaggagggagcaacattcagtaggaatggacagagagggaggaggaagtcaggagagcacggtgtcctggaagccaagtgaagacaatgtttccaggaggagagtggaaacgctgctgccaggtcaggttaggagagaaatttggcatcagagggtcactgtgaacctaagaacaattcagtggagtggtggggatgatagagtgactgtagcaggttcaaaagagatgggaggagagaaatggaggatggtgaatgttgcaactctcctaggtagtttttgtggacatgtgtaacagaaagaaaagcagtggaacctgatgggggcaggtggcaccaaggcaaatctttgttttttaaattggagaattaatgtcatgtttatatgctaatgaaagtgattcaatagagagggaaaatgtggatgctacaagagagggaaggctttttggagcacatcaactgagcagatggaaggggatgggatctagtgcagaactgggggtctggcctcgtctaagctcttctacagcaatgggagagactctagtaggcaggaaatgtggtgggaacttgtggaagttctgtttttatgcttcaaaaatgggaggttaggacattactgagagtaaagcagaactctggggaggaaaggaatgaggcagagggctgctgtttattattattaaataatatgatttaataactgtgctactacttgacaattaaaactatgtacatatattaatttgataaaacaaacatttttaaaaaataagagaggagaatgtctggactacttctctgggtgaattttgggaaacccttgagatgaatggagggacacacaaccagctgtggagtcacggttctggaatggaatgcccaaggtcagaatgaaccactggagtatgaaagattttctttggattttaaaacatgaagaatattaaaagtaacaaaacaatattaatgcatttcactaggacttctatcaggagagatcctgcctcttacaatttcaaatatatttcagtgattaagcaacgttaatcattgctatttctgcctttcaaagtctcaaacaaatagttattcagctctatgatgttgggagctctttgtatcctttgtaactggaagactgagactggaggatctccctctctgtctttcccacccctccctctctctttgttccacctctttctctgtcttttcccttcatcctgttgcaagacatgggcctccacaagtcacattctcagtcaggaactatttttttttgagatggagtcttgctttgttgcccaggctacagtgcagtggcatgatctgcagcctctgccttccagacgcaagcaatcctcccacctcagcctcccaagtagctgggactacaagtgtgtgcccaccacatccagctactttttgtattttttgtagagatggggtttcaccgcattacctagcctggtttcgacctcctgtgcttaagtaatctggccacctcagcctttcaaggtgcggggattacaggtgtgagccactgtgcccgactcagtgaggaacttctttattttcctgagaatctcgttttttcttccctctatctaaattgaacttatttttcaaaattcacatcaaattttgctttcacactgaagtttcttttgaccaatccagttctcagttatcttttcctctttttctttacttctctttatacttggagagataaaaaacccaggtctattgttggaaatagtgaaagggcgttaaggtgttatatgtttggaagaatttgtatgtgtaagtctctctatgaatttttaatagagcagcttagaagggaaaaggaagttttcaatagaaaacttggactaaatatcaggacatttgtatttttagaatacaatactaaaagttggatttttataaaagtaggactttaaaaggaagttttcaatagaaaacttggactaaatatcaggacatttgtattttagtcctgactctgccactagcagtttggctttgatcaagttatgtaacttctttgtccctcaatagcctcatctttaaaattaatgtcttggactacataatccaactctagacacaatggctaaaatgcaaacattcagctgcaatttaaagataggaagtgttcgttgggggcagattttgcctttgagggtgtgtgggattatgggttggcactggactttatgtgcctcagacaatgtccgttgtcagactactcaccatcctgtggagctgccgtcccatccccagacctcttaccctgccaccataggggcaccgcactagctcttgcttgtctgggtctttgttctgagctgcttaccctggcccacccctctttcatggttatttcaatctgcatcctctcagcttttacactgaattgctttctcttttttcttttcttttttttttttaagtttattgagacttttattattgtccaatgtatgagctatcttgataaatgtttcaagtacacttgaatatgttttctacttttaaaaaaaattatactttaagttctgggatacaagtgcagaacgtgcaggtttgttacataggtgtacacgtgccatggtggtttgctgcacccatcaacccatcatctacattagatatttctcctaatgctctccctccctttgcccctcacccctcgacaggccctggtgtgtgatgttcccctccctgtgtccatgtgttctcattgttcaactcccacttatgagtgagaacatgcggtggttggttttctgtttctgttagtttgatgagaatgatggtttccagcttcaaccgtgtccctgcaaaggacatgaactcatccttttttatggctgcatagtattccatggtgtatatgtggcacattttctttatccagtctattattgatgggcattggggttggttccaagtcttttctattgtgaatagtgctgcaataaacatactatccagaatctacaaagaatttaagcaaatacaagagaaaaacaaccccatcaaaaagtgggcaaaggatatgaacagacacttctcaaaagaagacagtagaggcgacctaaacatggagacagcgggctctggtackgggcagccggcctctctgctggaggctcccgggtccacggatgaccggcttttcctggttaaaggtggaattttccttggtactgttgctgcagcaggaacgctagctggatttattacaacattatcattggctaaaaagaaaagccctgaatggttcaataagggaagtatggtcacgactgcattaccggaaagcgggtcttcccttgccttgcgagctctgggctgcggctcactgtatgcatggtgtggggttggtgtgattagcttctcagtctggaaagctttaggggttcacagtgacatgtaagagatatcctcattttaattgaaggctacatcaccaactttctacccgagaagtcgtttttcttcgggacccacaatcaaaggctttcctccggcatgagaaaggagtaacattcccgcctggtgagtttttagtgctggagtgactcccagccggcccctaccccgctcaagctcctgctgactgtcccagtgtgggtcctggccaagactggcaccaaggcagtgggatcctttataagtaggcctccagcgccatacaccagaaagcaggagcccacttctgggacactgggagagggtgcaggcagccaccagtacgcaaagcacagtgccctatccttcccggcagggtcacagttcagaagatgtaacctgattttcatctgtagttaatagaagcattttgccttgacattcatactaaaaatagaaaacactagtaattccagggatctgggttagtctcttaagcatgtcaactattgatgagaatactctttgtaaaactaactccagaaatcacttgctagagaagcagcccttcattgccttagtctgagcacccacggaaagcacgtgttggaggcgctggcaagggccgcgcagccgcagtagagggccagggggcgggtggtgcgcacccgccatagagggctgaaggtgctgcccacggctttcttggcgtctcgacgttttggtcagcggcttttttccattctttccctccacttcttgagtgagcagccatgagttggactgtacctgttgtgtgggccagccagagagtgagctcggcaggagcgaattttctgtgcctggggatggccctgtgtccccgtcaggcagcgtgcatgccactcatgggcacctggctcttcacctccgtgagcaagatggcgactgtgaagagtgagcttattgagtgcttcacttccgaggagccctttcatcacagaaaggtctccatcacaggaactggatcagtgggcatggcctgcgctaccagcatcttattaaaaggcttgagtgatgaacttgcctttgtggatcttgatgaaggcaaactgaaaggtgagacaatggatcttcaacatggcagccctttcatgaaaatgtcaaatattgtttgtagcaaagattaccttgtcacagcaaacccccatctagtgattatcacagcaggtgcacgccgagaaaagggagaaatgcgctttaatttagtccggcaaaatgtggccatcttcaagttaatgatttccagtattgtccagcagagccccctctgcaaactaattattgtttccaatccagtagatatcttaacttacgtagcctggaagttgagtgcatttcccaaaaaccgtgttattggaagcggctgtaatctggatactgttcgttttcaattcttcattggacaaaagcttggtatccactctgaaagctgccgtggatggatcctcggagagcatggagactcaagtgttcctgtgtggagtggaatgaacatagctggtgtccttttgaaggatctgaactctgatataggaactgataaagatcctgagaaatggaaaaatgtccacaaagaagtgattgctagtgcctatgagattattgaaatgaaaagttctacttcgtgggccattggcctatctggagctgatttaacagaaagtattttgaagaatcttaggagaaaacatccagtttccaccataattaagggcctctacggaataaatgaagaagtcttcctcagtattccttctttggagagaagggtattaccaaccttataaagagaaagctgacccctgaagaggaggcccatctgaaaaagagtgcaaaaacactttgggaaattcagaaggagcttgagacttaaagttgtctaaaactaccattccgaaattattgaagagatcatagatacaggattatatatcaaaattttcaataaacttgaattcctgaaagatggaaacaggaaagtgggtagagtgactttcctttttatttagtcttccagctcttttatttagcatccaggtgctggatgatacttatttacaattcctaaagaaagtgtttttggtaatgctgatatagcagtacttaccttgttatatatatgtagttggcatttggttcctaaaaagtaggatgtaggtatttactgtgtttgagaaattctgattcttttcactagatatatgctatttattcttgctggcttatacctatgttcatttatatgctgtaaaaaagtggtaatttacaatgtaaaaataaaagtatgcatatacaaaaaaaagaagacatttatgcggccaacaaacatgaaaaaagctcattatcactggtcattacagaaatgcaaatcaaaaccacaatgagataccatctcatgccagttagaatggcaatcactaaaaagtcaggaaacaacagatgctggagagaatgtggagaaataggaacatatttacactactggtgggagtgtaaattagttcaaccactgtggaagacagtgcggtgattcctcaaggatctagaaccagaaatatcatttgacccagcaatcccattactgggtatatacccaatggattataaatcattgtactataaagacacatgctttctcttttttctaacttgctcttcagacttaatgctcagtattaccttcctcactatgagtttgtctcccctagaagatagtctatgtattccatttggctgtggatctgattctgcttggggcatgtatttctcttgaatacttgaataccatgggacccacccatgttttctgggactcaggcataaggcaatcacctcaattttctatgtccatgtaatgactcttgtgctggtgttatctaacatgttaactagattgtagttgtagttctctgcatgtaaggatcaatgcttttttttctgctgattccccaacaaccttatataatgttgagttcctataagatgcttagaaactagttgttaatttgtacattcccactttttggatctttaccaagcttatcttttgttggaggattttgtaaaaacaaaaaggggaagagtagacactgctgaaggaaagaacttaaaagtcaggaactgccttggtttccccttttattttcttcctcttgcttttgttatctcctctttctaatatagcaatatgagtgtatggctaccacatatatttgtttaaatttaacttaaaatatccattctagataatctgcctttagcccttttctatcagggtactatattttatcattaattaattccttataattaacttcatttatttcttattaatctcataatggacaaggagtaccagtgcctggttgaataaagaggggaatcactttgttgtcagaacagaaactcattcaaaccagctcaggtcagaaacaaaaagtggggaatgtattgaatgtctgatggtatctctaataactgtagagtaataattatagagatctgtcatttggtactggatccaggacccagaaaatttgaatccaaggttatttgctttgtttttttcagaagagttgatctcttggctctgctcctattggtacatcaactttatttttcctgggtcttactgtagattatcttactgtgctccggcccgcacatgttggtcccagcctctgcgtttccagatctcctaactcaaacactcatcagaaattaagtgcagtctagtttctgtgttccaattctaaattccaagaagagattctgattgtccagctttgctaagatacagaccccccatcctgtcagcaggggttagggtgtagaagagtcatgtcctacaaacatgggtacaaatatgggcatcagcacgggggaggtgcttacccctgaaagtccctaagtgttggcgtgaacagtttcgcaatatatactggctgattttactatggcaggctcacaaagtttatacagaatagacctttccaatctccttgatttctttgttttgaaatgtggctgatgtctgaatacagtatccaacaaaataattaaagtgctgtttggagatttagcttgaagggcaatcactttttaacttaatacgtttcttagatcttgatttaactgtctttttttggggtgaaaatttgtttgatcttgtcttatcattagaaaagatacagcatgggaattctatgcattcctgtaaagttcaaacacatttccttttgttgacaggtagtaatttgtatgaggcaggcaaaggaagaatggcttcaaacaaatgattcaagttcagaaatatgcaaataaatggattttctaattgttttttctttttttctttttttaaacttttaccttaagtctgttcattagttgtgattgctttgtaacaagaatctggagggcatctaaggacatcatcactgatctggggaaacaggacctgctttggggaattgatcttacaagatcaaggcagcactgtccaacataaatgtaatgtgagccacatatgaaacttgaaattttctggtagccacgttaaaaagttggtaaaataaatcaataaattaattttaataattttactgaaactgatatattcaaaatattatttcagcatgtgatcaatataaaaattattaatatttcacactctttttatattaagtctttgaaatctggtgtgtattgtacacttagagcacaactcaattcagatgttaatttttcagtgattaaagcgaaatgcagacctaccaaaacacgacatttgtgtttaatagaaaaatattttacactgcttcagtttttttattttaatgcgtttacataaaataaattcaatttgtcaatctgcagtaacttcattgcaaatgatcagtagcatttagtgatttcctattaaataatctcatagcggacagtggcttgtggccattgtattggatagcacagttttagagaatgggattcacgagatttgagaccagagtttatctttcaccagtgaagcttaacctaagagggaattttgttatgaattggcgtccactgtgtcgctgctcaagtgggcagggtcaccactttgcagccctgaaacttgtctgtctcttgctccggggcagactttcttgcagtcttgttctgctggcaatagtcttaatgccttaatgctttaatgacattacatgagcttggcacaagttgcaaacttggagattattgtgttaaaaactgaaaactactgtagctaaaggacttgctttatttcgattaaccctgtgttttctaagcttagttgaccacaagtctcttttaaaagaataacattaagttactgcaggagaccaaaaatatgtcaaaaatatgcatgaagactctgtaggagaccaaaatatgccaccccaaaatatttgtttggcatgaagcttattttgagcggattaatttgagagactgcagacacaggggaagctccgaaaacagagtagaagttgtcctttcataagggaaatttatatttgtaaaggaaatctctattagtaaggatgtcactctatctctaccaagaaaaggaagactgaattgctggagactcatcaatgaagaaggcactgacttaaatctgcataactacccttaccctttgatatggtttggctgtgaccccacccaaatctcatcttgaattgtagctcccgcaattcccatgtgtcatgggagggaccccatgggagacaattgcatcatgggggcagatctttcccatgcagttctcacggtagtgaataagtctcacgagatctgatagttttataaatgggagttcccctgcacaagttctcttgcccactgctatgtaagaagtccctttgttcttccttcatcttctgccgtgattgtgaggtctctccagccatgtggaactgtgagtcccttaaacctctttcctttataa

SEQ ID NO: 96829 - DNA, 38388 bp, Homo sapiens
cattttccaccggcccaatacagtggaagtcatatggctctggatctaacagttcccagttgtgtggtctttaaagaaggcaattactcattcttagcatcagttttctcactaaataataacaaagcaggtattatcagagcacataaaaggtaatgggagggagtcagaataaactaacaactgacacacaaagaacaaatatagatgaagaggtgagtatcagcaacaggtgtgtttgagaaagcttgaaacaagggtggcaggaattcagaggattggcgcaaatgcagcttgtgattctccaacaatctcttatattaggttggtgcaaaagtgattgtggtttgctattcagttggcaaaaaccaaaattacttttgcaccaaactaatagtttgaagttcagttttaactggatgttgcttaagtatgaaatccttcaaaacattcttatctctatattggtgctcactactcaggagttagttgatgttttttgtttgagaaacacatgatgtaaacaaagggacactgggcatgtactcatttcttgattgagtccttgccttcccatataattgttctgtggcttattcagtttctttcatgtcattaatgttcaattttttcatcagtgaattgggaataatatctacttcatagggtatcataaagttaagagagaactggggaaaagacttttgtgaactctaaagaatctagcatttttatctacctgctttccctctaggtaaaggggaagtggaatggtttgaggaaatagtatttgaaaagggagagtgataactacatacaggcaaatatccaggtaagagtaacagattaaattattgagatatgtgcatgtgggtgggtatgtgtggattgtgggtgatgtctgtaatgagaatttatacaattagaaaaatctagatcattgatttaatttttactgttcaaaattttggcactgcccacagtagaagtcagagagataatttagtatcattcatcaaattaaagatgactattaatttatctctcagcccatcatttattaaaccataacaattaccacttattttaaccttttaccatatatttcatattgaaattctttgatatttctataagacttcccagttttatgaattcctccaatcatttggaatcttaaattagcttgtctcatagtctattaaaaagaagatgtgttcattgataatggtatatgcagttgggatttaaaatgattgtaaacagctgaaatgcattttattttggaaaaagttatgaaactagtcagtccaacactgttgatcagttttgattaaaatagaaaataggatgagaaattaagatgttctaaattatctttttgaaggataataaaatgttttgaacaattatgtctcagagggttatcctggtaaagagtaaaaacacaggactttgagataaagagatgagtgcttccctggtatctgagcaagaaaggcccctgctgtaggcctccatattttgcaagctccaactctaaccttactctctctatctatggttagttgtcttcagggccagtggtgtgtgtccatccagaggcagcacccatctcactcaccactaccactagaccattctctgggtaatgggtatcttgaaatacacttaagaaatacacttaagagtcatgaatcagcttgttgacctgggaagacctctttcctggacctaggagcccaaagggtggccaagagagtgagggaagtagagagatgggactcagacatgcctagactgctagctgcattgtctacacgtatgtctgtgaggcctagagtggaatgagttggagccaggggtggaaaaatatggtaggctgcagagcagaggctgggtaccaggggctggctctctgcatgcactttaaggagtctaaagacttgcttcaaacctagccttccacatcataatgatgtatgtttgtcaaagtaggagttgtgaaaataagaaaatcaaaatctaagctgttggaactctaaaatattttgagccctaagggactgtgattatggaacccaagtcatgtaaacaggcagctataacctagacagctgtaatctttgtttctctaattacagattagcttttttccttacctacattgttgtataaaatgtcatgactaaagggtgccagtcataaatgaccgaagggcgtaaaatgttgtagatgattaaagggtccccttccctcttaaatgttgatcttctttaaagattaacttctctctttcctctctcacaccaagatttcatgactatcacattgtttaggatgaaatgttaaatccctctttaaattagaaagaaaattaaaataagctgtacagaaaagaaaacaaactgtagctaattaacttgttgtaagtcaaaaactagtcttgtatagaaaatgttataatccttctaaatttctttgtgttctgcctawataagcaaggtcttaactttttttttttttttttttttttttttgagacagagtcttgctctgttgaccaagctggaatgcagtggttcaatcttggctcactgcaacctccgcctcctgggttcaggcgattctcctgcctcagcctcccgagtagctgggactacaggcatgcaccaccacacccagctaatttttttttttttttgtatttttagtagagatggggtttcaccatgttggtcaggctggtttcgaactcctgacctgaaatgatctgtctgcctcggcctcccaaagttctgggattacaggtatgagccaccatgcccagctggtcttaatttttaactttggagtactaactccatttctctgcaattcgtctttcctggatggccattcccatctttttgcctgaataaatgttttaaaactggattctgactctttcaattatttctggttgaagaaaatggtgactcagatggcatccaaagtaggccctttcctttgactcctgttgcttcgttaatcagcacctggtacctgcagaactgtttctgtccaactgtctttcaccagagtttatgggagctcttggtggagcccctctctggtttttaatgtccctggcttaggtgagatccagacttcattcaagcaacctgattctatgctcaacagggctggaattgaagctctactgctttaagaaaggaattttgtttgttatttctctggagatgctgctgttagcaggtttgtggtttcagttttctttgaggttaagattttgttcactttacttgctaaaatttgcaacattttctttctttcaaaacctggttaaagataaagctgtttctctttagtaggagggaataaatgtctctggcataagcaagaatgaaagtttcaaactagccaggttttgaagcttggttcaacttggcatatttaaattcttcttttgagtgactgaaaatctatttaaaaaaaaaacctttatgagaatgtgataagtgccaaagatgaaaggacagtgattctcctgggcagaaaacaccttaggtgactaaggtcttgtgagagtgtcagagtttatagctcctgacaagcattggtcccctagggaatccccgaagaaggacatataggaagatactccacaaaaagggctaatctcccagtgcttttagtgcccagaattcctgggtttcaacacaacatataggaggggagaatcaacccaagggtgacactttggagagctattcccaaaagcggtacatttaatgcaaaatatctttccctttcagctttgtggtcacttaaaaagagaatacaaattacaggcaatcagccatctaaagccaagtcttccttaacaagagatctgcctttgcaaactccagctagattcatatgcaatacttatgatgtcacctcttgtaattattttttaaaatggtctcatataacctgtgatgaacctaaattacaatagccaagttgaggtacctttgaaatacctaaagtattaataacttacttgcatgcttaattagaaaaagctggctctaagataaaacaaaataattgtgagagttatttccaatggtatttggaagcatccaaagaaggttctaataaagttacttctttgtggaggaaaaatgaaagattgtttaaaacaatttctgcactttaaaagtttctggaagcttctactcctcccttagaagcttcccctccccatcctcacttcccctttctctttaccctttaccatctgaattactttaccctcaacagccttcctttcgtcctcccctgcctctgctgttctggctcagtttcatgaacagccaatgcctggtagtggggcaagaagggacctgccttactttatcaaccatggtcaaaggtagaatttgaaggcatagttaaggaatttcctgacattcatcaggattctattggctttgctaaacaattttaactaagtattcaagcttatgatcctgactatttgaatttatatcaactagttcacatgttagttttagaaagtaagactaaagattggacagataaggccccctggagaaatctcctagaagatttccataaatgttcagaagaataccacaggagtgcttgtgaaactgcaaaggttttgcttacagccctgcctttagtcttctaaaaggtagttgactggcataaaatacaacaatgttgacaaaatccagatgagttggtaatgtcatattttgaaagctttgaaaaggtgtttacacaatattcaggcttatctgaggcaagttatgctaatcgtcagaatgattaactcctcaattctagctttataaatgagctagatgaagaattagcactaataataaagagaaaatgaactacttgagccattcccctcattctggggatgtattgctgaactcacatcatactgaacatttcttagttagtagattggtctcacataaggtcctgcttcttttagctcctcacatcattatctctaggtgtaaccatctaacccctgcaactgtgttgccttaatttttagatgagatgatacatgactccataaccctaactgatcaacttctttctttcaggtcagaccaatgagagaccctcccccaccttaccaatactgatattgttaggtttacagatggatcttacttaaaagataaatctcgagtctacagagctggatacactatagtgtctttaactgaagagatagaaagtacccatattctgaaatccacctcaactcaataaacagaattaataacattaattagggcttattgattggcaaaagtaatatccactaatatttatacagacagtaggtatgcttttggaatagcccattatttttggaatattatggaaacaaagatggttattaacctcttcaggacaatccataaaaaatagacatcttatttcacaactactgaaacccatattgccaaaatcactggcttttactcaaattccaggtcattcaaatcagatactccagaaagcagaggaaaacagccaactgaaaagataataaagagaattgctccaaacacatctaaacaggaaaaccaacctatagtaactttttaaaaagcacccaaagttgatgtaaaattaatttaatacggtgccccaaagtcagaacaataagtttggaaaacaaaagggggaaaatactccccagaaggtgaggtattaaatgggcaaaatgacttgcccatacttcctgctgaattacagttatcgtttttaacttctgtacatgatctaactcactggagtcttgacaaaatggttgcttgaagaaaataatattattggaaaccttttttgactacagcttgtaaggcatataattgctgtcatatttgccaaagtataatccaagaaaaccattacgtgattcccaagaacacttttctttacctgagctccctttgaaatatggcaactaaattttattcagctgccaccgtcacaaggctacaaatatgtcctggtaatgatttgcatattttctcatttgggtagaggtatttccatacagaaaagcaatagcattagcagtaaggaaaatacttttagaaaaaaattattctaaacctgaggatttcctctgggacttcatagtgacagagacattgactttactggaaaaatcattcaatcaatatgtagaatcgggcctatttcccaacattttcattgtgcttattaaccccagtcatctggattaacagaatatacaaacaagataattaaaactcaactaccaaaattaactgaggcttttaaaatttggtggccaaaagctccttaaaagttttgctaaacctaagattcactcttcaataaacactagttatctccatttgaagttataagaggtagacttagggaaatatctcctggaaattgtgcctctttattagtaaaaggagatatactcacgtattctaatggttttgtgaaacaattaactaaaaaatatgaattggtaaaagaatcttttcacagtaagctcgcagagacaaaaatctcaagaaccaggggcttcaacctggaccctttgtctaccggaaatgacatctcttcaaggactctctccaaccaagataaaatggaccttaccaggtattctttactaatccttgtgctactaaactagaaggcatagactcctggattcacatctttcatcatagttgaacctactgggccgggcgtggtggctcacacctgtaatcccagcactttgggaggccgaggtgggcggatcatgaagtcaggagatcaagaccatcctggccaacatggtgaaaccccatctctactaaaaatacaaaaatttagtcagatgttgtggcacgcgcctgtagtcccagctactcgggaggctgaggcaggagaatcgcttgaaccccagaggcagaggttgcagtgagctgaaatcatgccaccgcactccagcttgggtgacagagtgagactttgcctcaaaaaaaaaaaaaaagttgaacctactaaatagactgttttgccagatgatcttcaagttaagataagtgacactgggactagataaagatatcagaggtgattagaaagctgacatcagggtcagctttcccaaggccctgaattagacctgtatttaaaagaatgcttaatggtatcaattgataatagatgggaaaggttctcttttacaagctcccgctaaacttctttcttttcatcctagttgttatgtcttggtactaccatcactagctgttttccataaagcaaacctcttttgtagtgggttcaagactatactagtagattacaaaaggatgcttggtgggtctgcagcctcatgcccctgtccagtaattctggccttctatggtaggtatctcctttccaaggatgagattggatagaatatcagaaatatatttgtgtttctcaaaaagtcattggtgcttaacactagtatggctaaagataatgtacatcacaggcctataaataatacagaataaagtgcatgggaagagtttctcagtagaagatatagtttattagctttaacactgatgcttccccagttgagaaataagataactcaatgtcaagatggtataacacaaatttgggatgtttttatctggcttaccctctcctttggtcagcataagtcaactaacctcttaatgttgggaaaaaagaaatcataccaaagatacctggtccaattgcaccagagatatagatccccraaacatggtgtatccacaccattatattacaaagtactgattgacatgccactgaaaggacacaatgactatttactgattagttccaagtgaaacatcttggctgtgtggcagtaacctatggccaagattactctcagatggtttagaggatgttccttgggttatgcttgggcacaaagttgacatacactataaaaacttgcaaattttcctcatttacaatcttgttgggttcattctgtgttccattgctatgatttttagcttccatttttgtaccacaactggattttgattatgtcatttggcatggagaggtcttaaccaattatacacaaaaccctaaatgatgggcacatgggtatttcattattaaacagggaagttattcttatgagaaaggctgtattacagaactgtatggctttagacatagtcactgcagcccaagagggaacttgccttatcataaaaactgaactttatgtctatatcccagataaatcaaataataccactaaattaatgactggtatgaaaacccaaataaccaaactttcatacctaaaatcttctctaaacactccctaggtcgctaaattggatcctaaggaaattggtggcaaaatctgttacttattctaggaattataattgcatgttgtgttttggcctgtttgtgtcaacactgttgttacagcatttgtttacaatggaaccaatgcatgactgaaaagactaaaataatggtttcccaaagaattgcattcattgaatatatagctgtttagcctsactcaggccacagagttacttccttcatgttgctttaaattcagcctaaagtccatcagcttcatatcttgtccagtcatctcttgccatgggacatgatatcctagcaatgaggcttcctagtaaagtgagactcaaattctgaacataaaagaagtcaaaccattgaattcatctacgatagtctcttcaaaagatcttgatgaatgggaaaaactgtgaaaataagtaatttgaacatcaaaactgttggaactttaaaatattttgagccttaagggaatgtgattatgggacctgggtcatgtaaactggcagctgtaaccgagacagtgacagtctttatttttctgattacagattagccttcttccttacctacattattgtgtaaatgtcataaatgactaaagggtaccagggaagaccacttccctcttaaatgtcaatctttattatagatcagctactctttcctctctcacacaaagacttcatgactatcacattgtttaggatggaatgttaaatacactcttaaattagaaagaaaaagaaaacaagctgtaaaaaaaggagagaaaataaactggacagaaaagaaaacaaactttaattatattgttgttagtcatcgaccagcctcgtataaactatgttatatccttctaagtgtctttgttttctgcctacagtagtaagaacttaactttttattattattattattattatacttcaagttttagggtacatgtgcacaacgtataggtttgttacatatgtatacatgtgccatgttggtgtgctgcacccattaacttgtcatttagcattagatatatctcctaatgctatccctcccccctcccaccaccccacagcagtccctggtgtgtgatgttccccttcttgtgtccatgtgttctcattgttcaattcccacctatgagtgagaacatgtggtgtttggttttttgtccttgcgatagtttgctgaggatgatagtttccggcttcatccatgtccccataaaggacatgaactcatcattttttatggctgcatagtattccatggtgtatatgtgccacattttcttaatcctgtctatcattgttggacatttggcttggttccaagtctttgctattgtgaatagtgctgcaataaacatatgtgtgcatgtgtctttatagcagcatgatttataatcctttgggtatatacccagtaatgggatggatgggtaaaatggtatttctagttctagatccctgaggaattgtcacactgacttccacaatggttgaactagtttacagtcccaccaacagtgtaaaagtgttcctatttctccacatcctctccagcacctgttgtttcctgactttttaatgatcaccattctaactggtgtgagatggtatctcattgtggttttgatttgcatttctctgatggccagtgatgatgagcagaacttaactttttaactttggagcactgaccccatttctgtggagtccatgcttcccaaatcgctattcccagcttttcgcttgaattaaattctttaaaactagattccgatcctttcgatgatttcaggttgacaaagtacagaacatattttatttaacagtttgttagtttgattgataacttttaagtatttagacatatggtatgtgagtttccatatgtattcttgccttgagtctagaatatattagggataacctggaagtgacccaagctttagttctggcccttccaccaaccagcccataaacttggaaaaatgacttgaaatcctcaggttctaactttttatgtttgtagaataaagtggctgatgtagtttcaatgctatttctgtcactttgagcacattgcctaaaattcccggtcttagtcttaaatctatgaaatttaaggtttagattaggtgactatttgataggctgttttagttctattctatgaagacttatttttttattagactagtcgcagacacttggtgagaagaaggaaacatattattagagtaatggctaaggttaataaaagttaacctgctttgaattgagttccttctttcctgcagtaccctctttgcgggttcatagacatctgatagctcagttttgttctaacttaagttaaaattatgactgaaaaatgtggttgaaggttaaaaatcaattaaatggtaattacagttatttgttttaaaagttcaggtaatattttataccatgaatctgttggatgacagttgatatggattaatcagcaacctgctttctctttgatcatgattcacatctgctctggacaggagtgacaataaggaaataattatgagccattcccttggagtggtgcacttggagccgtttggataaaatcctctctcagtgcatagtggagctcttgttgttgttatgcaggaaaatcagattaattgtcccagttcatttcctagagcacagagggcagctcctagtcagtcacatcaattcttctttgccctttgctatatgtcgattgcccatgaggcaaaggttgatacgttaccttttgttttacaaggcatggggatagccagtgatgtttcttggtctatgagttgcgctggaaactgttcttctgaacacagtagatagagagcctaaagaaaaactcactcactgggcagtactgttttctgaaactgcgtgtttttcagctattgatagcaacttcaaattttctctataccatttatttcacctttaaagcgaggatttacttctacttcacggaaaaattgtgatgcataagcatgattaacagcaacattttccttagtattaccacttacataaaagctatcagatgagactgcttgtctctaatgaagaggttgccctccccctcccattttggacctcaaaaccagatagaaaacatcattcaaaaaattagacatttgattaataaatattggtaactagaatgtcacagtaaataaattctatgtgacttctttgtaacatctataattctgatttaaaagaagggaaaacaattacaatgatatatgttactcaaggtcaatccttaaaatattactttatcacaacgccagaagcaaagaattataactttaattgtaccagtagagaaaatgcccacacatccatatttaaaaactaatgagaacgttgttcacctcattgcttggccagagctttagtgggggatgggagtagacttgaattaaatagagtgttcatttgaaggtaaattgagagatttttcagcctactcaagtttaattaaaaataaatgtggaaaattgttttaaaagattgtacacagtgattatctcaaattgccatgggaaatacagaaatgcctcattaaaaaacacatttagacattttttaaatatataaactccatcatttatattctagtttagaaaaacctcctcacttctaaaaaaaaatacaagccaaaatatgtcatcatcatttttatgtatcccagaatattatgtgtatgtgttaagatgattttggtgcacaacatcacaaaaatcattttaaagggaaactgcagtgcttttgcaaaaataaaacaagatcacagaacaaataaaggattactgaattatctatagaagtgaaaccagcaataaaatggagtcaaacctgggaaacttccaaaaattaggctgggtaagaggcatgacgctgctcaactctgtaatttcttggcatcaggcagaggttatattccatcttagagtcctaaactgtgtttatgtgatacttaggtaacttgattttttttaacttcagtgatayttgattgaaaaagacaaattttgctgatatttctgtcattcagttgaataatagttttgtgttgtacaaccatatcacaaaatgacacaaattcagacttttcttaaaagtcataaagaaatgcctagttaccttctgctttttcctttctgatcctgaagagacatgagcgcctcctgtttgttgctgatggttaaagatgtaagcaaagggttatggagtgagcatcatgtggaaaagataaaaaaattctatcaatattttaagacctggagtaatttggtcaacattttcaaaaatgtaaacgtattctgtgggtttagaaagaaaagatatcgatattattaatgttgttaatatctttagaaccaagcatgaataatcatcagtgcagagaaaatacaggtactatacaaccaaattattattaataattatattgcttctttttagttgtgtttttggtgatggttaygttttatgagccagacattttacctatgacatatttccttcttgaaattctcaaaattgtcacagtatatgatgaatataatatgcatacacatgtgctatgattttaatgtttgccctctccaaaacgcccattgaaattaagtgccattctgatggtattaaaaggtgggagctttaagaggtgattagacaaagagagctttactcttatgggtggtttaatgcttttaaaaagaggctttcagggcacgatggctcacgcctgtaatcccagcactttgggaggctgaggcagggagagcacctgaggtcgggagttcaagaccaatctgaccaacatggagaaaccccatctctactaaaaatacaaaaaattagctgggtgttgtggcacatgtctgtaatcccagctactcaggaggctgaggcaggagaatcgcttgtacccaggaggggaaggttgcagtgatccgagatcgcgccactgcacaacctgggcaacaaaagtgaaactcagtctccagaaaaaaaggaggctttcaggagtgggctctctctttttgccattccactcttgccttgtgaggagcagtgtttctgtcctctggaagatgcagcgttcaaagtgccatcttggaagtgggcattggatcctcaccagacaccaaatccgtcagtgccttgatctcggacttcctagcctccagaacagtgagaaatcaatttccattctttataaatttcctagtctcaagtactctattatagcagcacaaaacagattaaagcatgaaaccgagaagtattaatcactaaaaagagactttcttcttgggtagaactatgtgtagacaatttgatcactagcatggcatttacaagcaattattctcttctgtatcattatgtgttaaggtttagtgcaactccaaagcagtagaaaattttggaaactagcaaaatatattatttcatttttgatcctgggaattctatggtaggggttatattggtcctggagtattatttgtgtagccaacttagactcctcaggcaagttgtctgctccgtgaagtttacctgaggcaaattttgctttcaagtatttatagatagttagcacctgccagtcctagttaactacttggctaacatcttatagtgcttcagtgaactcaagactttctaaaggctaaagcctaaaaggtagaattgaaattgaagtatctccttatgttatctatggtggagaatgttttagcacagtaagatttgctgtgattggggtgttactttgagctaaagtgacaactgctgggcccagtatatcatatttggaggcagagctggaggatggacaaaagagaagtgactgtgaatcatcaggaatgcattcccctctccaaacatgtggctttctccttcaaccaaatcatctacaaaatatgcattcactaaaaagaataaaaggaaaaggaaatattttttaaaatatttaaaaggcataagaaaactagccaaagaagatctgaataaatacccacttatcaggagtttttaattggggaatatccaaaccatcagacagcaagggcctctttgcacatcccagctcttcctgaatcaatgattcatggtacactatgggctgactttggaaaacattaaaaataaaatctgacaataccaggtgctgatgaggatgtgaatcaactgatttctcatacactattggcaggattgcaaagaggtagaaccacattggatagtagtatacaaaagaaaatataatgaaagcattttacatgtcttactatgtatacgttaataataaagtgaacttgaagatggatttgagcaagaattgtgagataatcatgtgtgtgggagatgagcagaaagtctttaagagagcgaaatcttcatcttttatatgatgaagaaaagttacagacattctcggaaaattgaaaaataaaaataagagtatataagcatgttattcagaaatatgaaggaaaatagaaaagctgaatgtggctttttccagaaactagggatgaagctttggaagatttgggggcagggaactgatgttttttaactcgaagacttgcaggattgtttgactttcggagttatgtgcatgtgtaattttgataatagtaaaaataatgattttaagggaagcaaagttgtgaattaatatgattgaattctaaagccttccactagaatattggttctccagtaaaaaggatcatgatgttttctaagtttcaattagaaagattaaagaaacataaaagtaaataagcagctaaagaaataatacggagtgaaaccaggaggccagtctaggaaatcttcagtaacaaaatgactgcatcacttagcagttcatttggctcaggatttgctctcaggatcctggtgaaagggatcaggggccttttccccttcatcaggaagcagagagaactgtcacactgtgtgaccttctcagagttcagaatagtgaagcagacatttgggcacattttgtgggtagaaatacccttcttcagggcatgtgtgatggaacaaaatcccaaggaaagctcaaaggttcttttaacagaattggcagacatgaacaaacacagcaaatatggagcacttcattttataaagtaatggttagtcacttctcagaagtctctaatgaaaccttgatgagaggctattgcgttctgtggctgacaaatatggagacagaaaaaagtacatgggaagaagaacattttttacccattggatgctgcatatatccatgccttaggactaagcacaatcaaagactcccaaaggaatacaaaatggaaagctggagaacctccagaatctgagaaaaggatagaggagtcacaggagagaagagaaggggaagaggagagcagatggaaggagataatgatttagacctgcaacaggtctcttgaggtccttgagaaagttttgggaagtatctaaaaataacgtgcagttctttttggataatatcagacagtacctgagggagctaggaggcagcagaaatgggatttgtgtgatgttgcttccagaggctgctaccttaggaagaattgactaatatctatgaatgattctttgtgaaacacacacatcaccttgcgtttggaatgttagagaagacaactcattcttccatgccaggcttgggctttaaataagacaattctgctttgttctgcaataaaataagcctctaatgactttgagatgacaaaataatatatgacaatgcttcgctgaatgaatggcaacatgggaaaaagagaaaacaaatgactcctaacacttctgcctcccagcaggtccttatttctcccacctctttcctccttctagcattagagctgkttctaaaaaaggcaatattaatccctgctttgaaacccttgattttacaactaaatggaaactccatagcaatgcagtactgcctcattcccccttcccagcattgtatcaatttcccccacagcttgcattctagatgttcttaacttggcatcatgggaccagcccactttccatgtaagatatcatttgtacttttgttttaaagccaagttcaataccacctcttttctggtgcttttctttacttcctcaggcagagttcattacttttggtgcaatgtccctgtagatgacttaataccattacatgtatataattgcattgtgattatctatttatgcatatatttctcccactaatttgagttcctcaaagatagaaaacatatttgatttattaattttttggtccccagtatattccacagtccctgacggcagcaagatggctcatataagtttgctgaagttattaatgaatgcatgagaaatggagatttttcacatcaaaggataagaaggatgctacaaggtattctaagtgcttgactgtaaatcatagtcaatctggaaaaagttctcattttgttctgctgcttttagtcccaattcattagatatttgtctttgtgtctgtcccagtcattcttgtggctgaatgtcctttgtttctactacaaccatattgtgtttgatgggtaacaggcaaacatttccaactgtgcttttcagagagggataaggaagcccagtcctgaagaacagaacaaaataagggagagtgggagaagatagaattaaaccaaatacaaagaaaattgccattgtgagcattttatattaaccttttaaaatgatggattatccattctgagcacaaatatatcaatcaggggaaattatagaggcaagggatatgacagcagctgtgtggtttgcgtaatgattctggactcccaacatttctcagcttggtagtacagaggatgaggactaggaattatgtgtggttgtgagaagcatacaaatgtctcacataccaaggaaaaagaaagaacctaaagatgaagtcttcaaaaagttgctggtaaaatggcttcttccggattactgaaagagttatttacactacatcatgacatttcaatatctgaggcattccaaatttgggactttattatcccattattcaaaaaatacacaaattagctattctttgttcttagacaaagaatatatacatatatgttatatatgtacgtatgtatatatgtatacatttattgaatacacatgctaatatttaaggtgtgacaaagcactgcaattgaacaccaaagagaactgagaactgactattgttaaatgcttagaaaaccttctgtctacaattacataccctcatttccatctagcacaatgcttggtgtgtatctggttttccacaaatgttgaaattaatctgtggtatttagacagaggagtaagcataaaaaataagctcctaaattcatatctgctgttttgagacctccaaatttgtttttccacctttttaaaaaacaaacttggaatatgtttggtaagaaaatctgcaattaaaaagtaatgcagaacttgcagttaagtcccaggctgatgacaagggcgggccgcaggtgagaccatcaaaggagctggaaggcagtgtgatcacacccatgaggcagtactttatattttggttaatcttcaagtgtaatagcaggaaaatctcaaagaacagagagataaataaagcaagaattgtttttctcccttagtagttaactattggtaatatgcacacaatatatagttgcattctgatctaagtgattattagtcattcattccatgggcaatttctgagcatcttttagccaggacttgctgctctagatgcatggaatacatcagcaaataaaacaaatatctatgccttcaaagaacttacaatgtcatggaaaatataatttctagagagttagatctttgcaatacccagaatattaaaaaatgctcttttaaaaaaattacattgtattccccycttctcaattaccagtccacctatttttttgaagttaaaagctcaaaaatgccagagaccacatgaaatgtacatttatcgttaagttaaaatatgtattttttaattttaaacatgacagtaacctctcccatcaaagggtgcaatcttctgctaaacctgtatttctgtcagatcccaatcactctttaaggtgggagaacaactgtaataatttacttatatttttgtattgagaaaattgcctgttcaggaagaattttctttactcttattggtcacagagcataggaccattacaagcttactcctcttctagagagacaaaaattcgatgaactattatttgtggttaatactgtattaacttgttcaaggacgaaaaaatgaaaacatcacagcatagaaaaataaacgactgtccattgtaatgtcactacgcaaaggctagatatttggctgagacatgtggcttgtcatacaaaagctttgcattgattaattagtggagataatatagaacaaacagcctttaaatatttgactttttttaaacactcatcactgaaaaccttttaaggtcaggaagtctaggattattttcatgggtctttctccataaaattttagcactcaagagtttgtgcaggcagagtatatataggtttcagaatagatccttattgtagagttttgaaaatattagcaacaactactattgattaaaagctgattagatagcatgagtgagcttggaactatgtgccagttacttcatttaatactccccacaactttatgaggtggattttttttttttttttttttttgagacagagtcccgctctgttgcccaggctggagtgctttcagtggcgcgatctcgactcactgcaagctccacctcctgggctcacgccattcacctgcctcagcctcccgagtagctgggactacaggcgcccgccactacgcccggctgattttttgtatttttagtagagccgtggtttcaccctgttagccaggatggtctcgatctcctgacctcgtgatccggcctgcctcggcctcccaaagtgctgggattacagaggtggatcttgatagatacattttatgaattagggattcaagactcagagattatgtgagtaccaagacatgattcaaacctcagtctaactccagatttcatgcatttgccaccaaaaagctgattgtcaagccaagagcgtacataaatttttaagggactggaagacttactagggtttcaagtattttcaatatattttatatgtgtgtgtatgtatgtatgtgtgtgaatgtatatatatatatctcctgtgttaacatatatatttgtgtaaacaaatatgtgtatgtatatcctgtgttaacaaatacatatatatgtatatatatcctgtgttaacacaggaaagcaaatataacatacattcagtatattctgtgtaaaagactatattgtggccagcagatcataaataagagtacaaaaatataaattcatatgaacgcttaataaagtattttgtgaaataaattcatttcagagcaaagaaagctaaactgctctaaagttgaacccatttgttgggcccagtggctcacacctgtaattccagcactttgggaggcccaggcaggcagatcacttgaggccaggagttcgagaccaccctgaccaacatggtgaaacccatctctactaaaaatacaaaaaaaattagccaggtggggtggtgagtgcctgtaattccagttactcgggaggctgaggcacgagaatcacttgaaactgggaggtggaggttgcagtgagccaagatggtgccactgcactccagcctgggcaacagagtgagactctgtctcaaaaaattacagcaacgacaaaaaaacccgaagttgaacccattaacatattatacctttaaaactaatattgtttggctttatagtgtgcatacaataaatggaaggtagagggtttggcaaaaaagatatgaacaggcatgcatttctgggctacatgattttgtgcttgatggtttaggtttctactgtatatttcctttaaagaaaatcttattttctaacataaaacctcagcaggcctgcacttagctaacaaggggaaaactctgtcccagttttccataatacattcacgaagggatttgaaacaaccaacagttattgcagagaaaaatgaaagaatgttgtttgctggcattttttaaaataaacacaaaagttcaagcactatagctattaagctctttgtaggcaacataaacactggcttatttctgaccccctataatcctaaaatcaagcccagccttcattttctgttgtaatttttcctgcagtaccccagacaccaggagctcatgagtcaggatcaccagccttgagtctcagctagattcctgcagtagcaatattggggctaaggcttcattttatctctcttggttgagaaatattatataatatctaccttcttttctactctgcttagtctaaagagaggtccttttctttgggggaaaaagtgtcatttcttcttaggttctttttttctcagaaaaggaaagagcatatcaggggaggatgtggttgacatatttgtcttccatgtgaacaaggggaaggaaatacttttcaagtcatagttttatttatccaaggtctcctgggatattataacagagcatgtgatcattgtgctcaaaggaacctcaagggagccatctactccctgcctctcaacaggctacttataaaccaccgcacagaaaggtgcaaatggagctgtataatggttctggggatgaagttttcacttctcttggtcctcctcggtcaagatatttgccttgttttgcctgaaatccttcctgccatcatcaaataacttaaaataaaaatctgctctcaatagagagacgaaaacaaccaacctctatcatctgagtaatatcctctctggttatttttaaatactataatagcacaatgaacctgaggcaccaggaagaggcaatttcctaaatggatatggaagccttgaagaggatgatgtattggcgaatgttactctactaggtccatttaygcagttacaacaggccccataatcacgagtgaccagtgcaaactcacagctgaacacaaggccagagaggctttactcccacctaaggtcttgagccaacaatgaaggcgcacaacagatgctcagtactaacaaaggctatcaaccccagtgatactgaggctcatttatagagagatagatattggtagggcgggtgggaaggaaggcaaagctaacctgaaacatctatgagcaaacatcatgaggcaagggttattttttatgttttgagttttacttgtgggtgcttaatacctattaaataagtaatgataattaatacttacctacaccacagtggtgatttgcaccttaaktgagtgatttgcacctttgtagagctctatagatgaaagctgaagtgcataggacatgcaaagcactttttttgaaatataattttaattagttaaaatttaagatttagtttctcttgataagaataattttaggagtgtggctaaagcacttaatctttaatctggaccttagtttttccatatgtaatgcaagaaggttgaaatagatgatctctaaggtcccttttagctctaacattctgtgattctaattaactgtacagatggagactgatagaattttggatctggaagagattctagagtggattatataaaattgttcttctgacaatcacggaggcatttaaaaaatgatttcatttattgaatgtttattatgtgccaggcatgataaaaaccaccttcaaatattctctcatatgcatctctgtaaagttctgtgaggtaggcacaggaaactgaggctcaggaaaactaagtaagttgcataagaacagacagaaaatgacagaacagaagctcaaacccagttctctctgactccaaaatctatgctctgtaccatgattaagctgtctttggcatggcttctccataatctctgtgcctggggaaactctaaacttgccctaacacaccacctagtcacctcaggcctttcctgctttccctcagctcagagccaggattcttttcttttcagagaacctacgctcttataagtgagaaaggagagccttattttttcttagtgtttatgcaccaatatctgtgcaggcagaataagacaagtgactagttgtaacacgatagatttttctttggagctttagctgggttaacatggtattctaaattcctgcttccttgcaggagcccagtagctttacataagccactgaggtgtagggcattctccttcactgtggactgactagcaaggatctctccaacaggcacttgcctctctttctctcctcctccctttgttcctttgcccactatgtaagcaattagtacaattgaatccttaataagccaatttagtccagcccacgtagctattttgctcctaataaatcaattaattcagctcacattgaggggactgtcatgtttacaatatcacagtcagcgtctatatatttgtgcaagaaataagatggtaaggagtatttttagaataaaatttcatttttctctttgtggtggaggggctgtgtgytgtgctgttgatgcttctgctgctaggacttctttgtcttaaccaaaggcttgagaaaatgacatagcagacatttatgagacgtgtttcatggagttggagtgaacatgcaaaaaagtccatagagctttgtttatattgggtgccagagatttgaacaaggatggaacaacccttttgtggtagcagctctcagtgctttctccacaatcctatagggctaggtggatcccattaaaggtcctaatagctaaaacttatcttcaaattacctttagttggtaggaattatgactacatactcagtcttttgatttctccaaccatgttagcaaggtgaagtttcatcttactaagttaagatttgaaagctttggtgtcaaatattcccttggcactaccctataatgaagaaggtttaggagtcacacatacaaagtggacttaaagagtttccttgataagtagcactaatggatcaatagtggggtgtggttgctgacacagcccattggtcaaatacctagagtgaaaggcttaaggcatacatttctctgcattttctagataattaggctcagtacagggagcccagagactcctattttaaggaaaataatgttaaaccttagtgtattctggggagagtatcaaaatggtggatgaagccaggtgcagtggcacatgcctataatcccagtgctttgggaggccaaggtggaagggttgcttgaggccatgagttcgagatgatctgggcagcaaagtgagacccccttctctgcaaactttttaaaaaaatttagccaggaggccgggcaccgtggcttacgcctgtaatcccagcactttgggaggccaaggcaggtggatcacgaagtcaggaggttgagaacatcctggccaacatggtgaaaccccatctctactaaaaatacaaaaattagctgggcgtggtggtgtgcacctgtagtcctagctactctgggggctgaggcaggagaatggcttgaacccaggaggcagaggttgcagtgagccgagttcgtgccactgtactccagcctggtgacaaagcgagacttagtctcaagtgaaaaaaaaaaaaaaattagccaggcatgatggcatgctcctgtagtctcctagctactcagaagcctgaggctggaggactgcatgagcccaggacttcaaggttacagtgagctatgatcctgctactagcactctggcctgggaaacaaagtcagaccctgtcttagaaaaaaaaaaaaagtgagtagattagaaattctaccaaatgagtagttgtggaaggatagtgactgatttgtttagaaagaggaaggtttgtttggggcagagtccttgccctgggaaaggtgaagcaatattgaatgacttcaagtatttcagccctttcatgtggaagagggatcaaactcattcagtgtgaccctagagataaaactagggtcaatgagtgtaaataagagacagccagattacagtgacgtataatgatatgctttctaatagctccagctgtacagacacaggagatgctaagttctccaactctagagacgagtaagcagagaccgagtgtccaggctgcaggaatattatagggttaggtttggtgggaaggggtgggaaactactcatatttagttttctttctatgaaagaagggtcacaattctatagtttatctcctcactagaaatataagccatagttgtttgaattccctgaaaaacagcttgagcttaataaaaaagaatgagaaatccaagggctgccacagtggcaagcccaggctttgattgctgctgcaggaacctgccctccatgctgatctctgcactgtggctgtcaatttcccctcatttggtgaaagtctaaaaaccagggcctggtatagcatggcatggtaccaaatattggactactctttgtctcttgaagagtcattttgccagatactactcagaaaatttgcattcaggctgccaaactgggtaaggcaatagcattgggtaagtttgggtcacttgttagaaaagacagtcatgtgggagtaccatggaatagctgttttttcataacctcttcaactaattcaaaagttagagtaaggctctattactaggtagaacaaagcacatggtacaaatttataaaagacacacccaacattatgcatccagaatgagaaggtttttcccttttgagaattctaatgattttattttgccttcctttagttttgaaccactatccttggctaaaaggtgaattaaattgccccagtgttcaactgtttgttcatgcaaataaatgaaatctctctgtgaattctattgttaacataaaaacctaatgttgaattcttagttacatttaacatcttaccacagataacatcacaactattaattagtcgtattccttttatatttcaattgaaataaagataaaaattgcagattacaaaaaggaatttgtgatcttggaaatgttaagaaggttttccctggaagctaagtttaataaagatctgtggctttttgcattgtaagtagaataacatgattgcaacctaaatcctatttttttttcaaattgagaaaatttttgcctctttgaaataggttgtattatttacctatgccaagttatgctgcagtaatgaatgactccaaaacatctgtcacttaaaacaacaaatgtttattgcttatccccattacccattccctgtggggtagcccatctggaaggtctctgctccagctcctacttattcagtgatgcaggtggattgaggaacggcaatatgggaccgcagaactcatgacaaagcattgtcacttccattcatattccattgtcaccaagtcattggtgtgaggtcagtgagtggggtaggaagggggctagaagcatcaaagggagacttaaaatgtgccaaaagtcattgtgatcaaatacatcctggaaacattttgcttcatctgctttgctctttctcaactacttgactgatatgatcaattgcatgattttgccaagccaccaatatttcatcatttgttactgtgtcctcagcctttggtaacctcagattattggcctgcaaaatggcggtttaataagctttcactgtgaataactagggaatgtggtactgtgcaaggttttctcttttccctaaagtacaaaaacacagtactacacaaagcccctacatgtatttttcttattaatacttcatagtaaatggatattaattcaggttactataaattacagtgaagcatttaaactactatggaattacacctcgtagccacctgaatacctggagggttgctggagagtaatgtgattatcacaagcaacaccagaggaaataatgtaatttgttgcctactacaaaatgctatcccatttttctaagaaccttggcaggttgaaagaagttcttttaaagttagtttattcaattaaaaaaattatctcaccatttccccctttccttcctcacccttaagacctttaacaagcaggtgtaaaattcagcaagtaagcttgttgaggactttcttgaagagaaagcttttagaattagctaggatagctatattctggagagcatttataagattcctgtccaagaatttgtgattgcttactttgaagtaatttagtttgaaatttaaattaagatagatagagagatagataaatgaaaagagggcagaagggagggagggatgaaggaagaaaaagagaaggaaagggagagtgggatcgagagagtgagaccatgtgatcagagagctacaagattatctttcctggtaacatagatttatcaaagcacagaagattataggagtgccaggtgctgtatgaaatggattattttcttccattagaaagtaacaccagttgacaggttttacttaagtaaaaaattaagtagctcttacttaatttctcactataatccctgaagtgggaatggtctgttctcttctttggccatcccactaacctgaaaacattggaatggtatataagtaggtatgcgggttgctgagggatctcatgttggtggttgctagtttgttctctgggttcttattctttgcctgaatgcctagaatagaatcttagctccctttgaaacaatttgtccctcaggagccatagcattcatatagtatctcctttttcaaatttcaaggcaccactgtgcattttctaccacctacctgtttgcatataatattcacccaaaaatgctcttttgaattaaaacataatgaaacaaaaattagggaaatggctcaatatgaaaaagcaagccaatacattcatggtctcaccactgaattacaatttcacaattttaaatgcaatttgtgatttctttccatatccaatcactaaaataccctcaggagttaggagaacagagaaaatacatatatatatcatcattactgtcttttagtttcttacctgaaaattcagatgcctccttggaacttctctattgctgaaacatttcacatattcagcctctcaacggttaataattctattatcagctgcatgccagtaatttaattcaagacacacactgaagggagagtagatggaacttgctggcagatttgtacacagaatgttagagaaagcaaagagtcaaggatggctccaaggttgcctggcatatggctgaacagtggtatctttacttaaatggggacattgtggagaagctgggtgtggggtaaaggaatatcaataattcatttttggacatgttaagtttaagatgttgaatgggcaattggacatgcaagtcagaaactcacagaagaggctggggttagagctccaccagaataaagatgttactcactgggatgagactggatggctttacataggagagggtgtagaattgaataaaggaggtctttggaccaaaggaatgaacagtcaacaaaagagacaggaaaggagaattttggtagatagggaagaatggcttgaaaaaagaaggagacaatgtaaatatgtcttccaagaagttttgtcaaaagtgggccagtgaaatgggagaagctggaaggaaaacctggtgttatgggagaggctgttttttaagatgagagatattatataatgtttacatgctgatgaaatcatccaatagaagaaactaaaaataaaggagaaatcaggattgaatgtgggagcaaagattttgcatatttaagaggtgatggaaatccaatgacaggtgaaaggattggtcttaatagaagagacacttcacccattgtgataggaagaagacagagtatgtggtgagagacgctgggggaatggggaagatgaggatatagacttctggttgcttttagtttctaagtaaatgattaaacatgttttatcagctgagactagactgaagattggggtggagagccaagatggccgaataggaacagctctggtctacagctcccagcatgagcracgcagaagatgggtgatttctgaatttccatctgaggaacgcagtccctcaccagcaacggaacaaagctggatggagaatgactgacgagttgagagaagaaggcttcagacgatcaaactactctgagctacaggaggaaattcaaaccaaaggcaaagaagttaaaaactttgaaaaaaatttagacgaatatataaccagaataaccaatacagagaagtgcttaaaggagctgatggagctgaaagccaaggctcgagaactacgtgaagaatgcagaagcctcaggagctgatgcaatcaactggaagaaagggtatcagtgatggaagatgaaatgaatgaaatgaagtgagaagggaagtttagagaaaaaagaataaaaagaaacgaacaaagcctccaagaaatatgggactatgtgaaaagaccaaatctacgtctgattggtgtacctgaaagtgacggggagaacggaacccagttggaaaacactctgcaggatattatccaggagaacttccccaatctagcaaggcaggccaacgttcagattcaggaaatacaaagaacgccacaaagatactcctcgagaagagcaactccaagacacataattgtcagattcaccaaagttgaaatgaaggaaaaaatgttaagggcagccagagagaaaggtcaggttacccacaaagggaagcccatcagactaacagctgatctctcggcagaaactctacaagccagaagagagtgggggccaatattcaacactcttaaagaaaagaattttcaacctagaatttcatatccagccaaactaagcttcataagtgaaggagaaataaaatcctttacagacaagcaaatgctgagagattttgtcaccaccaggcctgccttacaagagctcctgaaggaagcactaaacatggaaaggaacaactggtaccagccactgcaaaatcatgccaaattgtaaagaccatcgaggctaagaagaaactgcatcaactaacgagcaaaataaccagctaacatcataatgacaggatcaaattcacacagaacaatattaactttaaatgtaaatggactaaatgctccaattaaaagacacagactggcaaattggataaagagtcaagatccatcagtgtgctgtattcaggaaacccatctcacatgcagagacacacataggctcaaaataaaaggatggaggaagatctaccaagcaaatggaaaacaaaaaaaggcaggggttgcaatcctagtctctgataaaacagactttaaaccaacaaagatcaaaagagacaaagaaggccaagacaaaatggtaaagggatcaattcaacaagaagagctaactatcctaaatatatatgcacccaatacaggagcacccagattcataaagcaagtcctgagtgacctacaaagagacttagacttctacacaataataatgggagactttaacaccccactgtcaacattagacagatcaatgagacagaaagttaacaaggatacccaggaattaaactcaactctgcaccaagtggacctaatagacatctacagaactctccaccctaaatcaacagaatatacattttttttcagcaccacaccacacctattccaaaattgacctcacagttggaagtaaagctctcctcagcaaatgtaaaagaacagaaattataacaaactgtctctcagaccacagtgcaatcaaactagaactcaggattaagaaagtcactcaaaaccactcaactacatggcaactgaacaacctgctcctgaatgactactgggtacataacgaaatgaaggcagaaataaagatgttctttgaaaccaatgagaacaaagacacaacataccagaatctctgggacacattcaaagcagtgtgtagagggaaatttatagcactaaatgcccacaagagaaagcaggaaagatccaaaattgacaccctaacatcacaattaaaagaactagaaaagcaagagcaaacacattcaaaagctagcagaaggcaagaaataactaaaatcagagcagaactgaaggaaatagagacacaaaaaacccttcaaaaaattaatgaatccaggagctggttttttgaaaggatcaacaaaattgataggccgctagcaagactaataaagaagaaaagagagaagaatcaaatagatgtaataaaaaatgataaaggggatatcaccacagatcccacagaaatacaaactaacatcacagaatactacaaacacctctatgcaaataaactagaaaatctagaagaaatggataaattcctcaaaacatacgccctcccaagactaaaccaggaagaagttgaatctctgaatagaccaataacaggctctgaaattgtggcaataatcaatagcttaccaaccaaaaagagtccaggaccagatggattcacagccgaattctaccagaggtacaaggaggaactggtaccattccttctgaaactattccaatcaatagaaaaaaaggaaatcctccctatctcatttgatgaggccagcatcatcctgttatcaaagccgggaagagacacaaccaaaaaagagaattttagaccaatatccttgatgaacattgaggcaaaaatcctcaataaaatactggcaaaccggatccagcagcacatcaaaaagcttatccaccatgatcaagtgggcttcatccctgggatgcaaggctggttcaatatacgcaaatcaataaatgtaatccagcatgtaaacagaaccaaagacaaaaatcacatgattatctcaatagatgcagaaaaggcctttgccaaaattcaacaacccttcatgctaaaaactctcaataaattaggtattgatgggacgtatctcaaaataataagagctatctatgacaaacccacagccaatatcatactgaatgggcaaaaactggaagcattccctttgcaaactggcacaagacagggatgccctctctcaccactcctattcaacatagtgttggaagttctggccagggcaatcaggcaggagaaggaaataaagggtattcaattaggaaaagaagaagtctaattgtccctgtttgcagatgacatgattgcatatctagaaaaccccattgtctcaacccaaaatctccttaagctgataagcaacttcagcaaagtctcaggatacaaaatcaatgtacaaaaatcacaagcattcttatacaccaataacagacaaacagagagccaaatcatgagtgaactctcattcacaattgcttcaaagagaataaaatacctaggaacccaacttacaagggacgtgaaggacctcttcaaggagaactacaaaccactgctcaatgaaataaaagaggatacaaacaaatggaagaacattccatgctcatgggtaggaagaatcaatattgtgaaaatggccatactgcccaaggtaatttatagattcaatgccatccctatcaagctaccaatgactttcttcacagaattggaaaaaactactttaaagttcatatggaaccaaaaaagagcccgcattgccaagtcaatcctaagccaaaagaacaaagctggaggcatcacgttacctgacttcaaactacactacaaggctacagtaaccaaaacagcatggtactggtaccaaaacagagatatagatcaatggaacagaacagagccctcagaaataacgccgcatatctacaactatctgacctttgacaaacctgagaaaaacaagcaatggggaaaggaatccctatttaataaatggtgctggggaaactggctagccgtatgtagaaagctgaaactggatcccttccttatatcttatacaaaaattaattcaagatggattaaagacttaaatgttagacctaaaaccataaaaaccctagaagaaaacctaggcaataccattcaggtgggaggtgattggatcatgggggcaaatttcttaggaatgtcttagcaccatccccttggtgctgtcttcatgttagtgagtcgcttctagcatgatctggctgtttaaaagtctgctctctctctctctctcttattcctcctctggccatgtgaaaatcctgttgtttctttgccttcttccatgattaaagattcccaaggcctccccagaagccaagccgatgccagcactgtgcttcttgtacagcctgcagaatcttgagccaattaaacctcttttctttataaattacacagcctcaggtatttatttatagcaatgcgagaactgcctaatacagaaaattgatactgaggagtgggacatttcagtataaagatacccaaaaatgtggaagcagctttggaaccggctaatagccggaggttagaagagtttggatggcttgatggaagacgcataacttcctagagactgattaaatggttgtgactaaaatgctgatagtgatatgggcagtgaagtccaggctaatgaagtctcagatggaaatgaggaacttattgggaactaaagcaaaggttacctatgtttgcgaaggcataagccttagcaaagaacttggctacattctgttcatgccccagggatctgtggaagtttgaacttgaaactgatgacttagggtatttggcagaagaaatttctaagcagcaaagcattcaggatgtaatctgactgcttctgaaaacctatgcacagatgtagaagcaaagaaatgacttaaagttggaaattatatttaaacaggaagcagagtgtaaaagtttggaaaatttgcagcttagccatgtggcaaggaaagaagaagcatttttaggagaagaatttatgcaggctgtgcaggaaccacttgctagagagatttggataaccaaaaaagagccaagtgtgaatagccaagacaatgggaaaaaggcctcaaaggcatttcacggacctttgctgccctgcacagtctcaggacactgcttccaacatcctggttgttccagctccagcctcagctcaaagaagcccagttacagcttggtccacagctccagagggtgcaagctgtaagacttggtggcttccatgtggtgttaagcctgagagtgcacatactgcaagagttgaggcttggcagtctccacgtagatttcagaagatatatgagaaagcctgggtatccaggcagaaggctgcttcaggggcagagttcccacagacaacatttactagggcaatctttttagattactaagtctcaggtatttctttaatagcaatacaacagcctaatacagtgactgtatttgaagataaagattttaaagagataataaaaataaaatgaggtatatagtctaactggtatccttataagaagaggaaatgtggagccacaaagagacattgagacattagaaaagtggtcaacgcagagaaaagaccacgtgacaacacagcaggaagctggacatctgcaaaccaaggagagagatctcagaagaaacctccagaactatgagaaaataaatttctcttgtttaaacaacttaatatgtgctattttgttatgaaaatcctgggaaactaatacagcctctgtcttcactactagccttcaggataagaactaatcctttttttttttttttgagacagagtcttgttctgtagccaggctggagtgcagtggcacaatttcagctcactgcaacctccacatcctggattcaagcgattctcctgctttagcctcctgagtagctgggactacaagagtgcaccaccatgcccaagtaatttattgtcttttagtagagatggggtttcaccatgttggccaggatggtctcgatctcctgacctcatgatctgcctgccttggcctcccaaagtgctgggattataggcatcagccaccgcgcctggcctagcataagaactaatcttattttcctttttagaccttaggactcttattcagcatacccccccaacctccatataattttttcatctgactaatgttacaaatgtctaggattctttaccagaagaatgaaagaacaggtgagaataaatgtttgcacacaggtataaattatgtttctccccagtgtggattggactacatttaaaattccaaggtcaaaagttagttactttgtatcatttatttattttcaccatccaaatctctttcttcacacgtttttggggataattgttgggtggtaagaaatttggcagtgcttgtagcaaaaaagtagaactctagtgacttaattggcaaaagataaaaactgatgtccaaactgattgactgagggcttcaaagttatcatgtttgaacatgctcctttcagagtgacactgacaaaggcatcattatactttcaatttaggtgtaatcagaagttgagctccttcctcaggtttctgagtgtggccaggactggcgctctcttttccctctcaaattcctccttttcttaaggaaaataaatgtgtttacatgggcagacactttcaagttttctcagttctagttaaaacatttcaatttaatgttgccatactttagcaaacaacaacatagctaggcaggatgtgatgaatgaagccacctaaatattttctgtcaactacctttacagcatgatgcgcattaaagggatcccatgccttgcaaacagaactgtaatttcaattgacttacattttgtggttaagaacatgacttctgaccagcctgaatgacatagcgagatcctatctctacaaaaattaaaaaaaaaaaaattagccagcatggggttgcatgcctgtagtcccagctactcgaggggctgaggtggaaggattgcttgagcctgggagttcctggctgaagtgagctgtgattgcaccacggcaccccagcctgggtaacagagtgagaccctgctctaaaaaataaaaataacaaataaataaacaacaaatgaaaaaaaaaatgacctcttaccaaatgattatttcagcttctagaatagcctcagttcctagctagtgaggaaaacaataatctcacttttgcaccttgtaggctgacacatcttactaaaccctgaggacctttaacagacttgaattggatttgaaccacttttgtcattacatggtgagaggttaccatttgccataactttatttttctttaattttttatctaaagtcacaggactgtttcttcaccaggaaatttctgaggggtttgataaatgtagagtgacctgaaatagctcaataaacatactttttgtaatgactaaaggagattttgactccccgcyccccaggggattgagttagggttagaaagaagagtatgctgatgcaggaaaaccttttctgtcccaataagccattagtgttcacttccaagcctcccagggcagccaagcactaacaagcaatgacaaccttaagaccctcttgcctcccgatttattttcagcaaatccttctacacactctgccttttattttctggtcttctattaaagaattctatacaaatctttatactgcaatgttatttccaactgtaaaaaatgtttattagagagtcacaattccatatgcatcagagtctaattccccatattcccaattccactctagacacttcctttctcctggatttgtgggctttacttctctcgactccttctcctccctttctttctgccacctcttccctgttccctatccagtgggagagtaacagggatcctatgagagaaggactcataaggccaggagactgagcgagtctaatgatagaaagttgcgtggtatcatggctcctccatgtttcagtcttcaaataacctcaaagctattattctgatttagaatacactatatttagaattagttttatttctggaaactatgcaaaccaagacattccatttttatggcgatattctagccttcttttttatgtttatacagaatcttggtaaattttgccaaagtgtccctatagcccctttatgtcttaaagggtgccaaagagaaggaaaaagagatttgatttgttacctatttacttgttacccaagaggcagatctaggaccacagtgagaatattattgaaaagatttgacttaatttgaatccagggaggggaaggcccaaggataagctatggactgtcaatatatttcacttgtgacataccattttttgaatgtgtccttttctgaaagttctcagctcttcctgaaataagccaattttgtaagaacaagatgagtttctcagatttttgatagtttcaactcttcggtgaaaactgagcaacatatgaacaattccatcttttcaactatttgataggcaatgcaggccccaaaatattcagaaaagaggaagggcacacccaacaaaagaaacactccttccctgctaagatcagaattggctggagagtgaaaccacaatgattgctgttacaatgccatatggattcaagtctggtctatattataaatgctgagggagtcttaacctcctcctaagccccccagccttctgtccttgactggaagccaaggttttgctgtacattttgaagcatcgtccaagtattctcctgctctcttgcctgtaaagaacagaggctgtcttggataacgtgtccatgagagagtccaccctcacacactgtacagtccaagaaagatatgtcactatgtatatccacagctcttacaaaaccacacagtcatgctgtatgcaacactcttctgcaggacaaaaggtactggaactttccatgtgggaagacatggtcctgctgttgtagagatggctcagggggataagggaggtaccagaggtgaggatatgaggctatgagaaaatacctctaaagagagaggccagaactgagatgtgtgacgctttggccccattttatgcacagctgtgttataaatgtgatgaactagcatttcttggatcatgttcagcctgggccatgggacagcaaaggtgggaataaaaacaatgttaccttaggcctgccctcccccaggatgtgtatatctaagagctgaaaattgctgagatctgtcttcacagctgcaagggcttaggattgtatgaatataatatgtattttgtaactccaagttcctagttgtccataatttagaaggagaggatctctctgagtccctatctgtctgtctgtctctgtctctcacatctattttaggacttgttagagaagaaagtccttaagccagtttagatgtcctcttgagatcatgagggtaagagggtggtggtgatttttggtggtgactttgtcataggccattcatccattcactctaacaatcatcaaataattggccttatatttgggtgaatctctgagtaaactgcagtcaaacagttctcggattgcaagaggctctatgggcattcctgctccactggagaactatgtttgaaattaacaaaatatataggcatcttctaa

SEQ ID NO: 96830 - DNA, 12533 bp, Homo sapiens
tcctccccaacccgtttagtgtgaaacgggacaaagggaaacatttcctttgatctatttttggggaaagaggcaaatgtcaactaaataagatcatattagggactgggcatggtggcttatgcctgtaatcccagcactttgggaggccaaggtgggcggatcacctgaggtcaggagttagagaccagcctagccaacatggcgaaaccctgtctctactaaaaatacaaaaaatattagccaggtgtggtagcacgcgcctgtaatcccagccactcgggaggctgaggcacgagaatcacttgaacccaggaggcggaggttgcagtgaggcgagatcacaccactgcactccagcagcctgggtgatagagacttgactcaaaaaaaaaaaaatcctattaggaatttcatgaaagctcacacagttcttgcacacatcattcaaggcctgttatgggggcccagaacatcaggacacagtagctagcctcacattcagctccattgcactagagctttgcatgatctcaatttgaaaaacacacatgtatatcctacatttgtatctctattctaatattatatactgtatatgactttttaaaatattggtttgctgtttctattttgtgctaatgcaacaaatctaatttgttttagaaacagttattactgtttcttgcttcttatcaccccctaccgtttggactctgttgtccatctttctctgcctaattggaccacagcctggtgcctcaatccccacaaaatctgttcccttctagctcaagatgactgcattctctctcagttcgcagtgtactcatgggctgctcattcatctgcccttgtgctctgtgcctttttggcatctgcgggtaaactcagtgccacatatctctattctgttcactcctaatgtttgtattgtcttcccaagggacctctcttatggccctgctgggctcctccccttacccacatgtgccaagcatagaaatcaaggcaacattctcagtccctttaagggaagttccaggtacctagctagtcctacagccagcaattagggaagttaacgaataacctgctaaacaagaagataataatttaaaagccactcaagtaagtcagagtcacaaaatgtttgattccctgtagaaactaaagatagcatcttgacctattcccttgcattgcttttcagaaaacaattcccacaccagatggaaaatgctgaccactgtcatagaactcagacagactgaaaccaaaaaatagatatggaagttccagaaattccctagctcttaactcattttggataccccctcactcctgctttaaaaacccttgcttataagccagcagggagctcaggtgttaagtgctaggtacccattcttcttgcttggcacccagcaataaacgcctttttctcactacaaatctcagcgtcaatgtttggcttttttggcatgctgggcaaccagaaccaaccccatctttgtgtgcctgcatccaattctgatgagcctatgtatgtcaggttggtcaaggccctttgtgctgaacaccaaatcaacctaattaaggttgatgacaagaaactaggggaatgagtaggcgacctctgtaaaattgacagagaggggaaaccctgtaaagtggttggttgcagttgtgtagtagttaaggactatggcaaggagtctcagcccaaggatgtcatcaaagagtacttcaaatgcaagaaatgaacaaatctttgtctcacaaaaaaaaagcccacaaacttttgaatgaaatctacttatatgatgtgacacacatttctttcagacatggattttgaaatcctatcaataaaagccaccaagtgagacactcagttctggttttgagcatgtacctgctccgtttcctggtatctgcaaattagggtggcccagtgcaggctcctgaccgtttgaccatgacaggctgtctgaaccctgggagctcatcgtgcccatcgtcagagatgtccgtatgtgacacagcagagactaccccacagataacagacgaaagccagcagagtacaaggcctaaatgtgcatgtccttctgtttccttttttttttttttaggggttctgactgagcaggcagattggaaaggaagaatcagatgaggagcaagtgctaggtgttggggaaacaatttaaatttcctcccaccccagaaattcctctccataaaatataggaaaaagaaaatattttattattgaataaacattaaactagtgatgcacatctttagcattctgctaaggagattgcaaagacagacatcccacccttttatgtgggcaagcaaataggacccattcattacatacatgttctcgaactaaagtaagaggacttgacagcaccatttgtcaagcataattcatcctaaattcacctggtgaccatttgtgttcgctaattgcctttatcaaaaggaaaaataaaactcaagtttctaggacagcaggtagttttacaacttggagccaggtgcttaaatgaaactactacccactgccctcccactgacagtgggaggtagggagctatcttccttgatgtctgtattttcaaagagatggtttccaggcccttgcaggaaaagagtcctaggttgtaaaatcgactggagccttacttagcttttaaaaagatttatatacatttcaaaggggcagcaaaatataagttttctaaaggaaatgctctaagaaaaaggaggaagctcttcccctttttgcatgggcttgtggggtaacttacattctggaattcacgaggagcaggaattggtttcctccctccacgtgctggaaggcacagtgtaagaagcttggcaaggctccagtcgggtggacaatcactgggaattccacgcatcaaagggacaagggacaatcactgggtccatcctttacttcagagggacaagacccaatgaatgtagaactgggccacagtttgtcttggttcttaagcacgctggcccacacatgataggttatcattaaatgtctgatgagtaagtgaatgaatgtcaggaacctgagaggctttagaggtcatttacctcagctgaaattcaggcatccctttccctcagccctccttaaataccagcagtcctggggatcccaccacttgccacagcaacccattttactgttggataactgtaattattataacatttttaatatctgaataaggagagaaaacaaaattcgagtgctttcaagggcagggtacttttttcaaaacaatcccaagaagtaggtatcccatgtcacagaggagggaactcaaaaacagagacattaactaacagcccaaggtcacacagctaaagggaaatcatatgtatcgagtgtctgttctgcaccaggcactcatttaaataaagatcctttcactcacaatagtttaccatacaaatattacagcatgtctagatggggtcttaaccataccaaagtactgtattgcatgcctccatctgccctgggactaggaccaggtcacacactgcaaaggatttgagtggaaacgatgaatagacccctgcacacccatgtgcatcaatggaggactgtggatgccgtgtgcccccattcctctgggccattgtcattaaccctttgtctcccaaggaatggagctgccagagagttccagctgcctcagatcctccctggtctctcaggtatgctgagtgttttcccttaagcagggtttccataggctgatgccgaggggaggctaagtatggggccaaaatgcccacagcacacaggtgtcactccaggcagcactgaggggaagcagaaccaggggatggctcttggggccttccttcgcaggaacaccactcactacaggcttccaggcggtcagcgggtcatgtgagtcaagggcaagtgggtgaatgacactgatatgtttcaggtagggagaagccatggtgggcagcattggagggaggggaaagagggggtgaggagggggtagagatatgtatttgtctacttattcatctgatgactatttacctactatgtggcagcttttccagagtccttagtctgaggaaaaaaacgctgtgtgctcgtgttattcccattttacaagtgagcagatgcagggagagaaaggcaaaataactcacccaggaccacatggtttgtgagtggcagcgctgggattctggccagcagtcatagtccacactcttaaccacggccctctgctgggcaactagaaattgtgtgtgatttgtgctctacttggggagccagagcctgttggggggtcctgggagggcatggttggctatgggacagaccattcaacgatgttgtttgaggagccttgtcaggtcttaagcataccaaagtactgtattgcatgcctccacctgccctgggactaggacaggtcacaccctgcaaaggattcgagtggaaacgatgaatagacccctgcacacccatgtgcatcagtggaggactgtggatgccacgtgcccccactcctccctccccaaagctgctttccaggcatcttccaggtggggaaatggccattcccctcagcccagagcagacttagcctgcccttgaatgctgccaaaaaaaagaaagggctaaatgtgtcccctgttctattcctagtccagattcctaagatgaggacacagcatcctgggccactgtcactaatacaaatttgcctctggagggactctacggaagataattcccctgaaatttggagagttgaattaagctaggactgattctggctggaatttgtggtggctacgtaccctagagggcctcaaggaaacccacggttcaagacagccctgacagattctggagtctagaacagaaatggatttgaacatgggcaaggccaaccacccagttcacggcctgtgtacagcaaagattacgttacagcctgagagctaagcctggaagctctttcatccatccgtttgtccatctatccatccatctgctcatccatccctccatctgctcaacaaacgttagagaatcaatccttgtgtcagatactggggctgccctcaaggagcttttatagagttcagggtacagccaggtgggggagacagatcactataaaaacctaccactataatccaaaggacaagagcaaaaatagtaaagaggagagaagacccaaatttgcctggtgggtcagagagggctttctagaagaggtaaaaaatcttcggggctatcacttcaccttgcctggtggataaagggaggactttccagatacagtggacagaatgtgcagaggcaggagccatgagtggcagaggcaggggagggactgcagagacaggttggagccaaagcacgtggcactggagccatagccaaaggaacaaactgtgagacctgggacttgaatttggaggtggtgaaaagtgacaaggtcttcacagaagagtgattttttcaacttagggaaggctgaccccagaccaatgctgccaaagtgtggtctgtgggctgttagcagttcgtgacgatgtaagtacaggaattgagattaagcatttagaacacctacagcactttgatagtcattttactttttaaattttgagctggcattttatatgcctggtttttttttgtttttgtttttttattttttttgagacagtctcgctctgtcgcccaggctggagtgcagtggcgcgatctctgctcactgcaagctccgcctcccgggttcacgccattctcctgcctcatcctcccaagtagctgggactgcaggcgcctgccgcctcgcccagctaattttttgtatttttaatagagacggggtttcaccatgttagccaggatggtctcaatctcctgatctcgtgatctgcccgccttggcctcccaaaatgctgggattacaggtgtgagccaccacgcccagcctwattctctttttctaatagttgcactttatcatattttacaaatgtgtgagtctgctatggattagaaattaataagagattttgccacagatagtttgagaagcccagcactgccactcaacaaatgctggtgcattcagatggtgaaatattctgcagctattaaaggagttaaaactgcctccacttacctggaggcccatctgtgacacctttttaggttaaaaggaaaagaaaaacttgcttaggactgaatatgagcggttgcaatttgtaacaatgatgtatatatacatatacattttcatgtatttgtatgaacataaaagtattgaaggatattcatcaaactgctaaaagggttgcttcagagtaacggactcggagaaggcagattaattttctcttaatggaactctgtattgtatcacttgtaaaaataagcatgtgttatctttatgataaaaaagtaaaaacctaaaaaagaaaattttgatgtgtgttaaaattttggatttctaggctccaccttttttgaatgagtctctccaagagtggggccctcacatgtataatgagaaaaagctccccgattacaggatgttaccaagccccgctaggtgtaggaaccctgcttggtacccacccgagcctcagcagctcctccccatcatgggcatgatgaggtctccctgtgaggtgttgtgaagacgacgggacaggctgcagtaggcactgaataaatgagtcccttcccctgatgaccctaaggctatgggatcatcatcactccctccccaaagccacacctgattattccagccagcactcggcctgccccttttctgaatgctttttgattttaacttacatttttcgcatttaaatgtttcatttaatttgagaaagagtctcgctctgtcacccaggctggagtgcagtggtgcgatctcagctcactgcagtctccacctcctgggttcaagcaattctcctgcctcagcctcccaagtagctgggattacaggcgcccaccaccacatgtggctaattttgtacttttagtagagatgggattttgccatgttggccgggctggtctcgaactcctgacctcaagtgatccacctgcctcagcctcccaaagtgctgggattagaggtgtgaaccaccacagctgccttcttttaatttgtattttctatctctgcggacaagacttcaaaggtgtctatcacatactttcagatctactgatcatcctctgaaaaccaacatcggggttcacaaaatggatttaaccaattgggctccccagttcttcttccagactccacccctccaacagtgtctccaatgacttcctggcatcactgaacaggtccttcactttgccacctctgagcctttgcttgagtgttttctttcccctggaatatcctttccaaccctatacaccgactgagtcaaaccttctgtcttctttttgagcatttatgagctcctatcatgagccatgcattatgtaagggaccttacaaacacaatcagtctatgtaacaatcctgccaagtatgctttattttgggcatggggaaacagaggctcaagagaagtgacctgccccaggtttcagtgccagcacactagtagagctgggatttgaacccaggtttgtcttttgcactggattcagcttccttgcagaccgcagcacctcacatacagcccttcactgaccagcaattggagggaaaccacccctgtggcttaaaacctgtggtgccacagatcattccactcagtcaaacccccaagaccgtagaagtgcatttaacacagcagctcctaggcacaggattgtcacctcagggcatatgacttctaaagttgcagattataaacttgttctctttccctgtcctcaggctcccgctgaagtaacccagacgccagggatatctctgcccgctccactctgactctagtgctcaatgtgcctgccaggccttgctagggatgctgtgccagtgtgaagaggaaggtggtctccagctctcaccccatagaagctttctgcctcagtttccctaacctggaacaccacaatgactcctgaattgaaaaacactgcttacagcatctaggctaaaattggcagaatacctgggctccaagccagggagatttggagcgatggggaggtgcaagagcacagccagacagagccaaaagcaataatatcctgtttgttcctacactgccctccgcattaaaaaaacaacgacagctacatcaagcccttttgttaagtggccacaagctgtacatttcttggtcccaggcaggtatactgggagttcagatcctggtcttaatgctcttctctggttctgtgacatcctagaatgtgaagaggaggccttgggttctgtcactgcctccagcccgagccccctgctcttcctgggcatcccggatggaccatgtctgcctttctgctgactcagatttatttctggtccagccattcacagcgtccatgtgtctgaactcctcagccagagggcaggtggaagggcaggaggaggaccacgtgtcagctttccatccagagagccaccccaaaacagaggatgtccttgggcttggaccagctccacagaacactctgaacaaattctcacgatgccaggctcctaggccgcagaaaatgcctgtctcctcccagttctaagatagcaaagggtgtgcgttacctcaaaaccacttagtacgcagccaaccttaatgggcactcttggcattactgttctactcagcaaatagacagtcctaggcaggaaggagatatttagaatcctactctgtaaaacagaggcctttcctaggcctcctgtgatgaaggcatgggaccgttaccagactttgtccctcaagggtaaattgttttcaagaaaacaggaagctaggagccatctagtcctttgaagtgctgtgaagtgggctgccttcttccccgcccaagggagggagtctctgaggcttcctggcaagggttagtgtgacctccagcagtcaccttcagcatgggttgctgctggattcctggctctgtgggcaggagctcccagaatgcttgacacagactctacgtggcttcctttgggaagacaaatggagcctgctgtaggctatggcagagatggaggcccagggcctctgagctaggggcaaagtcagtctccctcctgtgtctgaaaccccaggactccccattctgtatggtactccccccgacccaacccacagtttccttaggaaaactgacctgcctatggcccatttcctaatgatatgatttggtcatgaggctggcagagtccatggggtgcatgtggcactcctgtgctttgctgtgacagtgccttaacccacaggcgtgattaactccaaagtctggggtctttggaaaaggtgcctatcaatgcagaggaagtgaagtgctcagaccgccaaacaaggccaagagcctcccggaagagcctgcctgtcaggaagtctctggccacatgctgtggccatgctcgcctctatgagaggacagagagaacagaccaaggacacgagttcagaacagagaaaatgtgagagccgtagacaggaaaagcagcccttctggaaacagcacactggtgtacctagcgtaaccttgtcctgagggccactaactgcccctcacttgactcagctgacactgtgaggggtcacgagcctggcaacactttctggaaggtctaaagggcagcactgaggagacctaaaggttttggtctgtttgtcaaatgtcactcttcctcacattcggaggagagcatttgaaggcagaccactctaggggcaagaacaggactgattttaaccccgggacaaccaaccaagcaagcaagctagtgaagaacaggcctctgcccaggtgaaacacgtggggccaattccataggtttttttttttttttttttttttttaattaacctccggtgggaaaggtaaggatggtggggaggggagacggttacttgtctcattatcaatgtgttagtattagtgacggcaaaactgaatctctagcaatactatttgcccgtttaaactgggcctggctattgggcttatgagcaaatagcttctcaaaattttaattttctagttagttcatcccaagtcactgatttacatgtcttttgagactgagactgctggggaaaaacattcccagaaatgagtggattagactctgtgaattacaagggaaagacactttaagtttaaagttgtcccaaacttagcgtcaaaatacagcctttagatttttttttccatcgagaaaaattcctgattcactaccaaaaagaggccctgcaggcagcgtgctgatttgttctgctcctggtgctgagctgcccccacctgtgtgcagggaggaggggtcgcttcggccaagggcgggagctctgctggctttagcgagtcaccattgcctcctcgcagtcagcgtcctaacggggtccccgtctacagcccggcatccactcctccaaggcccttcacactggctctagccatgacccctctttggaggaataaagcagagtttcacggactcaccgaccttgaagccggagcctcccacgtcctgctgagcgcacacagccaagaagtgtatgcagggcgagctggtcgggccggcctggaaatcctccctggcggggcggggccagaggacctcaccaatcccagcgtagacctccgggcgcaccggcccccacagctgtacccttgaaggcaggcccgtgggcgctgggccctttatagcacctgccctttctctgaaacgtaaaaggcggagccagtcttgcttcccaggcctggtcctggaggctcctttgccagggctctggatctcagaatggaagggccagcaggtgaaattgcacatctgttgggggatttgtttctctcttctctcaggtgtaccagccttggggccctggtgagctctggaggatgaacccctcaagccaaggtcggagaggaggatgtctcaagctgcctggctccagcagctgaccgggccctgagccaggggctggagggacctccttccagcgtctttgtctgggacctggatccagggacaattacagtcaggtttctgttcaagatcaggccccctgcagtagatggctagatcatctcgctttctgtccacaccagcttaacccacggcaggccatagccctgcttaaaaatagccccgcttgggatatccaccgcacgccgggaaggctgcctgtaaatagcaatgacccagcaggattttggacagcagccctgccatttcaagggagcctgcctaggcatctggtgaccgtcacgtactcagcttctgaggccacgtggacatgaccaattggttcctgtctcttccttctcagagcccagctcatgctcagaggacttgatggagcaaggggtggagccccaggaataaccttctacccagtgtggttctccttcattctctgaaggagtttccatttcttttaaacacgacccatgtttaaaaatatcatctattttacctttgcatggggtactgacagggagagcacgtgagggggccttttggcgggatgggaagtttcctgattggggtggttatataaagattgggaccaatcaaattaatttcataatcctttaaggagtcaagacccaccagcttgcatattctatcatcagggcagtctcggtttattccttctcaaaatagctcttttccacacacacttgtttcaagtcagttcaggcaccaactgaaataaatccattgaccctgaaatagcccagctcccagatccagaaaattataaggcttttaaagagcatggaattgtagatttaaagaatggcagttatagcaaaaacctccttttcctccccaattgcctaatcaacatttagggccccctccactcacccgacctcaacaccttatattttatagagtaaatgtttatgttagtaaggtcagaagaaaaattgggtcattgttgagaaaagagggtaccacccttcttttgggggactggtcctcttcaagcttattataaaggtggtgtgatggggatgaaatctctacaagggactcacagtagaaattctggctttctggaaatctttcaaatgccatccctgtcacatggcatctattcccttctcatcgttaccaactccttttgaagctctggggctctagccacaccaggctgccctgtggctggcttctgccataagggcaggaacagaattgaagtgtgcgactgccatatcatttgctttaaaggaaaatgtcctggacttattctcttttctgttcctgagtccagcaggagtgtggctagagcaggccccagatttgacc

SEQ ID NO: 96831 - DNA, 499008 bp, Homo sapiens
  misc_feature (1)...(499008): n = A,T,C or G
aaagacaatgaacaattttggaggatggaaataaaaaaatgtaatcaaaattgctctgatgaaaaaaacaatttagatgaatgaggccaaaattttattctatttttttgtcttgtaaagtcctgaatgtttcatgcttaggatttttgacatttattaactacctccagcaatatcttatatgagacttgcttgaaatatcctctccccaaccttccatcaataccaccactttacatttactaaaataaaaagtatggaactctgtgttttctgaagtagacacagataacaagttaatttaagcagttattttacataaacaatattgactgtaacaaactacatacaaaagacgatacaataaaaccaaggagggaagcagctacagaagacagtgaataataaaaccagcttttaagaaagaacataaaaaaaagtagatgaaagcttgagaacacaacctcaaacataactgaacagttaaattttaggctgggtgcagtggctcctgtctgtaagcttagcactttgggaggcggggtgactgaatcacctgagctccggagtttgagaccaccctgggcaacatggtgaaaccccatctttaccaaaaatagaaaaaattagccgggtgtggtggcatgcacctgtggtctcagctactcaggaggctgttgtgggaggattgcttgagcctgggaggcggaggttgcagtgagctgagacagcaccaccgcactacaacctgggtgaaaaagtgagacgcccccatcttaaaaaaaaaagttaaaagtttaaaaatcaattttgtatataatgtatatcatatgtatatacaatgtatatacaaaattcaataacattaaaattgtatattttatataaattttatatatgtatatataattttaaacaagtagattattacctcttgcaaatggagcatatagataccttgactgatttttttttacacttccatccaaaatatttttggtcatgtgtatgcaaacagatactacaaacttttatggatttagtattaaaatattaaaggaaaatgagccttatatggcatttttacaccttattcataatttcacttgtgtctaagagctctgacaggtgggtcgattaagaattatcatcagacatattttatagatgacatacctgtaggtcagatagacaaagtgaccttcctgaggtcacactattagctaaagggtgaaactgacatatgatcaaggtgttctgaccttttccgtggtacaattcggctttccaccatatcattactgagatgtgaaaaataagttctttattttataaataatccatctattctcctaaaacttgctgaaaaatgcataaacatcaaggataacatgcatgtttatccagaagagtcagaataagttaagcctccctggtgagttacacatctttggctgtagaagaatatgaaaacacacccagtctcagtctcatttgggttcatattttaagaacttaattgcctgtttgtccagacacactgcgctaaccataggggaaggaaaacagacttgcttctgttttggaccagttgatgtgggaacaataattcattattgttttggaactgtaatgtaaaattatcaatatttaatgggtgagatggcttgatacaaatactttttttaaactaggcttttctcttctctagctgtgccctgtcaaaagtcaataaaataaaaatttcaaaacaaaaacacagcagcaagtctcgattttgaccaccaattgaatcgatagttaatcagcactgagaaagaaataactgacggagactttctagtgatttgagagagtatggagagttcagtttatttcctaaaacctaaaattttatgttttcatatgaataatgttgaaaacatgattactagaaaacaagctgcctgattttgactgcactgagaaagaaagatgccctctaattattcacacagtagtctaacctttaccagtagccttaaacttcagcttgttttctatttactatcttcacgatgttcagattctgcagcatttattgggtgtctgtgatgaatgccttcaatcctactcatagttttaacattactgcttcttccctcatattgttttaaagtttttgttttgtcttgcttcgtatcaatatcatggctcctgttactttcttttttacaatttttatcattatttcttgagtattttttatgcatcagacctaaaacgagtacttttagatattatcatatttcatcttacttgaccttcaaaacccacgaggtgggccgggagcggtagctcatgcctgtaatcccagcagtttgggaggtcgaggcgggtggatcatgagatcaggaaggagatcgagaccatcctggctaacacggtgaaaccccctctctactaaaaatacaaaaaattagccaggcgtggtggcgggcgcctgtagtcccagctactcgggaggctgaggcaggagaatggcgtgaacccaggaggcggagcttgcagtgagctgagatcgccctactgcactccagcctgggcgacaaagcgagactccgtcaaaaaaaaaaaaaaaaaaacccacgaggtgggcatcattatgcctattgtgcagatgggagaaatgaggactcaagactcatttatcagcagtctcatattcatgcagtagtgaggctggagcacaaaaccaaatctatctgatttcagatctcatgttcttaatttctaaccaactcagcttctgctttgttatgttatatcatatataatttcaaattgtacacctatggtgactacttctttaaaagtttatacagaaaaggaataatgtatccatccttcttccacacattatcatccccatcaaatcttctgcccaaccatggcccatggggacttcttaatttctttctatagaaaatataaaaaggcatcaggctgattaacacattcagagagtgttaactctgcactctcctaaagaggtatgaaaaaaatatttcaccctgtcgattagtctgtgtggtaggttagagatggacaaaaattcttccatacttttcccatctccttcctctcattttaccacctaagctggactactcctttgaccaatagagtatggagaaggtgatgcttatgtcattttgggggccagcctttaagaggactggctgtttctgccttggcctcgcaaagccctgaatcacaatgaaagaagtttgaccagcctgctgaaaaacctcatggaaatatcttgagattacatgaaaagaaacatgggctcatcagagcctggcctcccaaccacgcctaccaaggttttaggcatggagtatggtaagtcatgttcccaagagacagaatgtgagacttgaactttgtgtgcagtatgttactgagaaattctttcccaaggacaatacctgtgagtgaggagcaaagtacactagggagagagaggagttgagctgtgataccatttcaacaggtaagttttggagctatggtggccattgagagttgttttgtattgaaacaaaaagtcagttcttatgctatgctccagcataggagaatcactggatgcgggcccatgtccacccatgcattagggggtttgcaacttttatttaaatggctcttatttaggagtctatgcaaataagtttcattgtttttttcttttctacaaatcatagtccctttaaatatgtattgttagtatgttaagtttttacatgaacattttgtaaaatgttctaagttaaaattgacaagattcttcttgtaaaacctattccaagagtcctctcctgacacctaccatcttcaaactaattttagtagagaatcaggaaagtcaaattaatatcagtctactaggaatatcttgcccaaaatcctttccaatcccagagctcttttgttagattctttttttgttctaattagttgtatagagaatcaatcaaaggagtatatagataaaaagtttcaagtcttactgtattaaaccaataagaatcaataagaaaatcttcatttttatctacttctgatttcctagacaaagaacttataaagtagggatcacaaactaggctgcacataatattactgccaaaattagaggggaaagaattgcttttttgacaaattaattttatatttcaaatggcctaaagcagctctgtcccttgttatattttaaatttatattaagttgataggtgcagatcttgatgaagtggcatctttctcttcggtcatagcaagaaggaaacaatcacgtttctctgggtcagtgttcccatttgctcttatgaaatggccttagaaagcaactgagcctgttttctctcattgccatcactccataaacacgtagttttacaactgcttaaattaaaatgacttgactctacccaagagctctactcattccactatttagaaaaccttttaacctatttagttaagtaataagattttactcttattcaaaatctcacattttaattaaggtaatcggattgatagagttgtttctaagacagaggtagattatcaggccaaaatcgcctcttcttaatatgtggcatagaacctaaacatctcaactaaataagtggccatgtacttacaaaactaacaattttttaaaagaaatttatattctcagcatctctacagctcacctccatttgattggaaaaccctgaaactgagcagaaacttaaatcaggctcctacatgttcacaatggaatgtcagatctgtggtctctgcagctcatatctaaagcatatggttttccttgattcaagaacacaaaatcgtggcccacagggcactcatcagagaattttcctcagaactgactgcctttcagaatttaacaaagactcacttaccacaatgaacatttgattcaaatgggataagagacattttaattatctgtgaccctggctactggaaacataatacctctatcactagctaccccaaagcttatcaagagcttacagaaatgaacacttttatgttctcttgctggaagtaaaaacatatttccaattttctgttggacacctgacaatatgaactaaaattgagaatgcacatgttatatgacctagaaactgcaggggcaagtatttattctaaggaaattattgcattttttacaaagttgcatggacgttgactgaaactttcttttcttaagagagatagtgtcttgctctgttgcccatgctggagtgcagtgacatgatcatggctcactgcagcctccacctcctggactcaagcaatcctcctacctcagcctccaaagtagctgtgactataagagcacagcaccacacttggctaattttttttttcctagagatgaagtctcattttgttgcccaagctggtctcaaactcctgggctcaagagagcctcccacctcagactcccaaagtattggggttacaggcatgatccactatgccaggcttgaaactttttacagtgcagataaattggaaataaccttaatactcattgagagaaggctaagtctggcatagtaatacaaaggaataccatgtagccattaaaaagactaaagtagttttttctatatatgaatctgtaaagattaattgctaagttaaaaatgtgaaaaaagaaagtataatttcatcttgtttttaagtgtatataagtatacatatgcatataagaaggtatagaaaaatagacacagaactgtaaatagtcactatgcagtggtggagactcactgattttagactttatacatttctgtattcttaactttttacaatgagcctacagtacctttttattttaggaaaattaatttattcattaaaaatgcttcaaaaagaacaggctgcacaatattattttagctcccatttaacttgtagagttaaaatttcatgttaaattctcatatytatagaggagatgatataagaaaacttgaacaaatgtttttaagcaaaattatagttagatcacaataacgattgttagtatccagcactgtgctaagtgctttacatggtttacttcttttaatattcagaactccctaaaataggcactattattatccatactttataaatgagctaaaaaatagtactattattagccatattttacaaatgagcaaattaaaatttagatacattcagtaactttgccagtttggggtagaatcaaaatgctaaactaaatatgtctaattctacagccaatgttcttaatcactatgctagacggtttcactattgtattacattaaggccatgaycagaaaaagaaaagctgctctttgcattccatatttgtcatttttaagatagggtttggggctttagaaaggtcaaaagagctgtgggaaagaaggtcaaagcagcctccagctatatctcagtctgaaggtcaaagtcacgttgttcttcatagctcacagaagcttctscaattctcaaatctctgggaagcttccatcagtggtctcagtctatagtgggaaagcaggtgcttctcagcttactgggggagcctccaggacatttcatatctgctcatgcaactgcctctgcagaatactggttccttctgtcccatcttccaatatcatgcagcacctctcatcggccagctgtaaactgaagcaacacggaaaagaggattctgggaaatatgatacctggcttcttctctacagtgcaraaataatcttggaaaggggttgtgggatgctaagttgacaacagatgatccaagattattggtttattagatatttcatgtgtatatctatatagagagacatatacagatacacacatttatatacatacgctatacattttagatgtatacataggcagtgtagcataatagttaagaacactgactaaagtgagatggtttgtactcaaatcctggttccccctttttaattgggtggctttgggcaaattgcttaattcctctatgcttcaatactttcatctttaaagtgggttagtaatattacttacctcataggattgttgtgaaggttatatataaatatatatatgtatgtaaataacaaaaagtgcaaatttagcatgcttaaggcaataagtgagacacaacagcaaaagatgtgttcaggaatgttagtaatggtattaagtatgaagttcattctaagtgtggtttagaaagagaactcagaattattaactgaattataaacagaattaatggaagtattaacataatagatgttgtgtaatgttttaattattgttgtatttgtggttattggacatcgcataataaaatattttagtatgcagtgccaggaaaaagttttttcttttgacacaatatgaatcaaaacctcatcatactttattttgtttgtgttgaaattcagaagtagatttagcacttgtttaaaatgactaacataccagcttcagataaatctattcattaactacacttgttagatctttattctgaattttatcctccattgtccaatttatatattcagtttgtaaggtagtggaatataaagataaggaggaattttagaaaagagaaaagaaggaggaggacttgcccttatactctatattgcttattttcatctctttcaygccctcctttaatatttggttcttcattagactgatcttcttaaaaactaatttcaattattatttctgattattggatgcttcatttctaagaggtttttatgttacctcttagctggacttcctaacttacattaggaaattcactaaccctgattccattttaaaaacagatacatattttaaaactccttgctataattctacaattcacttgagtaagaaacagagttactcatgtaagaagcagctcaagtcaaaccagtgcctggaattctgagcatctctcccatcatttgttaaaagcactgattggtttcaccacccagcgtgacctcaaacataggatggttcttttccactgagcagcagcaattgggccttgatttgaaccctgttttcaacctctgaaagttgaatttctctctctctcttaagtgtcctcaggttccctcaaaaagaatttcaagtatgtcatagttgattttttaaagtcagatggtatcccacatatctttcatatttagtgaaaaatatccatcctcattttcagcttctctggagggtggctacctctttctttgacatagtcttcagagccctcctagtgaatcttgtagatgatacctacacagcttacatttttacatcaggccattccaaacttacaatacaaatttggtgacaatccacatatcctttttcacatgacacattagtaaaccagcagacaggtttcacttttatatagatttgaaagattaggtaagtggaggtaatgtctcccacacacacagaatatttaaatatgattacttctaactcaagctgtcagtttattcttaaaactcaaaaagaatcaggagattaatactgtagcttgtcatgttctttgatttcctttgaaatcatgatggattcttctcctttgacaaccttcataatggatctaggaatgcatggggaaaaattgctggcatttaaaaaatctatacactaactcttacaaatacagttttcaaatatgcaatactcgtatctgccacaacaccatttaacattaataaaatttaaaacactagaaaaaaacttcctttttttttcaacagcccaacttaatagtcacatacatacacacagattaattattcatgtaagttggcattgttgagagaacaataatggtgatcatgctaaagagggaatctggggttttcatataatttccatttaggtcatgtttcaatttcatatataacctaacctactcctaactcctctttatgattatgaaaaagacttccttctacattggactcattctacaaatgtagaagacaaccttctacatttccataataaataatgttcctgcgtttaggcttctttgatgtatttactctgaggataatctaacgctgaaaatcatatcaacaggtcagattacatttgataatggaggaggtgggacttgtacaggatccttacggcccaggcctttgcccagctcttagacaggagaacagtgcacatgagtccagactccagtatccagtgcttaggtaccaccttttcttagagctctacaggcagtactgtggaggcctgagagcttgagaggtctgacgagacaaaagtgagtatcctgagagcaggtcttatagagagccattacaaagtaaacagaaaccaccagctgcagtctcagtgaccactgccacagagctccatcttgacctgaggattctagtgccagtcagctctcctacagtaattctgtgttccttactgacgatcttcagtaaacttgctttgccactgccctgcttcctggatccctgggactcatctatcctgagtggcatataagtgccaagcctgtgtcatttaarccttcctgacctagattgacactgttgtgactgtaactctgacccaatgccaccaccagctgatgccaaaacatctttttcctgcttgctcatctcgatgcaaacaactgtggattaatccaagcacaggtgtgcagcctgcatagtacaaagcaggggttctgcttgagcttctcaagcattatctcaactactcctcacaagctcactaggaagcgggcactgagcrtccttaccctacacatgaagaaactgaactcgaggattaggtaacttcccaagtcatagagctggtggaaggaagtcatagagcagggagagaacctggctttgtgctaagctgagtatagactgtgagtacttaatcacttcactagagcacttctcactggaaagagaaggtgggctccaactcagaagcaaagccaggccgaagtaaagcttgtgctatcaataaaaataatctattaaaacaagaaaatttctgcatactacttcaaaataatagtcaatctcacacttctgggtctttccgygaccctgcacgtctcagtcagtattccaaattcactcccactagtctgcatattttgttttattctgcaggtgcctagtttctggagtcaaaaagcccacttcacttcagtgcacacagatccatgccttcatcttgagctacagagtaatcaagaaaggaatgtccagcctagccacccacagatgggtggcagaggcttggaaaaataataaatctaccctagcatgtttcatctttttctaggctatggccacagcctcctgtctgaatctgtgcatgcattctgcctttccgcagtttgttctccacaatgcagtcaaggtattcttttcaaaatgcaaatctgatcctgtttcttgtcctagaacagtgttcccttcctctcatttcctgattaattcacccctatccttcagatttcaggaactcaaccatcacctccttgggaaacctactctggtcttcctgacatggttagataattatattatatgcctttatagtatcatgaacctcgtcttcagaggttttgatacatttacaacaggtaagcaatcattttacagcatttgcttttgtttttcwtcatctctgtagctctcactacagtgcacagcacagtgtagaggctcataagtatttgctgaatggtaagtgatctggagaagtgaatgatattggcaatttgcattcacacctgggcacgattgaaattgacccaagtgactggcacacttacaaactgactaaagtaaaaggtcagtaaaacctttacaaagaatgacctttctacaatattataaaaaccatagttcatacacagccctggaaaaacttttgtgagataaattatgataaaaaatgttgtatgtctcatggttatgatatattgatatcatggcccctgttttaacttttaaaaaaatcaaactaactagctagttatactatgcttagggaaactattccttcttgattataagctgctgtgttacttttctcttccaaggaaatacgaacagttatcctgcctcaaaggcatataactaaaatatcatatggaggaataacctggctattcgattacttaatttccaagtagcgatgtattaccaaacaccattcttttgttcagtttttgtattacagagtgacatcctagcatcaaatcatggtgctagtgtgtatgctacagtcaagacacacatttgagtgattcttttgtttttatccttttttcccctttaacatggtgataatcagaacaaattgattttgtttctcagattgctgaaatcctcccaacactttcttcaacaccaaggctgaataaatcattgtaatgttcccctgaagtgaattgaaaattaatttacacaaccaagatgatccttctaataacagggtacatggaatggggaaattggaaatcattacccagcaaacattatctgcattatttttgtagctgctttagattgcattgtaatagaaaattaggagaccggctgtgragaagtttaagagggtcccctgaagagcttctgctttaaaattgattctttaagaaagcattaaaaagctattggaattgattgcstgctaatataaaggaaaaactctttgccaccatttgagttaaaaaagagcatcttcattcatgcatgttattaaaactactggcctgaaagcccctgtagaaagataaaggatatagatgggatattaaaacggcaatctttaccttatctgggatttagacttaatatgttgcttttattaatttagcaagaaccattagttaggatgtcaaagagtgactatacaattaaaatgctatagaatggtgagatctttaataaacagtagaccaggaattcctcattaatcttccaagcataagccacatccttacaaaaaataaatcctgaatttacagcttttgctttattgytaagtttcctgtgcagcagcggtagaagtcatagctgataacacctctgattagcttttgaagcttcccctgaaataaggtaatgaccaatcggatcccagcagttggccagatagaaaatgacaattactatctttaaaatatgtctatggagctttgaaaggtttccatgtacctggtacagtaggctattttttaagcaatgatattatagacagatttacaaacacataagcaaacacagtaggatgtcttgacactaaattgttttctttttatagcctttttatttttaccacattcagtgggaaattgccttgtctttttaaatacatgataagtaggattacttagcagaataatgagtaaaaaatgccttttcaaatacaatagattatctttttctttaagagttatctcagacttaaacagcacccttgccccaatccctccctttgtctctctccctctgtttaaatggattgcaaataatttctacacagatgaactatatcaacaaagttctgatagacaaatagtagatcactgtaggaggtaagctaaaagtgcattcctagatgaaaaattatacccactatcacattggagcattgttttcagtggtatcaggtccttggtgaggtaatagaaaacagcctcataatgaggccctttgggtagctcaattatgcaccccctggagatcattgaaatggccacccacaatatactagactaataacacatttctcatgtatcccttgaaatattaacatgaaacctaaaaaagtgttctgaacttaacatcagaacaattctatattaaactatattcatcaaaatagattttaaataagcttttctatatctgttttattagtattttattttcagttgattaatagagtcataatttctatatgttctggtttgcctgggacagtcccatttgaggcctgttgcctagagtaactattaatagcaatccccttcactccaaaactgtcctgatttgagggtaaactacatagccaccctacttataagtgatttctgatatatttaacttttaggtcatttgtaacagaactcagagccatttgttatcaaaatagtcaagcttaaagctaaaatagctaagtttttatgttttcaaaatgaatttcaatttttctaccacccataaaacttcttaaaagccaggacaacagttaatccaaaaggcactgttacaaatatttaatgtttgttagtgttggttataaagataattataatgatcatattgttaaaatgttaataagaaataaaaaacattaataaaaataacaaaaattattatctttattactaatttgtaacacttttagattacaaaaatcatatataatcctgttaaaaaaattttaatgactaaaatagtaagtgaaagttcttcataaacttacctcacaaagccaaccattctgaacagatctttgtctacagatgcaaacagaggtgttttttttttctgaaaatagaatcacaatatttttaaactggtattttcactstgttgcagaaaccagaaagaaaagaaatatcttaaataacraacataattataactctttattatgtccctcaattctgttgataaaaagtgaagaacaaaaatagtatttgttgacagggagtaaaagaaacctgtagagcatatggcaagcccagcagtatgtatctctgtctgccatcagcctctttcatgtttaagtttctgggcttctgtagcttcttctaacttaaattttttactaacattcctagtgctaaacaccatgataaaattaaaactaaaagagacaaaaaaggaatacaattaacatgaatgttttaattaaaaataaacttccaaaatcaacaatctggattcctgtttaaattaaaagtatgttcattacatgaatattatgggccaatgcatattataaggatttaatagagatttgttaatgcttgtgataaagataacaatgtttatgataaagtataaacaagcacaacaaacatgtccttcaataggtaaatggataaactgtgatacctccagactcagtgctaaaaagaaatgagccaacaagcaacgaaaagacatggaggaaacctaaacccatactgctaagtgaaaaaagctaatctgaaaaagctacatactatatgatttgaattacatgatattctggaaaaggcaaaactatggagacagcaaaaacatcattggttgccaggggttagtgggaagacaggatgaataggcagaggatagtggatttatagggcagtgaaaatactctgtatgataatataatgatggatacatttaattatacttttgaccaaacccatagataaaattttcaaaatcaagagtgggccctaatgtaaactatagtctctgggtgtcatgtatcaatgaagatttgatatggtttggctctgtgtccccactcaaatctcctgtcaaattgtaatccccacatggcaggggcagaacctggtgggaagtgtttggatcatggaggtggatttcccccatgctgttctcatgatagtgagtgaattttcatgagatctgatagtttaaaagtgcggcacttcccgcctcactctctcaytcctgccaccttgtgaagagggtgcttgcttccccttcgtcttctgccatgattgtaagttttctgaggcctctttggccatgtggaactgtgagtcaattaaacctcttttctttataaattacccagtctcaggtagttctttacagcagtgtgaaaatggctaatgcaagcttcatcaattgtaatagatgtattacactggtaaggaatgttgataatgggggaggatatgcttgtgtggagacaaggatatatgggaagtctctttccactcccctcaattttgctatgcacctaaaactgctctatcttaaaacatgaaaacaaaagaaattaacaaaaacaataaaattaatatgatattttaaaatattattttattatagatttgtaacttttcagattacagaagccatgtacaatataaaaaaagctatatgaaatttttccttgtgtgagctttggaattttcttctttcataaaagttctcactacttaaaaattagaattttctatattctaactaaactcttacacaaataataacgtgaaacaccacatgtattggttataaaaataactttaacattaaattagacaataaaatgttttccacattcgctgataatagagatagaattaaaatggaaaagcaaacatttttaaaaagcttttccccctgagaaattatattttgttagttatttttcaagactcagtgtctctcacttttgaaagaagtacaaagctagaaacttacctatgattctaatggataggaatgtcattaaacaaaagacatattygtcaatcaaaaattagttgaaaatgactctaaaaccatctccacatgtcaaaaatcagagagaaagaaaaaaaatggaagtgagttcatctgtatatcatatatctgactgagagatatagtcctccaaatgggtaagaaattggttggaaaagagtgttcaaaacctcaaattggtagagattatgttctcttttctcattcatttcttaacaagtgcaagttgctacttctctacacacatacacaaaaggaaagcccaacaacagcttattggaaaaccgagaaaatgtgtatctcttacataggcctacattagtagaaagaacttaggaaatgtaaagaacagaaagttagttttacctttgtagtttcaaaggagttataaaagactaaatagctttatttgcatacgtttctgcactcctcaatctttacaaagtagatgaaagtccactgaaaaggtaaatactctcacctttattacctgttaaattggtttcaaataaacagtgggcataacagctaaattgcatgtctcttgggaatgagagtatagaaagacacacacatacacacatacacacacacatgagaagaaagccaaagctgatagaatatcaagtcattcctttttatactgaaaactccaggtcagtgtcaagctttgttagagatgcttaaaataaaaaatgcagaagttcaaaatctcacatgtatcatcattttaagaagcatttctcccacttttcctcccttaattaacatgttaaaggaaactgaacaaatggaagcgctatcaattgaaggacattctttttaatagaccagacatcatacttcgactaccttcaccagatctggaaattgcctgttgccatgtcactgagggcaactatagaaaaagagcccctatcctgaattgcagctcagccatgctcatcattctccstgttgttgtggcagctgtcaggaaaaattatttgaacagcagcatmttgaacagatggcttagagacaagttagaaatggaaacacctatgagaagaaaattgcaaaagtcaagcctagacttcaaagcacagggaatggactgctcaccagccctgttctctagctatgggatggaaaggtatatttttcctacacatgttaaacacacttcttttacccctttggtccatgccagactcttgctggctgccttacatggctaccccaactccgtaagtgttgagggacaatgcaactccattctttctttctcagcagtcagttcttctgggagaatcaatccaaggtagtagyagacgggagacacattgtctaccagtttccttctcttattcctcatttctttctctgtgaccagggcctgctttccttcccagcctttagctgtatgtcctgttttgtccttatcattcaatatggctgtggtagacaggagaatgtgccttgcagtactgcaactgagaggagcataattgaccaagggacccattgctgtattctgaatccagcactgagttggctgaggccatgcttcccatgtgctgctcccaggcartgattgagcgcagcagggatactgaggcagctacatttttgagagactcaaactcctctgccatgtgactttggctcagggactacacataggctttgccaaaagtttcttaaaactactctgatccctttgacttttcctgctcaatcttcctcccttccctctctactttacaggggtcaggcctgcatcatgatgtgagagctctcctaccttccccaattttccctctaatacatccttttgtgtctgcttattgaagaatgcaaaccaacacagtggctctgcccctttacatctcctaatctgtatatatcctctgaagatctgctgagtaataagctggcaaaaggggcctggtatgtagatttgaggaagtccacggtcagtcaaaagcccacactgtcagtgccagtccacatgatcagtgataaggagcagagaataaaaggataaaattcagtcggaactctaatggagatgctaatcatcagatcctaggagagagaaggcatgcataaagctatctgaaggtattggagaaaaaaacatgttagtggtaaaattaacaagatgtgcagaaagtacacccggggcaaaattccttgttcccattcagaggcattcttttgaatcaactgtctggaacagcacaggggacatacactgagctgctcatcaagaatggaacaggaactgcaaaaaaaaagtgtgggagggcgggtggttgataaaattctaaagaaaaagctcaacttgaaaaaggagtcattcaacttttcctgaaaacggccagataaaatgtaaaaatcattcttagagtaggaactaagcaggaggagaattaaattcaaaaacaggaaaaaaatttaaatttgttctataggccatgggctgcaacacctggccttgaacagtgaagagaattctacctaagagccaattcagtaaacataaaaatgtcacatttgtattgtattcaaaatgaaaataatttgatatcattctagaaggggagtgtatatttaaatttactgcttcatttaaattatcagcttaattgaataagaatattactaagagaatctgcatttttttaaactcaccaaaatgttaattatcttagtatatttaaaaagtagcaataagarggcagcttttacatatttttaggttgaaattccattcagagctacatcttgcaactaagtggtttcttgtgtccaaagkagacagatttccactccctgtttgggraccactcaagcagattacacaggcatcaagactagctggctctgtcatttcattttatttgcaagggaagagtccaccctttatctttttttttttgagacggagtttcactcttgttgcccaggctggagtgcaatggcacaatctcggctcacggtaacctccacctcccagattcaagcgattctcctgcttcagcctcctgagtagctgggattacaggcgcccacgaccacacctgacgaattttggtcaggctggtctcgaactcccgacctcaggtgatctgcctggygctgggattacaggcgtgagccaccatgcccggccccttcatcttttttaatactttagttcccagtacctgaaatctgatgcaaaccatatttgtttatcagtagtaacattgctgatatagttattcattaggcatttttctctatatgtttaaccttggcacacaaccttccttatataatttaacactatgaggttggcaagtaatgggtggtgaaaccgagactcttggtcaagtgacatgacttgaccaaggtcacagaatgaatctgtctgtagcaaaatttgtttggctttgccaacactgtactctttccctttcttccggtagtagaactattttcctactgtctactctaccctgtgcaggattctggtagatatgtcatttatgtggatggccctgtgttttatttgctgacttaagcccaccaccagaatggataatcacggtagattcagtgattgatctaggaggaaactgtgattcttgcaggaacagaggtcaggcaacagatgtggatgctgggagagaataatctttctgcttttatgatagtgagtgctacatgttgcccatatttagggtgccaaaggccttctttgtcacaacacaaacatagcctgctggtgaataaagccaatattgagaaaggcagagcagagaaatggaaagagagcgaatcccatgacatcctctaaaaccacctgtagctgaagctcgtgcaaaatccttggaattgccagtagcaaaagctaataaataccccttttgtttaaactagagttgggtttctattaatgcaagagaacaagtcctgtctaatacagtattagagccagagagccagaattggactcaattcccctgattatgtaaccacattaattgaaagtataatttttcatcaaaacaaattagagttgggggccctatccttgttaatagtgtaatcaatacaaaatgtaggaattacacctaagtgtcctatgcattatagctccatcatggtaattagyatttcttattataattacctttttatgtgtttcttcatgaatctcttgatgacagggattgtatcttattcatctttgaaatccttctgctaagcacagtccttaggacttagtatgtgctcaataaatatcttctgaatagggaaatatttatagcaatttaccaatacatgaattccacttcttatttcaaattaacttggaaatatcttgtctaagataagtacatatcccaatcttcaaggacagtcttcaatcttatctttgtttaaaatgtctgaycttatccaagaggtttcccaatcactccatctaatacagtattcttgtcacttttgtcctctccttagttttcttaataatatttaccgaaatttttatagtttattctttgccttgtttcactagaatgtaagcatcttagagcaatctgtggcatagagagggctctcaaaaacaattgaatatttataagtaaacaaagtaactggtggtacattcgattctgcatttgtgataccttccaacacattttagatattcattttatattttataatgaaaagcataacagttaaatctaatatatgtacattctaatataatgaatatatgttttaaaaaataagaaatgctgtcctcagtaaaatatctcaccaatgtatgaacactgaatccaaaaatcttctactaaatctatactggtaatcttattgattaacatagtattgccttaagacaatctgctaacagccatctgtttgctcgtgttgttatagtaatgctatcttagcctagattaactgtataaacatattgaggttttagtgaaatctaggtgtatatcatggttgatccatacaaagtagtcaaatgttattttaaaatattttatttgactttgactttttgtatagcctaatacaattatctatagtcatcaacttttaaatatatacatgtataaacataaagcaattataatttagtagtaaaattatattttataaaactataagttaaaaatatatttaagtggaaaaatagcagataaaaatctctcatgataaaaagtgatgatgggaaggayggcatcatggtggattaactagagaaagtattttatttttacttcttgtttcattaacctctctattaaactgatggcttcagaaactgtgacaatcatctttgctccctctctcttggtttatgtgccaaagcttagctcttcttggtgatctttggggctatgaaaaatgacatgctagktatttttcctcaaataacattaacttttaaaaatattgtattgcaattataatacaaatcactagccctgtgtgattgaaatgataacagtatattgtcctttgttgacttcgaatacccagctccttcttgctctttatttctccagttaccagaaagaacagctgtggttctacatggggtccacctggcagcttgaagcatccagatgtcaactcctacttaaaaaaagaaaaagcaagcactcttttgccrtggtaatgttgccttcagaggcaactggtgtgggagtggagattaaaggaaagaaaaattagaggcgaaagggccacgcttccatttgattctcacctgtaacaaatgcagatgacatgcagtgaaaaataccagttccctgatcaatgaattactcttttctatttgacaggtgtaagtcaagtctccgcttacacttttctgtgcaaatgggtgacttgactatagttgtcatcttattattttttaatggagtttggttaaagctttactccctgttgcagagaagagataagtacgtgacatttacaccaagagcatggagccatgacaaatacataaagtgaaaccctgggggaggggagataggcaaggttttatgtgtattttattaaaactcaagatcgcttgctttgaagttttaataaaaagttaagtataacctaaaagttttagactgcagattgatcaaatgctcttcatataaagtttatatataattgttattaaatacttgaacacgataaataactagagaagacttagacttatgtgttttataaagatcacrctaaaatatgattcaaaaaaattcaaaaatattggattacctaaaagaagtgtatccatttctgattacttattctcactttcccacgaaggaaaatttccaaataatattcacttttgaattgagacccaaaagagaaaaataagccatcacaattattgctgtgtttggaaagacaaatttcttttttgaagttttagtttctttggaaaaagatgggctgggcacagtggctcacacctgtaatcccagcactttgggaggccaaggtggttggatcacctgaggtcaggagttcgagagcagtctggccaacatagtgaaaccccatcactactaaaaatacaaaaattagccatggtagcacaagcctgtaatcccagctactcgggaggctgagatgaagggattgcttgaacccaggaggtggaggttaccttgagccgagattgcaccactgcattccaaactgggtgacagagcgagactccatcgcaataaaaataataataataaaatagaaatttttttttwaaaaatcctatctttgcaattctaatcatgagtcataactcaactagactcagtcatttttacatgaatgaatttacccacttgtatcaaaattttaagttcactattgtcacattctggtactcaatctatgttgatagaaagacattagaattacagtatttttcttcataaggtttcctagaaacattttgcagctcttcttcttccagtataactatattatattcatatgacactgtttttttgactgtatgtatgtccccagataatgccttttcttctactctagttgaataactataaagaaacaattctatcttcttttactatttcatacttaaatcatagccccaacttgccattcacaatttgcactaggacagtcttacaaatgctatcatcttaaaataatcctgtagcccaaaaattactatgtaaaccatcctaacactgaacttaggatagatatttagtctttgcccccattctcaaataagtttgtttagtttaccataagatagctatccctctttataattactgactccaacaattcttgttttttatatattaacatagagccatcatagttcttactctagttaaaatctgctgacttagccaatatcttccatgtatcctacaattctgagagccacatctctcaaaaagttaagagacaactgtaatctacaagatggtcttgttagggattcataacggcttccatttttagacaaagcatcaagaaatgaaaggcaaagcaatgtttggggaaactcagaaaaagaccttttgaaattaaaaccccccaaagaaaaacatttatttaaactcctaaaattggtcattgcaattagaatactagttttttaatcaaaaaacagcattttaaaaagcagattactatataaagaatgtttaataaaatagtcagaataggggcctatttaatgtccactggcagttgtaaattctctcttatcatcaattttagaataagctcaggttcttattctaagaacctgaataagatggatatagtgtacctgccccctcacggcacctgaaattcccccaccagtcttggcagtaatgaccacaaccctctttcacaatgccctggggaagaaataaacctttgctgatgcacagctttcaagctcatcacatcctctcaattttcatgcttctgtctagtgagttacttccctttcttttgcttgatattgctcaaaccgctgtaggacaccactatttttaaaaaattgcttcattctgaactcattatcccattattttcttctttccagttcaatctctataatgcaaagagtattatttgagcaactcctttttacccagcaccattacttggggaaatacacatgctcaaaaatatgacccttgtggaamctctattcaaatcgtaggttaaaaaccaaataggacacacagaatagaagaagccactgtatttaattgctaaatgttgtatttcaaatatcaaaaggtagagttgtattttttatacccttcagatatggtctaggcatagatgtttttagaaagctttcgaggttattctaatatgtagccagtaatgagatccactgtgctagaaagtctccaccctgactgacaaataactttcagttctggtttaggaaatcaaggtgaagatacagatgtgaatcctttgtttctcaaactttagtgtgcacaagaattatctggacttctgttaaacacacatggctggccgggcacggtggcttacacctgtaatcccagcactttgagaggtgggaggatcacgaggtcaggagatcgagaccatcctggctaacacagtgaaaccctgtctctactaaaaatacaaaaaattacccaggcgtggtgacaggtacgtgtagtcccagctactcaggaggctgaggcaggagaatcacttgaacccgggaggtggaggttgcagtgagccgagatcacaccactgcactccagcctgggcaacagagcgagactctgtctcaaatacatacatacatacatacatacatacatacatacatacatacacacacacacacacacacacacagctctggggctcagactccagagaatcagatttcacaggtcatatatagaaacccagaacttacattttcaacaagaggctctggtgatcctgatgcagtggtcttcagaccatgctttgaggaaggccactcaaaagtcaatcactatccagtcccatgaactaatatttaagagatgatgatattttagatcataataaagtaacccagaatcaacacgtcaacatgaatatmttgtaagtgaattattttataaatttattttcgtatccttttagtgtacagtatttgattcatattattgctgttttatcatcactagacagactttcagagaaatttgaaaattatcctcctcttgccacccttggacttatttagaagactaaaacagttgagattcactattttagaaaataaaaaggaaatatgaaaaaatacagaaaaaaagggaaaagagctttctttagtttgtacatgcatgtttctatatctgtgtgtttttttttaagagggagaggggatgacaaaagttaaagttcttattttaaaattattaaaggatttaactaatgttatatacacccaagaaaattatgtgacttgcttattttagctcattgtaattaagttgtttattaaaatgacaaactgaaaatattttttaaaacatgtttattcctccagagaaaaaatgtcacataagcaaaaataggacagaaacagaaaaatgcacaaaataggcactttttctgccagtaagtacttggaaattaaatgtcaatgtaaatgcagaacgtaacacataagaaaaaccttgatatgctttatttatttatgttttgtgttttagacaaaaatttccagaacaatgttaataaaactttatatttgtacttttaaattcatttaacattaaaattgagagcatgcatattattccttagttagttctattgtctccttctctcatgtagttaaatccattctttctccttgatttaaggcttgaaattcagctagtttaaaccatctaaatcctacctttctgagaacaggcgcacctgcagaagagcaaagttctcattgaccttgggaacacagcagtttcaatgaaataatctcatttagtaaaaagaaaaccatatgcgaatcaacattaaccgctcttagcccacatcagggatgatagctcccttggcaccagtctgaattttgagctaaggaatttggcctgatcttccctatgctcagccaggacagattgataaagaggtacaacattagcttaatcagttgctccatatttctgaatttttctaaatatgttcctcattagtttgctttcaatggaaatatagagaatgctttcacacacattttttcttctgaaatcagttctctgtgcattagagcattaagcttagcaaatatgagttacgatactactaacacatttattgagtgcctactttgtgccaggaactggactaggagttatatatatatatatatatataaaatatatacataatatataaaatatatatataatatatatatttatttatatatatatttatatatatatatattttttgtttctgatattcacaaaaatccttctaaaataactatcattatccccattacacagatgaaaaatctaagggtcagagaggctaagtgatttgcccaatggcagagaattacagggccagcaaaacacttataatacaatgtttcatgtgcattgatttacatttttctagtctatactgtattttaaaaacaaatgtctaacttttaagaagtgttcactatattctgggcattgttctgagtgctttatatgtattaattcattcaatattttgaataactctttgagagaagtgttttgtttccattctacaggtgacaaaactgaggcacaaagagctcaagcaacttgtttgtggtcaaaaaactgataaatgaaggaaccatgatttaacccagccattgactccagaccatgctatacaaatactaagtaggttccaatagccattttttttacacttagttattaaaatgtaccactacatgctgcttgtacaccaggatttactataacaagacagaatgtcaatgtgagtaattctagttgataaaaaggactacttcaatcctctacctccaaaagatgggcaggggtgatcgaccagacatcagaggaatcatgctatataggacaaatcctgcgtcttttccagcagtcaagaaatttcagagtaatagtcacatcatcctaagtgaaggtgttttttgcaaaccccttagcatatctaaagggtacaacaaacagtaaataggaagaggtgtagataaatagccttgcagtactgagagaggtgacacctgacatgtaatttccattaagttgccttttctggcctttgacaaaattcaacaacccttcatgctaaaaactctcaacaaattaggtattgatgggacgtatctcaaaataataagagctatctatgacaaatccacagccaatatcatactgaatgggcaaaaactggaagcattccctttgaaaacaggcacaagacagggatgccctctctcaccactcctattcaacatagtgttggaagttctggccagggcaattaggcaggagaaggaaataaagggtattcaattaggaaaagaggaagtcaaattgtccctgtttggagatgacatgattgtatatctagaaaaccccactgtctcagcccaaaatctmctcaagctgataagcaacttcagcaaagtctcaggatacaaaatcaatgtgcaaaaatcacaagcattcttatacaccaataacagacaaacagagagccaaatcatgagtgaactcccattcacaattgcttcaaagagaataaaatacctaggaatccaacttacaagggatgtgaaggacctcttcaaggagaactacaaaccactgctcaaggaaataaaagaggatacaaacaaatggaagaacattccatgctcatgggtaggaagaatcaatattgtgaaaatggccatactgcccaaggtaatttatagattcaatgccatccccatcaaggtaccaatgactttcttcacagaattggcaaaaactactttaaagttcatatggaaccaaaaaagagcccacatcgccaagtcaatyctaagccaaaagaacaaagctggaggcatcacgctacctgacttcaaactatactaccaggctatagtaaccaaaacagcatggtactggtaccaaaacagagatatagaccaatggaacagaacagagccctcagaaataatgcctcatatctacaactatctgatctttgacaaacctgacaaaaacaagcaatggggaaaggattccctatttaataaatggtgctgggaaaactggctagccatatgtagaaagctgaaactggggctgggcatggtggctcaaccctgtaattccagcactttgggaggccgaggtgggcggatcacaaggtcaggagatcgagaccatcctggctaacacggtgaaaccccatctctactaaaaatacaaaaaaaattagccgggcacggtggcagacacctgtagtcccagctattcgggagactgaggcaggagaatggtgtgaacccrgtaggcggagcttgcagtgagccgagatcgcgccactgcactccagcctgggcaacagagcaagactccttctcaaaaaaaaaaaaaaaaaaaaaaaagaaagctgaaactggatcccttccttataccttatacaaaaattaattcaacatggattaaagacttaaatgttagacctaaaaccataaaaaccctagaagaaaacctaggcaataccattcaggacataggcatgggcaaggacttcatgtctaaaacagcaaaagcaatggcaacaaaagccaaaattgacaaatgggatctaattaaactaaagagcttctgcacagcaaaagaaactaccatcagagtgaacagacaacctacagaatgggagaaaatttgtgcaacctactcatctgacaaagggctaatatccagaatctacaatgaactcaaacaaatttacaagaaaaaaacaaccccatcaaaaagtgggtgactcaaaagaagacatttatgcagccaaaaaaaacacatgaaaaaatgctcatcatcactggccatcagagaaatgcaaatcaaaaccataatgagataccatctcacaccagttagaatggcgatcattaaagtcaggaaacaacaggtgctggagaggatgtggagaaataggaacactttgacactgttggtgggactgtaaactagttcaaccattgtggaagtcagtgtggygattcctcagggatctagaactagaaataccatttgacccagccatcccattactgggtatatacccaaaggattataaatcatgctgctataaagacacatgcacacatatgtttatagtggcactattcacaatagcaaagacttggaaccaacccaaatgtccaacaacgatagactggattaagaaaatgtggcacatatataccatggaatactaggcagccataaaaaatgatgagttcamgtcctttgtagggacatggatgaaactggaaaccatcattctcagcaaactatcgcaaggacaaaaaaccaaacaccgcatgytctcactcataggtgggaattgaacaatgagaacacatggacacaggaaggggaacatcacacactggggactgttgtggggtgggtggagtggggagggatagcattaggagatatacctaatgctaaatgacgagttaatgggtgcagcacaccaacatggcagatgtatacatatgtaacaaacctgcacattgtgcacatgtaccckaaaacttaaagtataataataataaaattttttaaaaagttgccttttctgaatgatagcaccacaattttgatgcataaatataaatatagtgtatctgataggaaagaaatgcatataaggtggcatggcacttcataaaaataggagaacgctaagagaatagtaaaattctcttagaaatctaaggaagagaagggatagtgtttataatatctagtagtttttagtgggtttgtcaaatttgaaggaaagcaaaaagggtgattatcaacttgtcttatgggaactggccatgatgtaacagcttgagctaagagatttgttctgcaaaagccctaagacttgttagcaaataataatttcattaaaagacagaaaaaaaaaaaaacatgtatctgcagagaaaataaaactctatcttttttcacttaataaaatagcaaatatcaccactgaactcagacatataaactgccaggattttaagtgttgagatactcataaaatatggactctctctcagtattggtggtgtttcttccctccacccctcctttcttactcccctgggagtccagccccaacaattacagggttgctatcacggcagctgtccctgttgcatagtgctgattttctacatgcaaaaaatttggactctagagagctatgacaatgtgagttaacaatatgcctgaatctagtttgggaagacatgagttcattgtgttataagaaaaaatactgaatataagttattttcttaagatttttaattgttgccattgtcattctggttttaattaacaactaatactctgaaatgaattatttgaatagaattaatgaagtgtacaagtaacttaaggaagtttcaacccctggcttctgacctgtatataatttaatgaacaaacagaaaagagaatggaaaatggtaaaatgaatgtattattttcttaacctaaatagacaatattgttttaaaaattgaatatcctctctcaggctatagaacctattaagatgacttttctttttctaacaaacaaaaaaatgatcctttttggtctctttcttagatttgtctgatccatctaaaagccagtttctacatttctgaacttgactgctcactatgattaaaagaggatttccacacaatcatttagaaatttcaaaatgtatggtgtttgggaaatatatattcattatgactacatccaaagcttggtatcagaagctaaattattttttccttgaaatataaatactgcaacttaggtggcatggcactattgaaaacagcttgccatatgcctttgatttcactgagagacgtgccatctgccaccacactcaaaaatgattcaaaaaaattaaaaagaatggtagaagattgtcatcaaatgtgagaatgttacccatcatgtgtggtctaagactgggcctgggtactagttcagattacctctagtcatgaagtcaaagctggacagaaacaaataaattctcattttttctgtgggtaatgaactgagtacrgtgtagttccctcagcatgattattgatacagctttagaaagaagtctttgatatgaaagtaaaaaaaaacaaagatcctagggcaatgcttattttaaaggagttttggcccaaggactgggattaaaacagggagaacttgcttatgcacagttaatttatttgtaaaaattcaataccttcatgggactttggagaaagaagaaaatggcaagatatcagagacttttggaggggatatatgtatatcaaagaaatgtataaatctatttaggtactatattttatcaagtgctaaatcagccaagtgtgtattttaactctacataataaaatcactgagataaatcccttcagatgattcccaaagaacagaggtaatttttctaagaagcttaaaaatagaaatctctcttaaatgcatccagacagtgccccttacaatcactactttgtcccaaaagaaaaagagagcagaacaaaatgtaaattttataggaaaaattttacaagtaactattagtttatttggtttgtttatttgaagaaggaaaagattcaaaacctacagaccaaattttggctaagagaatactatcttagtctgtttttttttgttgctatgcctgactgaggctgggcagtttataaagaaaagaggtttgtttagcttatggttctgcaggctaggaagttcaaagaccatgacactagcatctgctcagcttttggtgacagcatttcgtgctgtgtcaagacatggcagaaggtcaaaggggaagcagacacgtgtgaagagacaaattctgaggggtatcctgacttcatcacaacccactctgggaggaactaatccagtattcccatagcagaaactcactcattactatgagaactgaagcaagtcattcaggagagctctgcccccgtgacccaagtacttcccactaggcctcacctcccagcactaccacattggggatcaaatttcaacacgagttttggtgaggacaaattaaaccatacccacataggaagtaccatatgaacaaagcagctggatttctttataaaagaaaaagagagaacatgttattaaactgtaaaattggttttgagaatgaaatgcaatcctgtttcagaaatttgtagccagtattacagggtagtcttgtgcctggcttgtgaggcttatttgaaatgtttcattccagataatcaagggaaaaatagtttccaaataatagcatttccaggactcttctaaaaaataaaattaaagatacgcagctcccccaaaatatctaattattacaaataactatattataactgctctagaaagtttatgccaccatttattgaaaagtatttaatgtgcatctaaaaaggcattataggaaaagaagtaaagaaataataataatacatggcatttgtatatcacttttttatttatttgtattatatttataaaatatgtgttcctattttatagataagaaaattaaggcttatcagggttcacctatctaatgtcaaatagctaataaatgttgaaatcagaagtgaacatagtcttatgacatcatatcagagttccttatattccagcaccattcctcttagcctaagacacagtggtttccactttcagggtctgatatacaattccatacagttgccctcaatattttccatcttaaacgtggaagtactccagaagcagtaacattttagctcttctcaacaatagacccctctgtatagactgaggaattaagggtttaaaagggaaagtgagaagtatatttatgtcacaatttgacacaatctacttgtatgacaagttatacatgcatgaaataaatactatagtaaacaatatgtccttgctaatagtatcaaatatgaacatatgagagtgataatttgatcagtacaatagatcagacattatataacagggttcatgtagaataaatatctcacaatttgcctatccagatcaaatttgtatatatagtgtacaaatgactatatatgaaatatatatatacacaaatgactatatatatatatagttggcatagcacagtggtattaggcagagaattttgaattgtaaaataaataatctctgcaaattatctaataacttatttgtgaagaaggtctaattttgaaactgtttcgttgctgtaaaatcaacttcaaataaaagagacaccacaaaatagggtgtctccaaaggaaatcttcaaagacaggagagtggggtaatcaaagaaaagtttaaagtttgctgaatttcttgggcaaaaaagttgaagtctttgaataatatttctctgagtcatattgcatctaccatttctagaaatatgtacagctattaatagagaaaagcaaaaggagcatcagaagctgagaaaaggcaagaagacaaagcaggaaagaaaacaaatgtctttgcagtgcagccctcagagtttagtcaaaatattctaggaccatgagactgggatcctgtccagtcgggaggagagagctagatatggatgaagggacttagacagtccagttaagaactctgatccattctttgtctacactctgaaatctgcagagtccttcattcacaggggagtttacccttcactttgtggagctaagtatgttaataaaacattacccagagctgttcctacaaaaagcacatatcaaataagaaggtagaatgagatgatctccaaggtctcttcccactttaacatgagaatttgctaagtgaaaagcctaattatattttcaatttttaaaaaacggaaattttcatttaaaaaaaattcatacttcaggagctcttttatcaagaggttgggagattaggtggctaatgttatacaacctattttctattaggtttgggatgcagtttttgtccctagataatggaagaaattctcttaattgatacttgttattaattcttttgtttccccattttctagttgcgctttttttcacttgccagtttaggaatttgcttggctcttttcctatatttaatgactatatttaaaaaaaggacttggccatgtgcctagaggctcttgggtgttgggtgccatataaacaaaattaattactaacttcagtgccaatatcacatcattggaaatgagaggttagtcgaccaaaaaaaaaaaaaaaaagacaagtaaaaatttcaacaaataatagtatgcataggatgcataaaataaaaaattaatcaagcataaatttgtatatatttgtatagtgttcagtttttcctaatatactcatatacattatgtcaggcctttgagcccaagtcaagccatcgcatcccctgtgacttgcatgtatacacccagatggcctgaagtaactgaagaaacacaaaagaagtgaatatgccctgccccaccttaactgatgacattccaccacaaaagaagtgtaaatggccggtccttgccttaactgatgacattaccttgtaaaagtccttttcctggctcatcctggctcaaaaagcacccccactgagcatcttgcgacccccactcctgccggccagagaacaaaccccctttgactgtaattttcctttacctacccaaatcctataaaatgtccccacccttatctccctttgctgactctctttttggactcagcccgcctgcacccaggtgaaataaacagccatgttgctcacacaaaacctgtttggtggtctcttcacacggacgcgcatgaaatttggtgctgtgactcggatcgggggacctcccttgggagatcaatcccctgtactcctgttctttgctccgtgagaaagatccacctatgaccttaggtcctcagaccgaccagcccaaggaacatcttaccaattttaaatcaggtaagcggcctcttcttactctcttctccaacctctctcactgtccctcaaccactttctcctttccactcttcaacctctcccttctcttaatttcaattcctttcattttctgggagagacaaaggagacacgttttatccatggacccaaaactccggcgccagtcacggactgggaaggcagccttcccttggtgtttaatcattgcagggacgcctctctgattaaacacccaaaagggcaagtacctcaaccccttctctccttgtctctaccccttctctgcttttctgggagaggggcaagtacccctcaaccccttctccttcacccttagcggcaagtcccgcttttctacggggcaagaacccccaatcccttattttcacgccccaacctcttatctctgtgccccaatctcttatttccaygccccaacctcttatctctgtgccccaatcccttatttctgtgccccaacctcttatctctgtgccccaatcccttatttctgtgccccaacctcttatctctgcaccccaatcccctatttccacacctcgacctcttacctctgtgcccccatcccttatttccgcaccccaacctcttatctctgtgccccaatcccttatttctgtgcccctacctcttatctctgtgccccaatcccttatttccgtgcccctacctcatatctctgtgtcccaatcccttatttccatgccccaacctcttatatctctgcaccccaatcccttatttccatgccccaacctcttatattctgcaccccaatcccttatccatgccctgacctcttatctctgcaccccaamcccttttcccacttttctggraggtaaraacccccgaacgccttccctccgtttctctactctctcttttctctaggcttgcttycttcactatgggcaaccttccaccctccattcctccttctactcccttggcctgtgttctcaaaaacttaaaacctsttcaactcacacctgacctaaaacctaaatgccttattttcttctgcaatgccgcttgaccccaatacaaactcgacagtagttccaaatagccagaaaatggcactttgaatttttccatcctgcgaaatctaaataattcttgtcataaaataggcaaacggtctgaggtgcctgacgtccaggcattcttttacacatcagtcccttcctagtctctgtgcccagtgcaactcgtcccaaatmttccttctttccctcccgcctgtcccctcagtaccaaccccaagtgtcgctgagtctttctaatcttccttttctacagacccatctgacctctcccttcctccccaggctgytcctcrccaggccgagctaggtcccaattcttcctcagcctccgcttctccaccctataatctttttatcgcctcccctcctcacacctggtctagcttayagtttcgttccgtgactagccctcccccacctgcccagcaatttactcttaaaaaggtggctggagccaaaggcatagtcaaggttaatgctcctttttctttatcccaaatcagaagcatttaggctctttctcatcaaacataaaaacccagcccagttcatggctcttttggcagcaaccctgaaacgctttacagccctagaccctaaaaggtcaaaaggccgtcttattctcaatatacattatattacccaatctgctcccaacattaaataaaactccaaaaattggaatctggccctcaaaccacacaacaggacttaattaacctcacctacaaggtgtacaataacagaaaaaaagttgcaattccttgcctccactgtgagacaaaccccagccacatctccagcacacaagaacttccaaacacctgaactgcagtggccaggcgttcctccagaacctcctcccccaggagcttgctacacatgccggaaatctggccactgggccaaggaatgcccgcagcctgggattcctcctaagctgcatcccatctgtgtgggaccccacggaaaatcagactgttcaactcacctggcagccactcccagagccccgggaacgctctctgactccttcccagatcttctcggcttagcggctgaagactgacactgcccgatcgcctcggaagccccctagaccatcacggacaccgagcttcaggtaactctcacagtggaaggtgagcccgtccccttcttaatcaatacggaggctacccactccacattaccttcttttcaagggcctgtttcccttgcctccataactgttgtgggtgttgacggccaggcttctaaacctcttaaaactccccaactctggtgccaacttagacaatactcttttaagcactcctttttagttatccccacctgcccagttcccttattaggctgagacactttaactaaataatctgcttccctgactattcctggatctcattaaaacctaatcacccttaccccactcaacgccaatatcccatcccgcagcacgctttaaaaagattaaagcctgttatcactcgcctgctacagcatggccttttaaaccctataaactctccttacaattcccccattttacctgtcctaaaaccagacaagccttacaagttagttcagggtctacgccttatcaaccaaattgttttgcctatccaccctgtggtgcccaacccatacactcttttgtcctcaataccttccttcacaactcactattccgtgcttgatcttaaagatgcttttttcactattcccctgcatccctcatcccagcctctccttgctttcacttagactgaccctgacacccattaggctcagcaaattaccaaggctgtactgccgcaaggcttcatagacagcccccattacttcagtcaagcccaaatttcatcctcatctgttacctatctcggcataattctcataaaaacatacgtgctttccctgctgatcgtgtccaattaatctcccaaacctcaatcccttacaaaacaacaactgctttccttcctaggcatagttagtgcggtcagaattcttacacaagagccaggaccgyrccctgtagcctttctctgcaaacaacttgaccttactgttttagcctagccctcatgtctgtgtgcagcggctgccgctgctttaatacttttagaggccctcaaaatcacaaactatgctcaactcactctctacagttctcataacttccaaaatctgttttcttcctcayacctgacgcatgtactttctgcttccccgctccttcagctatactcactctttgttgagtctcccacaattaccattgttcctggcccggacttcaatccggcctcccacattatacctgataccacacctgaccctcatgactgtatctctcggatccacctgacattcaccccatttccccaaatttccttctttcctgttcctcaccctgatcacgcttgatttattgatggcggttccaccaggcctaatcgccacacaccggcaaaggcaggytatgctatagtacaagccactagcctgcctcttagaacctctcatttcctttccatcatggaaatctatcctcaaggaaataacttctcagtgttccatctgctattctactactccagggattattcaggccccctcccttccctacacatcaagctcgaggatttgccccacccaggactggcaaattagctttactaaacatgcccgagtcagraaactaaaatacctcttagtctaaatagacactttcactgaataagtaaaggcctttcctacagggtctgagaaggccaccgcagtcatttcttcccttctgtcagacataattcctcagtttagccttcccacctcaatacagtctgataacagacgagcctttattagtcaaatcagccagcagtttttcagactcttagtattcagtgaaacctttatatcccttatggtcctccrccttcaagaaaagtagaatagactaaaggtcttttaaaaacacacctcaccaagctcagccaccaactgaaaaaggactggacaatacttttaccactttcccttctcagaattcaggcctgttctcggaatgctacagggtacggccsatttaagctcctgtatagaygctcttttttattaggccccagtctcattccagacacaagaccaacttagactgtgcctcawaaaaaaaaaaaaaaaaaaaaaamaaaaacttgtcatccctactatyttctgtctagtcatactcctattcaccgttctcaactactcaaacatgccctgctcttgtttacactgccagtttacactgtttttccaagccatcacagctgatatctcctggtgctatccccaaactgccactcttaactcttgaagtaaataaataatctttgctggcaggactatgctgaatctccttaggcactctctaatcagatatcctgagtcgtcccaattcttagaccttttatacctgtttttctccttctgttattccatttagtttttcaattcatacaaaactgtatccaggccatcaccaatmattctataagacaaatgtktcttctaacatccccacaatatcaccccttaccacaagacctcccttcagcttaatctctcccactctaggttcccacgctgcccctaatcccgcttgaagcagccctgagaaacatcgcccattctctctccataccaccccccaaaagttttcgccgccccaacacttcaacactattttgttttatttttcttattaatataagaaggcaggaatgtcaggcctctgagcccaagccaagccatcgcatcccctgtgacttgcacatataagcccagatggcttgaartaactgaagaatcacaaaagaagtgaatatgccctgccccaccttaactgatgacattccaccacaaaagaagtgtaaatggccggtccttgccttaactgatgacattaccttgtaaaagtccttttcctggctcatcctggctcaaaaagcacccccactgagcatcttgcgacccccactcctgcccaccagagaacaaacccccttcgactgtaattttcctttacctacccaaatcctataaaacgkccccacccttatctccctttgctgactctcttttcggactcagcccgcctgcacccaggtgaaataaacagccatgttgctcacacaaagcctgtttggtgttctcttcacacggacgtgcatgaaatttggtgccgttttttgttgcycacacaaagcctgtttggtggtctcttcacacggacgcgcatgaaatttggtgccgttttttgttgctcacacaaagcctgtttggtggtctcttcacacggacgcgcatgaaacattatttcatctggttgtcaaaataacctcatgtgctggctattacagatatttctaacctcattttacaaacttaaggaacttagccccagagaggttaatctgtctctgttttttttttctttttttcattcactcaacaaatacttactgaaaacctactaagcgccgtatgttgccctaagaattgtagggtgacaaaccatcccagcttgcccagaactagggagattcctgggatgcagatttttcgtgctaaaacgggactgtcccrggcaaactgggatggttggtcagcttaactcaatctggccaccctaagagcacatcacagttcaagtcacaaaatcaaccacaccagatggagagctcagtctctctctctctctcattatttttgcctcacctgggacttttatttctggaccctactcccagcattagactaaaagttctccttaatgttgccagtgatcacccwagcacccaaaactagctttgttgcccacttgtctgcaaaatttgatattctgacaacctgatactctctttggcctttactctttcccttgcttttctctttcataatgcccaacatcttcccatctaaacttccatcattaagcgcatggcacccaaatgtatacccacagctgcaatgtgatggctttgacatgtggatgtgtatgactaaaaggtatctccttaactcctggctatcccaagtattcaaataaactaaatctcaacaaaaatgttggtttctycacccccaattcttcctcttgactttcctatctctgtcttcaggcaacaccactctgttagtactaggctcattctcagccaccagtggtctctttctctccctattcaccacatctaaggtgttaacagttcccagcaagcagtccttcagaaagtttttcatattcatcccttcttttctttccccactattaccaccttagctaaattcctctttacctccctagggttattgttctggtctcttccctgaaccagctccaccctccaccttcacattcatttctttcttcactccaatttagtctacactgctcccaggttaaagtgcattctggctttaatgcccgatgttctttcktatgagccccattctccagccaaaaaataaccatttgctatgcagtcttttcctctctgtgcctttgttatattattccttatgtgcataatattttattctgtcaaattcaactcatctttcaaggcaatcttaaatttcaaagttccatagaaatactttgtagtttcaaatggatgagaaccccttcctatgaactcacttcactttgtactcctaaacgctcatcctcacctgctttatattgtaattatttgtattcttttctcagtcctccaactagaatgtatacttctcaagaccgaggctgtgtcctattcattctagttcccctgcttaacrcagcaggtgttcattatgtttttatgaaagattgaatttaactcctcacccaattctggcttcagaaatgaattttgtaaattagtcatttcagatatttaaaatttagtgtgtgccttaaacaaatatataatgaattcatgaacaatgtaattaaaaaaaaaaccctcaaacacccaaggattatccaacatcaacacaaagttcctgagtacagaggtatccctaggatcattactctagtgtgcaagtttgtacacatacatgttgtcagcccagccagccccttatcagctactctgcagaaaaggccgcagacaaggagagctattccaggatgggcaatcacttgcattcagaaaatagactttaattgagtaatttttcagatggttgaaattgaattggtattgcactggaaaaagaatgcctgtttggggcctaaattgttcctccccatttagaggggacacaatgtaagcataagactcatgcagtttgggaattataaagatttggattttaggacagtcccaaaataaacccatcaattcaggccttagagggtttcacttaatctggaatcaattgaaacactgtaactaaaaggttcatcacaatatttagtctttatagacccaatttccaaaatatcaaagttgaagggaagtagagtcatttttcatcatatttgcaaaaaaattctcccacaggctttggacctgcatctggagggaaaaataagagattaatggggaaaaaaatcatattatatcttaccttatccactgccccctgccttcaaatctttccccatcataaggtttcttcagtcatgcacaaatacttcagagactgctacctcagacactgccgtcagcgcccagaggattgagatttagtctttgcatcttaattacagctgactctttttcccttgttctgagctgagttatagcaaggaaagggggagatgaatgaatgacccatgcatctgacatctaatatctgctacttcagatttggggtttgatttagtgtctctatcagagagtttgaggaaacaaagtcttttatcttctttaaataaattcatgcactgaagcacaatttaccttctctggcagttttattattcagaacaatgggcttttttagttgtgcaatattttggcttttccctttcctctcacgtttataaacaaaaacattcagtttagtaatttaaacaaggataaaacagaagtggtgcatggcactaagactacaaaagtgccatgttgtcattttcattttttttttttacaaaggacatataattgaaagcaaaagactccttatctttgtatttaaataatgacctaaattcagtacacgaaaatgaccttttctgtggatgcattgtggctgttacctcatcaccctttcatctatatgaaactttgtatgagtcagtttctgaagcatgagggcctccactctgcccacaggctccagccacagtgataaatggggcccaagtcccacctctgttccactaactaaccatagctaccctgcctggcagttgctctttcccaaaagagcacctctttttcgacacaaatgtaccacctgttcttccaaatgtttcctggtgctgcattggctcacaggaatatgcttttgttttccctaattgacctgcttagaagaggcattgttttgttatttgcacgaaggcattatataacctagctgcaacttggcccttggatctgatgtatgtgttctgsatgaatggtgaaaacactatgcaatgaggattaagcaggcttcattaagagaaacaaaaaatcatacaacagttttgctaatccagcatttacttgcattgaaagtcatttacttgcattgaaagtcaacaaatgggtgaggtgcggtgctcacrcctttaaccccagcacttggggaggctgagatgggaggatcacttgagcccaggagtttgagaccagcctggacaacatggtgagaccccgtctctgcaaaaataaataaataaataaataaataaataaataaataaataaataaaagtttaaaaaattaaatcaattgatgacaagaagggaagttggaaagacacttgggattctgacagaacgtgttcagatggtatgtcccactggggaagctgttatggagaaaatggggtctcagggataccagaactaggtttatgtcacccagaacagtgtcatgaccaaaaggacaggtggaatggaataagcccgtgattatcaggaagtagaacacaccttggtgaggtgtgtctctaggtggaatattcattacaagctcaagacagtactgcaggagagggcgcatcttgagtttaatggagaaatctctcaggcagcagaagataacaaagacctatcctaactgtaaactaggtccttggaaaaaatggacaaacctaattgctttcttcatcttctgtggatgctgatggagaaaatcaacctctgtgcaacagatgctactgagattccatggtctcctgcaacttttttgtctcattttttccctacagaaactgttccaatgcttcttcactctgatcagtctctgaccccatcaccctctcctttacttatcatagatttttaactaatattttacagagaaattgaagatgaactactgaccgcttccctaatcattcattcatttaataagtattgattaagggtatgctgtctgccaggcacaataacaggtactgtttataaagagatgaagagagacaggtgcctgcactcttcaagattactcttctcttccaaacagaaccacatcctttcttcctttcttactgcctgttttattagatcttactaaatcttattagatctatattagaccctgtgttctttatcttatcccacaagactttctttgaaatttttttaaaacactctcctctcactgttttttcttcagtttctttttcctatcagaatgtcatattcagttctcttttttaaacaattatccctcaaactcccttgagattctggttactactctctcttgacccttttcctcccaggtttcttggatgcattgctagctcttggtatggtatttgcttcctcacctaccacttcaaaattgctcaccttgctctcactagagtgacaaaattcagtgagtatattttagatctcatcttagtgactctttggtagcagttttaatgttaaacaaactttcctacattaacggttcctttctctagtcttccaacacaacacaaactctagttttcttcttaaatgttgggccatcaattctcagtgtcttttataaactgctcttcctctgggcttctgataaacactggtggtgtgttccttctcttcacttcgttttagtgatgtcacaagtgaaaggtttcagttatataaattagtggatttcaaatcttactrtaagaatcaactggaaaattcgatctagtagacaaaggtggggacaaatttagtgttttaacaagcactcctgataattctgagaaaagtagtcatcacattcaaatttctcttaagctctgagataaaccataaatcctgcaataacatgaattgtgtctttcttacttatcgtggtcttctcagagtctagcagggtatctaattaacacaagtgttcatttgctagttgtagaacaattgaatgtatatgtaactgatagacaatctccagcccagacttcagttttcattccccaccaaccaccaatctcagtgaatggctctatcatccactgatatcagatcagaaaccccgattcttctatccacttcaaccctgccaaccaatcaattgacaagcacatctactttaatcttcttatatcttgcaaagccttccacttctttccatcaccattgccaatgtcctagtccaggccaccaccatttttcaactggattacttccatgctcttttaactagtcatactgtatctattcttactccaagttttcttaaacaaaacttgcatcattagagttcaaacacagtgatatggcttgcattgtcctttatgacatggcctctgctcacctctaccaaattcattttcaacttgcttacttctgttcaccccactttatgccctactcaaattttggaaagtatttttcttaccttttattctaatggtatttctttttacaaaagcttttaaagatgtatttatttaaatgccagttccaaatgaaaaattttattttaggtctcatttatataagttacttactttttcatattttgattcctttactatacagtttccaactccatttttcagcctttgttaatttagtttgatatatttgatataaattattattgttgcattattattaaattattaattttgcatgatatacattttcaagaataaatttttgaaactttaattgtaacaatgaaagtattttcaatttttctctaacagatttcaataaaatttttttaatacttctgtgctttatccctcattctgttgaatggtatcactaataatttttcaaaaaagtagacaatattttcttaataaaatctgaaattaccattctattatctgaatgataggatgataaaattcttaggttacagaactttttatacccttttgttttttkgagatagggtctcactccattacccaggctagagttcagtggtacaatcatggcttgctcagcctcctgggcttaagcaatcctcttgcctcagcctccaagttgctgggaccacctgcttttttttttttttagagagagaggctagacttgaactcctgtgctcaagtgatcctcccaccttagcctctcaaagtgctgggattacaggcgtgagccaccatgcccagctttcaatatttttttggcattcattttgcattggacaacatgtgacaaaactgaatttttctccttgaaaggccaattacttttgtcaacttagatacttataaagcattttaatctatgtagttcaatattttttattctgtgatcagatggagatatgttttcattgtattttcattgtattcttcctggaatacagtgacgtttttcaacccactgttgaatactagctttctaaaatatcaccaaatcaacctgttaataagacagagctgagtttattgcttacctcaataagagaaagcactactcccagtgttaacagcacctctgaagaagaagcacaaagatatttatgagattctgaagtctggcttaacataggtcttttaacgggaaggaggaaaggaagaggtttgattaggattgggtaaggatcatgatagaataatatagcattggtaggcataggaaggagaggattttgaagagaaaggttcaaaatgttttgggaaaaaaatgagccacaatagcattatcattcctaaaagataatatttttaatatcattaaatataagtattcaaatttccccacattatcaaataaattggaggatgaaagaaatatctcgggatataacatttgcttcctgttgaagagttggtgggtctctcaggaagtttctggagtaatcaataaaattatttgcagacaataaaagtcatttgcaatttttaccttccagagcaggagtttctgggaataataaagccatgttaatgtaaacaggaatggtgtgggtgtagatattaatagtttcggcttttagtgcatgcacatgtctttcttcagctcaggagaacattattgatttggatgtttagttgttgttgttctgagctcttcttcagaattagtgatgtaaaacatggccacttgctttctgagcttttcattatcttcctgggttgcagaaactgactcaccaagtgtcgcctgagatgtaaagagggtgcccagatatatattttgttcataccttaggtctaaagtcaccaaatgggtatgggagaagagaggtataaagtatagttcatttttgttagataatatggtttgtgatatggaaccaaggcttgaaatgagctgaagcctgaagattttatatcaagccatttctatttgcctaataattattgacagtcttttccaaatgattggcatttgtccttatgcctgtttatagacagacagataggcatatagatacatagaaatacaaagatagagacatagagacagatagatgtaatttttcatgtacatgaaaaacttttttggctaggcccaaaaaactttgggatgctgaggcagaaggactgcctgagcccaggagtttgataccagcctgggcaacatggtgagaccccatctctacaattgtttttttaattagctgaacacaatgacacacacctgtggtcccacctactcaggaggcttaggtgagaggatcacttgagcccaggaggctgaggcttcaytgagccatgttggtatcactgccttccagcctgggcgacagagtgagacgctctcttaaaaaaaaaaaaaaaaatcacaaaaaacaatcaaacaaaaccttttccttttggaaaaattttatatttgctaaaatgtttcaaagacagtacaaagagttctcatatatcacttacccagttttatccatttttatcatcttattttatcatggtatatgaaataaatgttagtatattactaaaccctaaacttaattcgtgttccaccgttttttttcccattaatgctctgtttctgttccagaattcaatccagggtaccatagtatgtttgaaagtcacacctcctaagtctcctggacttctacactttctgtcttcctttgtttcttatgtctttraaagtcttgagggggactggcaagtagtctgtagaatgttttccaatctgggttcatattcaccagagaaaaagagctagaatggatagatcgatcaatacatagatggatagatggcaagaacttggcttatgggacatgctcagtaagaccaaaatctgctggacaggccatcagaaaaggtaggctggaaactttcaggcaggcattgaatctgcagtccagaatttctgcttcctcaggaaaatctcacttcttttcattcagattttttaggataatctcttttgcttaaactgattawacaggctaaacacatctgcaaagtctctgcacagcaacacctaaattcatgtttgattgagtaactgagtattgttgctgagcctaagttggcacataaacctgaccatcacactaaggttatgaatttttgaaatcatgcaacaaaggtgcatcccattatatcagggtgtatgtgacatctagatgacattacagtgacattaacctttatcagtttggtaagggggctttcrccaggattcttcttagtaaacctatcacttttcctgcttttttctctattctttggaaataagctacaaagcctagaatgccctagcaggtagaaggaattaaacttcacttcttgtactggggagtatctacatatgttatttgaaattcttctgtaagaaacagttgtttcttttcctcatttatttctttattctgtcatttatccatgtcaggatagattcatgtatatactttggattacaatctaatactatatccctttgttgttcaaattgttccattgcgggccactgagcgctctatcaggttgcttcctatgtctctttgacatgcccccatccttttgctttttaatcactttttttactttctggtactaaaagatattccaggctcatcttgtatttttcctgtcctggtcccagaatcagccatttctccaagaaacctgttgcttttattagaaaacaatatttagaaaccaagaaagatctgaatgtgcagtgtgctcattgctagtgggtgtcatggtttctagaacctctcagaagatagcgctaggtaaaatatactaatctgtatatctataattgtttctatatttatccaatatttggatatatttattggatatatttatccaataaattggatatatttatattggatatatttatccaatatttagctttagtaagctaaacattagtttataccaatgtgtccaattttactccagcagtgtggagctcattatggaccttttttcttatttatcagtgacttccttctctaacagtgagaaacctggcccccacacccaaaagccatttacatatttgttcaacctcagtatacatgtaaagcacttttagaattgttaacccataagcctgtgcaaaaaaaaaaataccaactagagtacggtgtttatgtctagttctttttctgcagtcttacaatttctagtaaaaatttcatttaccaaagttacttgttaggatttttcttttaggttgcatacattaaactttactttctatgtataattctaggaattttgatatgtatagtagtgtatcatccccccaggaccacacagaatgtttcctttatcctaaaatttcctctgtgcaacctctttgcagacaaccactgccacttccttaaattttcctagatttttaatattatttttgttttttagtctttttctttatatgttttgttggataattatagaggaagctcaaccaaagtaggctaaccatatagcatctttctgttcattctattttgaacaactgttttccaagctcttcattctattttgaactactgttttccaagctcttcacattgccatgcatttggatgggtagagaatatatacagaaggatactttttattaaaggtcatgtttactgtagtagtatatttggactttcaattattttatttctttatagtttacactttaagatacagtaaaaatcaacagaagctttatttttacaaaccaattagagtcacaaaaaatgttttatgtcatactaatgatggtatattacggaagaaagtacaatgacctgtatgaactatacttgctgttagttatagtaattatatatctaattctgtgttttaaaataattgtatactaaatgtagcaatgtaaaacatatgaaccctgaggctcagtggttcatgcctataatcctagcactttgggaggccaaagcagaggaataacttgaggccaggaattggagaccaggctgggcaacataatgagaccctatctctaaaaaaaaatatagaaataaaaaatttgctgagtgtggtggcacatgtttgtagtcctagctactggggaggctaaggtgggaggatcacttgattccagaaattttaaactgcagtgagctatgattgtgccactgcactatagcctgggtgacagagtgactctcaaagaaataaacaaaatcaactctgtaactttagaatatatacgaatttcattgtcatatttattttagaatttacaaatattaaaccagtaggttgttaagttttatttctcctatactggagaaatctctggaggccactttgctttctgataaactgatatctcaggccaggtgtgcatgggtatgtgtgtggttattggtggaagaaactgaggttcatctttgaataaatttataatcttatcttccctgactccatagaattcagcctgcttaagtaccaaacaatactgaagaaaatatgttcagagaatttttaaataaagtctaattatctttaaaatagacaaacagaattagatcatgttttccattataataattatctcttgtggaaaacagcagttggatgaatttagaaaatgaatgaattatgttatataatgtgtatacccatttcatgataccattttttaagacacagaatttctgtaatagcaaatcacttaccataagatttttttttcattaatttgcattcttcacaacaacwaacagaaaagtattgtgattgtgtctcacctgcaatttggtgggcaaactggtacacctactttaacctctatgatcaaatgacactgcttcaggagtattttaggaaagtctgctgccttgacaaatatgattctcaactgaatttaaataatgcattttgaacaatatttgcagttgaggagaacacaaagcatttgtaactttggtaaatagcattgaaggccacaagggataggaatgtgtttttgttgtcattgttgttttgtatatacctgagaaagcctttccttttattatcatcctagggtctgagagatagaggggactacagaggtcatctagatagcaggctttgtaactcatgcttgtgtttacagttgaatgttccttgtagttccattatctctttactaaaaataaatgtggtgaatactaatggaatgtgttctctttgggaaactattcaacagaatgattaattaatcgagagaaaggttaggtgatagctgaaataaaaattagtgttttttaattcaacattcaaaaacacatttgacattttgttgtaaactatgtttctagcagctgttagggtaattgttttgctagtttctaattgcagatgttggcagctggaaattagaagcaagtagtagtttctttagagcatggaattaaatgtgtgaaaacatgagattatgctttttcagttatcttcaacactgctatgaagatcggagttttagaatctctactaattattttaagggtcagataaccttaaatattaaaaagttttaagcctttactagatatataaaggcctgtcacttttcaaatgtaagttagatgacaaagaagtctctatggccagagaaaggaaggaaaaataaagatttatttgaataattaaataaaagaaggggtttattacattattcagaaaattgcttcaattttcccacttggccttgcctgtgcagacctgagaaaatgctcttttctcctatatttaatctccagagcaacctaaaaggatactgacaaacattaattttgcattataaaatagtctcggtaagtgacagcaatttcaagattaatgtgttggcctcctgagatttcagtaaggaaaaaagtttctcttaaatcttgtatttaagtcttatataatattggtcactgtcttgcaatggtattttccaatcaaacagacttctgaagactatgagttctccagcagctaggaatgaagagtgcctgttcctagaggtatggtttccattgcgcagttcactgagctagtcactcacactaagtctctggcatgcttctttaagatttatattcaggtataggatagaaaataaagtcaataaagatagggaatttaaaacatacccaaacttttgctccataaaagttactgttaagagaatgaaaagataatccatagactgggagaaaatttgcaagtcaccagtctgataacttgtatccagaatttttttaaaagccctcaaaattcaacaaaataagaaaaaaattactcaataaaaaaatgggacaaagatttgaacagcttcaccaaagaagatgtatgagtggcaaataagaacatgaaaatatgctcaatattattcaccattagggaaatacaaattaaaaccatgataagataccactatgaacttatgagaatggttaaaagttaaagaaatcttacaataccaagtgatggcaagaatgtaaaactactataaatctcatacattgctggtgaacatgcaaaaatgtacagctactctggaaaacaggcaatattttatatttaagtgaatgcttagccatatgacccagcaattccactcctagctatttaactagcaaaacaaaaatttccgcgtgtgcaaaaacctgtatgtgaatgtttcatagaagctctgtttataatcacccaaacatgaaaataactgtatgtctttcaatgggtgagtaaaaaaactatagttcaaaaatagaatggaatatattccgcaatataaaggaatggggaattgatatacacaacaacgtggacgaattttgaaaactttatgttaagtttaaaatccaattttcaaaagtctttaataaatgaactaatttatatgacattctggaaataggaaaaaccatagcaatgggagcagatcagtgactaccagggtggtgataggaggaatcaggttggtgattctaattccatattctgattgtgggagtggttatttaaatctatttgttgaaattaattaactatacaccaaaaagttgatattaatgcatattaaattttaaaatttttaaattaaaattggcttcctaagtacccaaattgtgatgtaataatccatctttttctagttttacctgtttctcttactttttttgctgcaaattgttcattgacattttcaaattagtaataatcacctatgctgtggagagattggcgggagaaaggcttgaaaaatttctcaccattaatcaagtctccttggtctttaaaaataagtttttgatataatgtacattttatctcacagcctgccctcaggatattgccaaacactcctttgaagaaaataaggaagcagggtctgggacattaccagtatttgggacaggaaattttggagtctaccatgctagaactcataggcaaaatttgaaactgtggggcttctgcctcctaaattctgctgtgatgactccagagttatcaaggcatcggaaatagaaaagccctgcaaatcaggcgctctgttactgagaggtcctaaatagcaatcctggccaaagtatcaagctctgtctccctctgtggcagtcacagtgctatcagtaggctaaatccatcctctcttcasagttgagcctctctcccacactcacatggcaataattgaaactttgggtacatttgcctcgcctttccatatatgatcctacactgcataaatcctgcagcttttatgccatctgctttatctcccctttcttctcaacttaaagtcccacttttctgaatactctcagaaaggggaggcataaatcygaaactatgcatcagattagactagaaatccctatagagctctctagtccctgtagctcattcttcagatcaggtgtggagtcaggataaaacggcatgattatccagaataaatggccttggctcgttccatagagagcagcgtaaaacttggagggaagacttatcttgttaattctcagcagctgtctttaggttttagcagctgtttggsggtttaatgagaatagaggagaatagctctctatttggaaatgcaagagggttttggactaatttttttccaaagaattggtgctgaatgtataaatgtactcctaatatttttcacgtcttgcattttaacatgttgaattgtaaagagttaaaaagatttaaagagtttttaagttcctccgggaaaggtgaaatattggccaactggtagaccacttagaaattgcccatcataatttctacatgagggtttatgaggtcaaacaggaaaaaaggagatgaataattttaaacaaagctgtcagagacccaggtgggagttaagttaataactgcactgttcaaaatggagaggctaccagtatcctgaagcagatatacttgtatcctaagtcttgtaagtgcctttccttgcctccgttcctcagagtgtgactacagggccatatatgatgctttttgactctgccatcacccacaagcatgtcctttatatattgtatattctataatgtgccaatgttttttgtcataaaatattacttatcatatttatgcccatcaatcaacgagaggataaagaaacgatggaatactactcagccacaaaaaggaatgaattaacggcattcacagcaacctggatgggattggagactagtattgtaagtgaagtaactcaggaatggaaaccaaacatcatatgttctcacgcataagtaggagctaagctatgaggatgcaaagccataagaatgatacaatgaactttggggactcgaggggaaagggtgagaagcgggtgagggataaaaggctacaaatggggttcagtgtatactgttcagcttatgagtacaccagaatctcacaaatcaccactaaagtacttactcatgtaacaccggttccccaaaaacctatggaaataaaaaaattaaaaaatatattacttatcatatttaattttaaagggacacaataatttattttgtcaaaagcaaaaccaaaatttcctgattaagtttatgaggaacttatttaacttgatgagtgacaatttaggataagatgttccgtaagttttttgctacaataggtacatttaaagaaaaaaactgcacccacctctatgtattcaaaagctttctcttaaattctaaaaaatgctcactgattgacatcagagtgagtgagatttcttaatacagaggcctatttttttaaaaatttcactcagatgctttagaacctcttgttcactgacaatatatcacaatgctggtctctttagatatcaaagccacaactttctgacaatcctgcctcctatctcttcttttttattgatccttattttcacaacctttccaaattgtttaaatcattgtaatactgcaatgtgtttgtagttatgaaaaatcattatttacattttaaaaatagttttgacaatgctctggttattcttactgatgtgatagaatcattctctcagtacttccttcactccttccaacaaaatcgtaaatttacttagaaatatgctaatctataattaatacagttatacaatctgccttcctgatgggcagggaccattgcttgcccttgtatctcagatttagcacagagcagaaaacagtcaacagtaacacttgctacatgtttagtaacacttgctacatgtttgctgaatgaataaataattctcatcatacttcctcacagcttcaggaggaaatatagaacttccaatactgggcctcatgtctccctttatgtatgaaaattttctgtttctctgtctctgtttctctgactgcctttcacaccttccccgaaactgtcctccaatgttaaacttggcttgtggcttttgagctatcctctttcttctagaatgttccagtccaagagcaggcggcttctaaattgattctagaatgaattactggctcatgcatcttcatctactttacctccactatactagaaatcagtcaaacatttttgttttttcttttaattaatrtcaattcataccaaatgatgaagcatgcttctctcataataaaggaaaataatgaaaaaaattaagttccaaacaatgatagtgaagttgcccaataaaataattaagaaatagaaaacatttttggttaatcatctattgagaacttactatgtgtcaggctctgtgctagccacttaaaatatttcatttaattatcgcaacactataaggtagatgtaattttgagtccccagttccacgtgagggcactaaggcttaaagaagttaaatggacctaaaacggagaggtagagctggcatcagaacccaggtgattttgcttctaggatcagggtccttgagtgcaatgttattatgtcctcccaaattcacctacacaaatcaacatttacaccaaggttggagatgtcgttaaacattattttataccagaatcacagttacaactgcatttcaacaggcaccattcagagcattaactcctggctcctttcaatggagataatggctgaacaaactctctaagctctaggtagagtcatcctttgatattctactggtgatgttcaaggatattttaaccaagggaagtgaaaaaagggtgagaacaatttttttaaaaagtaaaacaaagagaaagcagatgtatttctgaagcaactagctttacacagagcgccctggacttagaagcattgagaaaaaaaattgcctgttgtcatagacccaaactggctgtaaagcaggacagtctctgtgctggtgagagggcagcaggttgtaacagcttgtatttgcagtatgtcttcatccacctctgtgcatcctctagagttccccctatctgcccatttaatactaaatacctaaagtgcattttaaagtcttgtatcagatttgtcctcttgagaagctattaagctagttaccctgcagcccagagggctctttttcagtaaaactgattgtaccacagcatcaccattagaacagccctccatggctgcctgcataattcctgtgaaaggtcaccagtacttcaactacaaaggcctttttgcttttacaaaaaaaaaaaaaaaaaggaagaaaattgtaaatcagtattttcaatttttcaagaacaaaaaccagcaaaaaagcccagacacattttttttccttcttctcaccatactcataataactgcattcaattgcaaaccttggaaggaaagctacctcattatgttatgatctaagccaaaatccattttaatgtctattcctgtatctagatattgattccattcttcagatatcccacctggaagtgtggaaatttctactattggatgacataaagcagaatctgggcactattttaggctgattttgtaatgataagccaatctgccccacagtggagtaataaacaagctccctgcaaggtgtccatggggaaccgcagtgagaaatagctgatctcctgtgtgacatcagttcaaagcagttgtcctgcagccaaccttgagactggggtaagactgtgtgtgatggattcatacatggtagaatagaatagaatataatgggattgtgagttgcatcaaagcagtacattaacagattatcagattatcaatttttccttcataaataccctatcttctcacatccaagctacctgtaagtattcatcttttaaaatcactctctctctctctcctgttttctgtgagcacactctcaatgaaaagcatactcagaggcagagaaagcaaaagctgaaggaattttcagtgaaacttggccttactataaacaaaaattagattctttaaatagtttatgaatgaaatatagtttgataggcactatttcttctgatttcctataaatggacaactctttctctggattttcccctgaatcatttaaagacaaattttctattgttttggcattaaaaatagtttttctttccaagataaaggactagaaagttctagcattgtcatgaggataaggacactgaaggacaaggatttactaatgcctcctcaatccaaaacacataggagcaaagaaaattcattttaaaatttgagcatcttgcccatcatggttgagatgaaattgtttctataagtaattcagaaatatagtttactggactcctggacaattttactctcttagagggtgaataaaaggtcagtgaactctgggataacccgtctatttggtgatttagggtagaataaaggaggtagacaagaaggtttaaaaaaatcacagtagtgagtcagtcctaaaaattcaacttaaaaactaaatattgttagaattttccagcaagattcttgaagctaatagccttgtgatagagactacaataaagatagaaaaattgaggcataagaaattcagttatttacataacatctgattcaactccccacagctttttcatgtcacttaactcatccatttgttcaactgtgccacctcctcaatattcttatttaggaaaaaataaaatattacctgaagttttcacacttggttatctcgaaccttcctatagtcctaggttttattcagtgtttaagaggtaaatccttcyactccttaattatcatttaaaagactttaggcattgtgccagacaagaaagatacagatagacagtggttccaccttttaaagggmgagaagacaagatatgcacatataaaatagctggacaattatccctagacacatagacaagggtctcaaacaataactaaagagctaaaattattaaaacatggaataaagattctcttgggaaagagttaaagaactttcattaaggatgtcatttgagttcagtctgaaagtaatcataggacttggttgagaaaataaatatagtgtggagagaataaaatattgtcattcaagaaaaagaagcaaaatcaagcagggcatggtttctcttaataattaaatatgtttttttcctaacctacatcttctgcaaatgctgataaacatcaataaaatagaaaaggctgaaatgctctaggcacaatagaaaaataaggagagttaagatataagaagcattcaataaatattagaagaatgaattaattaatgagtggtgttggtgagatgataaaataaaaatatatcttactgtactatttcatattcagctgctcccttacaaaaaaatttaaaaaaaaataattagaaatggtctgaacttctttctcttagctttatgaaccctgccatgctgcctcctctgcagacaacactgaacaacaaaaattgaggaaatcaatttcaacatttgctttggagacaatgaagaatgtgatccctgtttgctaaaattcggttcgagatgtcagcattcagcttcatcttctaccgcagagccaaaagaggctactgtggttgtgtgaatatgccttttctctcttccacaccatgcatatcctaagggagaatctgacttttgtggaaaatgacgcttgcacaatttggaagggggtgcttttaaaaaatacaaaatgagaaatgcaaacagctatagagcctcggaaggagtccatgcaagtgagagacatgcaagtttaagagtcaggagattaacggtaaatcccatgtgttctctgcattttgtgactggtcgtgtccttctactccctttctgggtamacaattccttgtctctcttcatatgaatactgaaatgttacaatctttatgcaattttctgacacttgacacccaaagaagaagcacaatcactccagaactgctcattttcctgtcattaataccacttatttagttgttttgcaattagttatgtggatatttatttatttatttatttatttatttatttattttgagagggagtctcactctgtcaccaggcttgagtgcaatggcgtcatcttagccccctgcaacctccacctcccgggttcaagcgattctcctgcctcagcctcccgagtagctgggattacaggcgctgccaccacaactggctaatttttgcatttttagtagagayggggtttcaccatgttggcccggatggtctccatctcctgacctcgtgatccgcccactttggcctcccaaagttctgggattacaggcctgagaccccacacccagccagttatgtgtatttttgagacctctgccagactgtgagctccttgagggcagaatccttggcctttgcatccacagcacagagatttcaatacaagattaattgcatgattggctaaattatgttttttgttacacaaattactcatgcttaaaatgacaaaagtattattatatttatataaacttagcaagttttttaccagactatttctgttgattaaagaacagcacctgaacagcaggttagttttctcacatatatatatatatttttttttgtaccaaggaggtgattttaaagaagtgtagaaagttacaaaaacttacacatacagtcacatgctgtacacatctccaagcagcctagaagtactttattcttagtcatgatgatcattttcaaatgaataatctaagttggagtttttcaagcaaaacaattaaagattmttttacaaaaatataaccaacataatctttgattaacaaattatattgtggaaataacaatggaacattaaatataccattttgtgaatgtaccgtaatgagtttcagaagaaaaagaaaatcattttgtactattttctgggctgtgacttggatttacacagagggagaataaaaagaaattagaacaagcctgaagttttgctttttaagtttatttttctgcagcaaagcctataggagcaattaagttggaaaataaaaaacacatcagctgtttttttaaaataaagtcacaaaaaaataaacataaaactacattaaagcaagaagatataagaagagaaaaaaawttaaaacacaccrtattttgtgtaccttttaaccccatcccctccctaaaaggtattttctgtttctgagatttgcttgtctttacttcagtcatatacagcttatacgcaccacttaagatttattattttcaatatctaaatatgataagagaagtatttattatagcaacaaaataaagataaataatacagactactacattataaatggctcaaggactaaagtacttaactgatttacacagatattgataatgaaaataatacagatgtcataacttggtttttgtttctggcttggtttcaatcagagtttcatgttaacagtcaaatctacctttttcttcgaattcatcagcagatattagcacatggacaaagtataggactggcaatgctgtcttgttacttttttctccctcttttgtgtgcaattcttgtataacaaaggggagagcaagttcaaaaaaggatctaaaacacataagmttattactattatttcttacaacgagtggcttttttctagtttaaaaagtaacttattgggagctatggcaattctgatataatctgaagtcacctatgttaattaatttgatttgcaaaataggactttccaaaaatcagattttttcaattttagtttcccactctgcttctttttcactatcagcaaaataagatatgaagaaaaggtatagagaatagaaaaatctgatctcttctgtctcataaaatacatccttagactacgctttttagttgttatttgatataaagattactattttgaattgtggatacaattaatgattttaaaaaatcattattaacattattctggttttattaaacaagagaatttggtagccattatcagtttcccacaacataatcaccatagttggaggaatagcataattttggaaattataatgtaattatattaagtttcataagtgttttctgtatttatacttcraaaaattttttaaatgtgctctttctctactgtgtgcacacaaagatctgcggttctatttgctttttatttctcataaaaataaaactgaattatagaagctactatgttaactatagcttttagcacctctgtttatcattgtaatcaaattatattgaaagccaatgaaaacttaatagttacacttattttgttgaccyttactatatgtcaagaaaatgggacaatgcaatctttatttgcaggctaaaatcattttaaaattttcatgaagaaaataaaataaaaagtacaaaatgccaaattatccaaatagaacatagttcacctcattcagttaaatagtttcttttaacgcaaaagattaaaagatatggaagacaaagaaaagtgaatggaggcaaaagaaaaagagagggagaagaaggaggaagaaggaaaaggagaaggagaaagacagcactctctcttcaggccattttcaaactgagtcacttggtttgcttttagccagaaaaagattctgtattttcctgtcaaactttgaaaatcaatctgtattttcaatatttatcaatattggttcatataactttttcgtaaaacttgtaasgaaaaagaaaatgagaycccattgtttttttttttaaggttttcttttctttttttttwaattatactttaagttttagggtacatgtgcacaatgtgcatgtttgttacatatgtatacatgtgccatgttggtgtgctgcacccattaactcrtcatttaacattaggtattcttgattcaattcctaaatgaccaaagagcaagtgctgctttgatgttgctgggctctgttgattttcctgtctgtatcagcttgcatcatcagtaatgtccttagagctctgaatcttgttttcatgtgtctctgcctcccaggtgagatgttaatacaaacagtaaactaagcacatgcaattcgtaagaagagccacaacycacagccttctagtctcttttggtcaagcaaaaaaaaaaaaaaaaaaaaaaatgaacagactctaaaacccaagaagcaaatgattgaaataacgagagaacagcaaatgaacgtcagctgtgatgattagagaatgggtgtgggctcaacttctaaatgtgtaagaaagagatgtgtgagaaagaattgagaattataccacttggtaggaagtcaacgcaattatattcggtgaaaaaacaaaaatctctacgcacaaaataatgatgaaccaaaagaygcagtggactctgcargacaagttaagtatattagtttattgtaattccatttgctgtttttagagtaggaactggctattgagtggactgaagatggtkgggggcagaagagcaaaataaagaaaaaagacatatggaagaatgaaaagaaggaaggaaggaattatgaagtcagttttttaactcacagccaagaaaggcyagaagctcttactagaatttataaagcaaaaaattaaaattgtaaatatcttctgacaaagagaatctatatgacttgctgatataagggaatcagtttgtatctttattcaacgaaaagttgtatactcatgtcacaaccttatttaaatatatacagacttatgagaatgtgtgttaaatgagtttgcccaaagggggtttggattataatcccaaaagacacaatcctaaatgccataatcccaaatgttgaaatctcaaaagatcaaaatttctaaagtctaaaatccccaatgtctaaaatcttgaaattcacagtcacagaatagttgcattatgttaggtagagctattaacttgttattgtctttatttggaaattaagtatggtttaaggcaagggtgtccaatcttttggcttccctgggccacattaaaagaagaagaaytgccttgggccacatataaaatacactaacactaacgacagctgatgagatttttttaaaaatcacaaaaattctcataatgttttaagaaagcttatcaatttgcattgggctacattcaaagccatcctgggcctcatgtggcccatgggccataggttggacaagcttggtttaaggggttatatatgagtgctaaattgacagtgcgccaacctgtggacttaattttaggtgtcaagttgactggattaaagaatgcctagaaacctggtaaagcattattttgcatgtgtctgtgaaggtatttccagaagagattagggtgtgaatctgagtggactaggcagggaagacctgccctcaaagttggtaggcattattcaatcagacagggacctggagagaacaaatgctgagggtaaattggtctctctctgataactgaaaatactttttactattattattattattattattattatttttgagacagagtccaactgtgtcacccacaggctggagtgcagtggcgtgatctcagctcactgcaacctctgcctcccaggttcaagtgattctcctgcctcagcctcccaagtagctgggactacaggcacgtgtccccacacctggctaatttttgtatttttagtagagatggggttttgccatgttggctaggctggtctcaaacttctgacctcaggtgatccacccacctcagcctcccaaactgaaaagacttttattctgccgccttggacatcagaattctaggtttgctgacttttggactccaggacctccaccagctgtttcttgggtcctgaagcttttgacctcagattgaaacttacaccagcttcctsggttctgaggttactagacttagactgagccacactaccagcatctcagggtctccaacttgtagacgacctgtgctaygacttctcagccaccataaagatgttagccaattcttctaaaaatcccctcttgtgtatctatatacatatcctattgattgagtctctctgaagatccgttactaatacacacttggcgttgaggaagccaagtatcattcctgctactgtattccttacaacacagtggaagagatctgtgaaattgttccctcacaaaaaggctgtgataagttaagtgtatgaggcttcttaatagtgaaagataaaagtttaaaagctaattattattggtgctgcaaaagctgaaaatcccttaattgcaaaggccaagcaataatcagactttcagatggactgcatatacttacaaaatttgtagaccacaaccactgtccaaatacagatcacagaagtaaaaacacagatgaaaaatacaagaagtcctccaagccaaattatccaatcacatataacttctacctcttcacacatagcgccaatttgttatgctatgtatttcatcttcacatcatatcccatattagagatctaaattgtgtggagacttttagagagttctaatttgttttatgctgcaaatttgattccattraagtgcattatcacaatrttgactttatgtataagcactgcacatttatatagaaatgttgaaatttcctcactaaatgaagaaatgtcctttttgtagatctgcatttgtgaaagatacaatttcttgagatcttgactctttgggtgattacatttgtgacagtatctcatcatggttttccaacagtctcgccaagacaagatttatgttgtctgtcattatgtttcatatgaccaaagttataaagctagacacacgtaattaccaactatagtatatatttcacttttgacctatttatatgaatacaacttgactgcttataactgttatacccaygcaactgtcattagtatgccaaagtgttaatgcttgcaaaaatatgcatgttattattgcctattttcttatgtaaaatggcctaggaagtgttttgttgtgtttttatgtttctcaaataaatcyccttttaaaagtgtaaatacaattttttaaacttttttagaattatattttcagtattttgatcttttggaatttcaacacttgggactatggcatttgtgtttgtttgttttggaattatgattagctcccacctgaaggacatactgagaatcctcaaatatatgaagtcttttgtttttycggtaaatttaaaattctttgttcactgagtaagtactttgtgaagaacaaatgctagattattaattccttatgaatattttaaatctcattatttagaagttyggctaaaatctttaattagggtataaggtaaaaatggtacctggtagtaatgtgcggactctaatttctaggatttgatggatgcaaaaattcttgagcacagaattcctataacagaataagagattaaatttttactaaaatattamctatattcaaagtagaattgaataaggcttacatgcctaaaacatacagctccaactgtttagttccagttggaagaatcctcaaatatatgcagtattttgttgttttggtaagttgaaatttctttgttcactgggtaagtactttgtgaagaagaaatgctagaatattaattccttatgaatgttttaaatctcattatttagaagtttggctaaaatctttaattagtttataaggtaaaaatggtatctgatagtaatgtttggactctaatttctaggatttgatggttgcaaaaattcttgagcacagaattcctataataggataagagattaaatttttactaaaatattaattatattcaaagtagaattgaataaggcttacatgcctaaaacatgcagctccaactatatagctctaactggagtctgttatatatttaactaaaatttgctcaaatgaaattttagttaaatatacaacaagattacaattcatttatgtaacaattattgagtcactactacgtgccaggtacaggtgctctaagcccttaaagcacagcagagaaccctgccctcatgggactagtagtctagtgagagaagacaggcagtaagcaatcactgtaataaatgaggatgccatccacgattctggagatgaaaaatgctatggaacaataagagagctgggtaaccaatattgaaattgttgagagtgggaaggggagatattcagtttgcaattttaaattagtagtggtgagtagtcaaagtgcagacatatcttgaaggccaagaaaacagaatttcctgatgaattagatatwgatcttgtgagagaggttggtaagtcaaggatggcaccaaggtttttgactgagcaacctgatggggttgccaccaactgagaggaagaagactggaaatgactaagtgccaaagccaatgagctttttccctgtgatgctaaactttaccagatagggatgctacatgttaaatatcctaaaactttcgtgaaatctcctgcccctgcagtttttgtgacaccagtctcctgaatcttctgtttcccttttccagcagcacctcttcatttactggctcttacacgtctgtgcacaatcaaggttccttgatctccaactygccactccttccccatccttctgccatcatcctttggtacttatctcagatctccaaattgtcttacactcttatccaaaaaaaatctaattctagttctagtaatttagcaatttaaacaaataggccctctttttcccccttcttagtcctcagcaacaaaaatgcagaaattataaagcataccaaaagattgacaatgttgtcaagctttaattaaataacagaagtctctgcaaatgaagaaagaaaggagtcaaggccagaatacagaatacactaactaatccttcagcaggccaaagggacttagatattggcccaaggaagttgaccactcacatgggaacagagtaaacttggacttgtgcacgatagaaagcaagatgtaagaccatgcataaaaagaaatctgaaaggctgcatctgagtgtaatgatattgaaaatagctattcatttaggcaatccagtgtcaggcaagaggaggaggagatgggtactgtgtggattgagtctaattggaaaaattcaacctctgagcctgtgccatcctagctgtaaaatttgaatgtattagtgtaatttgaatctattaatgttgtgtggaaatttcaagttgaaaaattaacatgaaaactgagtaaactcataaagttccaagaaactgctatctagggacatttttacaacccacagcaaaattaccacaataccaaaagaaaaaagccagaaaaaaaaaaaaaatcaagggagaaagtcaaacacatagaagtagagagtagaataatggttttcactggctagttttatgggaggggtgaatgggtgaaagggagacgttggttagcgagtacaaagtttcagttaggagaagtatgagctggtgtttcattgtacagcatggtgactataattattaatgcatttcaaaatagctgaaaattttaagaaagaggattttagctgttcttaccacaaaaagaaatgataaatatttaagatgtggatattctagcctgacttgatcrttctacaatgtataaatgtttcaaaatatcacactgaatcccataaatatacaaattattatttgtcaattaaaaacaaaacttaaaaaagaataaacatctttgataattacagtgaacaaaatttctagcatatattggcctatcctaaattrtaaggaagcattcaatttaattcttatattagaaactgaactatgtaatcctttaaaagtagtaaaatgtctcatgaaattttttttttttttttttttttttgagacagagtcttgctctgtcagccaggctggagtgcagtgtcacgatctcggctcactgcaacctccgcctcctgagctcaatcaattctcctgcctcagcctcccgagtagctgggataataggcatgtgccaccgtgcccgctaatttttggatttttagtagagattacctgacctcaggtaatctgcccatctcggactcccaaagtgctggaaatacaggcatgagccagtggtcccagccataaattttttaaagaaataatttgcagttgataatgtgcagtatcaggaactttgaatctggaaataaatgcstgtaatagtgagcatgtcaactgaatcatattcgccagtgacatgttttgttaactaaattataatctatcaataagtatatgaagttgataactttccaagattaattaaaagctggcacaaacgtaatataatacatatctagagrtaaatattattgagatttatttcctgacattaaaaacaaatttgatacaggccaaacactttgcccttatttgaccttgggattctctgtctrcaaactccsgcccttcaatactcaacaatggctttatatatgccatgtcccatgggaacaaatctgtttctctccaggtagaattcatcactttctttttactttttccttttttttttttttaattgagatggggtctcactccatcacctggctgtaatgcagtggagcaatctcagctcactgcagcttcctcctcctgggcacaaacaatcctcccaccttagcctcctgagtagctgggactacaggtgtgcaccatcatgcctggctaatttttgtattttttatagaggcaggattttgctatattgcycaggcatgtctcgaacctgtgagctcaagcaatccactggccttggcctcccaaagtgctgggattacaggcatgagccactgcacctggtctcatcactttcatatttgagctagatccacttcaagttttcctggactacagaatgcatcatattatattatattatagtcattagccaacccattcttttcttctgggaaccataagctttttgaaaagcaggagacacttgtgttccagtgtcttctaaaacatctgacagactcctattcacaagcattttactaccaaacaaaaaactcatttgaatccctttacctccttatatctaacactttgtaatagttaaacatgtgttatattaagcagtctataaaatcaaaaaaagacttgtatattttctattaacagtaaatacatggaaattccaagaagaattaatatgcatagactgggcaaattcagtaactaagcaaatctagataatctaataacttaatgaaaattaaaatgtgtagcacctctaaaactatgctcttatgtttatatgaataaatgaagttaatctataaattggtaaaattcatcrtattaatcaattgttctataatacaatcttattaaatcacacaaactcttgtgtgtgtgcataagtaacaagtaagtatgattttcagataatttaattttgctttaaattatatattttgttaaagtggaattattgacattacttttaatctcttatctggaaaatgcctgaaaaataaagtttgcccagtatgtccccagttaataataagtcttcaatgagtgaatcaactgaatgaatatgcttattcaaaatataattttacagagtgtagtttcaatttatatttatcagtaagtaacgtgtgaatttgcctaagcaaagctctaaaatgcattttcatcagcttggttcatccaaatatcttctcctttaaagatttatcagcrggaaaattaaaccatattggttayagtataattgcataggtgatataactataaagaaaagctgctaaaggattatcaggcagtgggggaaagaagtaggctatgataagaaaggggtatataagagaaccttccaaggattcagaaatatcattcttgtttattgacctggagggtgatcagaaggatatttgctttataattttaaaactgtacatatattctatccatagtatctatgctttttaatattagaaagcaaaaagaacagattagcatatagcatctatgtaaccaagtggcacaaactgggtgtctttcaacagaaatttattctctcacatgcctggaagttagaagtctgaaatcaaggtgtcactggggctgcactttttctgaaagctctaggaaagaatctaatctatgcctttctcttggyttctgctgttgcccaaaatccttgacattccttgactcatagatgcatcactccagtctttgtctacattgtcacatggcatttttttctctgcgtctctgtgtggcttttctcctcttctcataagggcaccagcatattggattagggctccccctaattcagcatgacctcatctttatttgattacatctgcaaagacccaatttcsaaataaggtcatattcacaggtatagggggctagacttcaatatgtctttttggagtacacaattcaattcataatagcatctttctcagaagccttgttaatataataagaaaggaaagtttgagctattccctcattattttaattacatgcaggctattttgcatattcctgtatttattattttagtaacttgttcagtattaatggtaaagagtgtgcaccatgtgtggcaatgtgtgtgaaagaaagaggaagagaaaaagtgaattatcaraaattaagtgctatcatcaggcctgagttaaatttggccatgtccatttattccattagttaaatgtgcagtaaatgagattcacattgtaaaacaggcaatgacagaagtctggcctccttgttcttttagtttctgcttttttacttctcagggttttcttttttttttttttatcatgtttgtcttgttttttgttgcttttgcaagcattggttctcgaacttgcaattaaaagttaagtagaagtttttgtttattttgcagcagtattcttaaatatttatgaaggatcttaagtctgactcgctttgaggaaatatagatgaattaataattgatgtggctgctttgcagaaaattaaagggtggaagcacgtgttaaaaaattaaatcatccatggctaagacagcagatgttatttatttaaaatcttgcaaaaatgtacaattaggttttttcttcagtccaagtcaactgaaaacctaatgactcatttcaacttttcagattctaaaacctgaggctagtcaaatactagacaataaaggagaaagagaaatttcaattctttatcctaggaattttaagaatgctgtttattcacacagaaaagaagtaggaaagaaggatctgtgtgttctgtatgggcctagaggcaggacccatttatagtctcagtatttgtttatacttatcatattgcctattagccaytttggcacaaaaaaatctctacagaggtctaacatatggacattcacttgtgtaaagtaaataaaataatgaaatacaaagatgtggaaaaatgttgggttaaaaaagcttgctatgatggagcaaaggtaattccagtagctggagaagaaattcacacttttccacaagatttatataacttacaatcttggctggaagtacttagagggcaacttctctataaaagaasagcgattttatttctgcctatggagaatgacagagagtctacctgaacactcacactgttctagagggagaagaatggaaagcacaacctctacaaatcctcaccaaaagcctcattttcttatctgaaacaaacaaacaaaaaaagaaattgcaagtttagtgagaaacaaactatgctactgttgtatcttgaagttcctacttaaagctgtctagttgttttgaaggtgtcgtttttaaaagacatattcatctagccagatttagagcctcttttttttgcaatraaatactccataacttgatggatcattttttataattctggtttacccatctctgctactggaagattcccataaaacaactgtcctaagaatggctgctgtcatcaagttgtaatgcacagggtaatactttatgtattttttaaacatatgaatcaggaagaactttcctgagttccttaaaaactgaaaattgtaatatttctaatatgagcagatttttgaagaacatgcgtatccttagtgtgtccaaggtggcctaaaatctgaaatatccttccccaattcaccagcattagttatttttctaaagacttcattaacccaaaccttatactttttttgttgatcctatcaaattccttatatttactgttggttctatcttatatttcctggaaatataagattggttccatcaaattccttatatttcctgttggttttaacacaacaaaaagaaagttatgtctctatcacagtattgactggaaatcctctttatttgattcccccagtggctcagagaaacattatggggttgaagtagtggtttctcaatagtctcacgactggagggtcaacaaaatgccctagcttcatttagctcccattaagtgtcctttagtcacttgacggaggtcactgagcttgcgtggccccacagagaactgatgtactcaacatctcattgcttcttacatcatcaaatattttcttattcaatccaagaaagataaatttttctattctctcctaaatatctactacctctgtttctaaattaaataagcccaagatcctattgtatgatcccaaaatgtgcttatacatatctttgcccacagttcactatgaaatgaaaatattgtgttactaaatagctagccttctccaggtagttaaaattataaccgtgtcctccaagcattgttatgtggtatgtcttattcttacaatctttgcaacaatggtataaaaaattaataaatgttcaagatttagccagtgcattcaagaaaacacaagagcaatgcattcaagaaaacataagagcaatgcttttaaagcttagaaaggagtggactgggcttgttcatccagctttcagttacattagtagactcactccatcatgattgaaatgtgtagcttatacaaggaaaagcarctactcagtactttcaaagaaggtagaatttraaaatctagacttaataggagtaatttaggttagaaattaaaataatcttcctcattttaatgctatagtgaatgtgtgacaagctgtataaatccccctttgagactttgggacttgtttctccagatgctagaagagctgtcctcagctgttagccttctcaagaaactgtcctggactacagagagcagtcttgcctagctgtaagcctccttcctggggcagcagcacccactgactggtgtaatttctaaagtatagtatatagcataaactctatatcactgtacagtataaattatgcagtatattatgcagtaaattatgcagcatattgaataggatgtaaggatccagcaccctcactgaagtatgggataactctttgttattgagacaccgtgacagctacaatttttccttcggcttgtgtcttaggttaggctattacaacaaagtaccgtaggcttgttgatgtataaaacacagaaatttgcttctcatagttctggagacatgaagtctgaaatcatgcttgcggtcaggctctgktaatgacactcttctggactgcatactgccaacttctccttgtattctcacgttgtacaaggagggctagctaatgccctggcctcttgataaaggcactaatcccattctgagggctccactttcctaacctaattacctcccatggccccagctccaaataccatyacattgagcattaggtttcagcatatgaattttgggggtacacaaaacatttagcctattgtgctgcccaatcctgctgcctcccccacttctccctttcatcccctccctccttttcctctctttgctctcacatccaattcattcccttctttctcctccctcttctccctttccctttctccatcttcccttcccttctcttctctgagagcaatcttgcatgtaatctcagtctcagagttcgcttcccagggagcacagctgcaaccagtgcttaagaaagatgggaatttaacccaaattagtttgtaatatttctttctagacaaggttttaaaagaataaaataagtgattatctttctggaatcatttaggactgaatcaacccagaattattcagattaaatgatgttgagaattatgagatgcattgaaagagttaaaaaatcaattagtacacacgtaagaatgattcaacgacagagaataacagattccattaaaaacaaaagtgatttcaccagccacccatctgtgtacacttccaacattcttttacttttccaytaacagttgccttttcttgttaacttctcttatctttatataaatattaattttcactgtaatataaatcaaatatgcagtctatctgctttgcaaaatacctgtgttatattctcttttgagaggtaaactgcagttactttaatagaggtctagaagcccacatatccactattgtcaaaagaatcacatggtacagtattagaaagcatcagcaatcccaaaattggggtgcttacatcaacaaggggccatgggcactaacactaatgttggtagaaaaacatcaggtgctaagtggctacgcattgccaacacagtcttttatctctgtttaaaatagcaaagtatcactcatgcaccttttgtgttgttttgaaaagttttcaaacttgttaaactttcatattataaattcacaagcagctgatttgcatttaacaaaaattcttctatcatttcagaatggctacccatgtctaaaaggatggcatgtatctaagctgaaaaagtgtgttctcctttacattttagtatccttgtctcattacacagttaacattctgtttcaccatctaatgtaacataatatgacaagtaaaatttgaggaaagaaatcattttttatgttttgtagctactttctatttgaaaagctgatatccatctacacattcttaagcacacaaaagagcaccacagcttaagccaacatctgcttgcagacactggttaatgagttgatggctgacttttaaaaaatccaagtagcttggcacatcacattccaccaaaaaaattgtgacatatgatgttttatagcttccaatttgcttgaaaaggctgtgttttttttgtgtgtaccatcttttcttgtcttgtttatatattttaccacctacatggattcacacaaaaatattgaattcttttcattttcttaattaagaaaaactatataattctataaatgccaatggaaaaaaaattgctaaattatgttccttctaagataaaagcacagaaaaagatggtctaagactgtctttgcttcccatatgttccagtcttgaaaagaatgtacttatttgccccagttgatatagtgcgcaagaatttctgggtgcaaatttatcattctccttccaatagctcatatctcaatatttagatagtcttcatgtactttttccacattaaatattaaatgtttattcccttttctgaaactttttaaaattatatcaactattaatttaacaataaagctatcttgttatcagaggatcaaagtattgacattgaatccaattctctgaccacccactacttaacctttcttattgctgtttacattgccactattatcagttcggtgttcatcttttgacttgtacctcattgactctgaattaaaacaatgtaagtttcctgtggggaaaatttcttggaatttaagactgaatatccttttctcatttaaagtggtaactttattgtcaagaagcaatgatattgaggggaaaaaaataacatttaaattttttaaaagactgcgctaacctatttaatttttataaaacttcaattgtataattgatataaagaattttgaaattccaattccttaataaaggatgaatctctcctgccacctgtttttgtatggcccacaaggtaaaaatgcttttgccattttaaatggctacattttaaatggttatataagtacctatacaatatccttgatttgtctcttgactcaaaaagcctaaaatatttaccacacatacctttaagaaaacatttgcgagctcctgatctggaggagaagatccctgtgcctttgttactagtatgctagtatatagttttctttctttcttttttttttttttttttttttaagacagtcctgcactgtggcccaggctggagtgcggtggcgtgatctcagctcactgcaaccttcgcctccccagttcaagcgattccctgccacagcctcccgtgtagctgggattacaaatgcgcgccaccacacctagctaatttttgtatttttagtagggacaggatttcaccattttggccaggctggtctcaaactcctgacctcaagtgaaaccgcccacctcaacctcccaaagtgctgggattataggtatgagccactgtgtggggcctgttactagtatgtagttttctatgacaactgtggtcactggagtcagaaattacttccctcagaaaacataagcagattagatggatgttggaaggaaaatgctttggtttattttccccctgctttctgtttttatgtatttcrtcatattttasttgtcaatccagcactgttttcccccatttcttcaataggtttttcttccagacagaaatatcatatttcttacagaatataaatgcaacatatatttcatgtatttgtggcaagtggggaccatgatgtcgttatctgcctacctcataaaatctgacaaagtgattactaataaatacacataaatcaaattaaaaataaatcaataatacaaatgtaaaataaatttttgaaaagacagaaagtgttttaaaaaaagaaagtgtttttttccctcataagtaagctttgggtaactgaaaaatctgtawaaactgaaaacatgctaataattgatatgaattaccaacttaaataatgtgttcatttaataaaatttcagttttgttaaagattttacactttaattttttattggagtattttgacatgaatattcttgattatgtcaacaattcagtgatgcttgcagacactggatttgtaggaagttttctcaattttctaggtgtcatcttttataaaagaacaattattctgtctataagcatgacctttttgatgttctatttgtatgactctaaataagcaatattttagacctagataagttaagtgtcttctgaagtgtcagggattctgtattctgtctttgtaagttattacagaacaatgagtttataataatgctccaagagagttggacaccatactagatatttcattttcagatcagaacaaataacacattccatgccatgcaggtctggcttcccaggctgctcaaaatgaaaaaagcaaaaaagcaaacataatccctaaatttctattttttgggaatagcaaacaagatgaatgatatctaaaaaaacaacttcaagctctcattttagaaaagagagaaactgaggtcgagggcaataaaggagcgggggctttgcaggctcttccaacgcttggcttctgtgattttttttatctttaaatgagtaaacatgagcttttatattggattcacacttggaatggaataaaatagtatctaatgcaattcaaaacagctttagtaagtcattgtgctagtatcataacatttcttttttcggtacatctttcttccaaagtcagtttttcatttaacaccaaaagagcccacattgcagcactcagaaaagaaataaaggttttatttttaaagagtgttaagtctacaagtgactaaagagtctttgatactaaaaataccctaggtaaagggggaaatttttcagtttgaacagtatgtagtcataaatgtggcagactttctattagctcagactctgggaagaacagttggtgaggctgcagctctttgctaaggagcataatacatatcacagggagttatgaaataagaatcctccattctaccataggtacaactacacaagtacacacacacacaaatacacatatacacacatccacatctaaatattaccacatgcagaaatgccacatccatacacagactcagagatatacacagccagtatcatgggcacacatacacacatggacacacacacacacaccaatgagtaggtaccacaagtaactatagtaatagcaactgtcatttaaactatatcacttatattagttattggtcttctttagtctaatgaaatgacttccttattacaaaacatcttgtcaccatattgaaaacagcatgttacaaagatggcagaatcttgatcgactgaagaatgagtcaacataattacaatagcaaaaggaacaaacgcaaaaattgtatgtctacgaaaacatggcttattgacggttcttgggaaaagataacaggtcactctggttcctcatctgtgaaatataggagctggactgggtgttctgtgaggcttcttacagctttcataccctcagaacatacatttctatttgcatatgaatgagagtgataaattcttattggctaaccccaaatgctttgccaaaacatttgattaaaacatttactgcacacctgaatattctgcagagataaattacaatgttttccatataaaatatttaatttgcctgggcatggtggctcatgcctgtaattcaagcactttgggaggccgaggtgggcagatcacctgaggtcaggagttcaagaacagcctggccaaaatggcgaaaccccatctctactaaaactacaaaaattagccgggcatggtgggtgcctgtaatcccagctactcrggagactgaggcaggagaatcacttgaacccaggaggcggaggttgcagtgagctgagattgtgccactgctacacagccctggtgacaagagcaaaactccatctcaagaaaaaaaaaagaaaaagaagaagaaaaacatttaayttgtgcctaaactaagcagagaaattgttggtcgacacttacctttaaccttgaccacacaagtgtttcaagagactaataatcactccttagggttatcaatagtaaactatcgatagcatcatgaaatacataatttactaagggcatcactgccttgggtgctgaatagacactgtccatgttgagcagacttcaaataatgatggcaaagtgatagctctatattaaaacaaaaacttcctgtttgtgcttcttccgaaattgttttaatttggatattctttcaaattttttcatattagagaaattaataatgtgatttaagtattcttttatttcctctctcacatggaaaagaaaaccagtgaactacccacacatatcataagctatcacatattgagtctcctttttaaatttgcatcaccaatgtcaatttttaattcaaggccataatctgttgttaaaaagaggagtcttaaaagatccctcgcagtagtaataaatgagagaacacaaaatttcctctatagcacataaaatgcaccaaatgagacaggaactaaagggttccaaatccagttctggataataataaacaagtctcatgacttctttgtgtctacttttcttcctttttaaaataaagaatttagagtagattttttaaagtcttttttagctcagaattatttgtgtattgctatggttagaacatttgtgtcaccccccaaattcatatgttgacaccctctcaagttgatgtcattaggaggtggaactttgggaagttaattatgtaccgagggcaaagccctcatgaatggaattagtgcccttataaaagaggccttcatggccaacatggtgaaaccccatctccactaaaagtacaaaaattagctaagtataaattaatacaggtggccagcgcctggaatcccagctactcaggagacagaggcaggagaatcgcttgaaccggggaggcggaggaggttgcagtgagccaagattgcaccactgtgctccagcctggtcagcagagtgagactccgtctcaaaaaaaaaaaaaaatgcttcagagagtgagcttgtccttccaccatgtaaggacactactagaagatgccatctgtgaggaagctcaaccatgctgacaccctaatctcagactcccagtctccagaatgtgataaataaatgtctgctttcctgttttacccagtctatggcattttgttataacaacccaaacaatctaagacatgtgtgtaattaactttgaattagtctctactgagcactcagtgtattttcatactctgcttgcaatatgctgttgaatgcaggaactgtgacttgtaaatctttaagcctctacagcattctcatcatgctctgctcatagtaggttcttccatctgtttgttggaagcactagaaacaaattataaactattttctcaggataccttttaatgtttaaaacaacagccagattttcacttctgttctttgcagagattgtctttctttgcactaatgagaaagatgcataccctgaaaaatgcttttaagtaactatgaaaaaagacttgcacaaagcatctgccctattgcatcgctaatggggtaacctctttatgtttatgcaatccataaatagtgggcacaaaatgccaaaggtttttaaagtgctgaaaataacttatctcttggaatagtagcatttttattttaagctgcaatttacagatattaaagattgtcattttgccccttcttctgtagttgtagtttaaaagcaaaatagacaactactttttgaaagggcaaaagcaaaatgatgaaagaaaataaaatatattattttacagagttcagtacttttaataacactggctttgaactcttgcttttcatttccaaaaccatgggggcaagataattcctccaaaggctaaaaccaagacagggtattggtggacacctggggctcagcaggccyggggagatagtgaaacctgagagttagagtttaccaggaaggtgtgataattataatttggctggaaaaaatagtaaaactaaattggttgggttgacaaatagccaaattactcagcaagttctaacatggagttgagacccatagagaacatggagatctgtcttaagaaacagaaggctaatgacaaggtgtagccttgagaaccaggaagggaacaaagactagtgtaatctattcattagcgttgttctgaaaaattgatctgggtacaaaaagtagtccaaatgataaaaataatgcattttctgcctacaaaaggaaagtacccttttttttttcagccagataatacacagatacaaaaaaaataagagacagagatggatgaaaaatgtttaagtaacagaagcagaatactagcatcacagttaagacatatgacactggtctttagcataaggaagcagaaatatgaattgcccctgataccagcataagtgaaatctctatgcttagtattggggatgcagtaactagcaaaaacagacataggaccttcctatatgatcctattattcaatatggaagatgtccataaaatagtcacccgagcaaatgtaaaactgtgactggcactaggaaagagaagtgcatggtattctgatagcataagagggggatttgacttgaccaggatggtgcaaaacagcactcttaaggaagtgatgattttgctgagatctgaacaacgagtaggagttaacaggatgatatgtgtttggtggtggggaggaggtgttaatgaagaagggataggattttccaggaagtgggaagagcaagagcaaagtcccgtattcaagggaatggaagaaggccaatggctgaaaagtcaaaaggaaggaacatgcagtgacaggtgacactggagaagaggtggaaggaagaccaggcacagtaaaggccatgttaagtattttggtgtttattctaagatgagtgagaaacaatttaattgtttaaacaagagactgacatgggacgttaagttttatttaaaagaaaataaaaaaagattattccagcaatggcatagtgatgcagtacagcccagatttgaaagaaataaagtggaaggtttttggtggctttcattattttccaggtgaagatgacagcagcttgagctagggtcatagcaatgaaaatagaaacaagtcggtttgtgaaatgtttaagaagtaaaatcagcgggcctggagatggtttaattggatatcgtatatgaaaagagaaagcctttaaggatgactcagggttttggcttgtatatctttgaaatagcaatgctaggaaaagatcttattttgttttgtttgcagtgggaaggtggtaatgatattaagttcagtttgggataagtagaatttaaaatgtctttaagatgtccatgtggagataccaaataggcaattgaacataccagtctggagcttagaggacagtgctgggctggagataaaaactgacaaagcatgaacatggtcagagccacaggcctgggtgagattgcctgggaagagaggataaactgagaaaagagatcttaggatgagccttgttaaagctaaaatgtaacggagaaggatacatctgccataccttcctcactctgaccagactttaccctaatgtaaaaatgtgctatcagtaaaatgaaaagtaacaaataaacagagaatacactaacagtcggccgtggtggctcatgcctgtagtcccaacactttaggaagtggaggcaggaggatggtttgagctcaggagtttgagaccagccagggcaacatcaaaagaccgtgtctctacaaaaaaaaaaaatagaaaaattagccaggtatggtagtgcatacctgtagtctcagatacttgggaggctgaggtgggaggatcactaaggcccaggaggtcgaggctgcaatgaatggagataatgccactgcacttcagtctgggcaacagagtgaggccctgtctcaaataataataataaataataattagaagaagaagaagaatacactaacattattattgcaaaagtcagggaacttaccagagaaagatagcttagagtggtcaatgatttaagtaaactatgttaaaaaaaaaaaaaaaaacctcaaataatgaaaacatayactaaggtctgattttcaccttaccaaacgatgtttttatttatcaacctaattctttgtcccatgtctattaaaaacacatttttttcaacaatttaaaatgagatttgctttggcatttggaccaagtgagttgtctgtgcccttattgattaacactggggctgaatctgaagacagcagccatgtgcctcagacaggaagctgagacccaacacagcagtgcgggagaggggctcaactacaaaccttaacaaagcaggctgggtttccagatagaggagagggtttacaataaaacagaacaggaatagtatctcctctttgagtacaacatatatatattcatgtacatatctccttagaagctccctcctcagtgacaatcagaaaatattgattctgagggaaaaacctggacgttgtttgtgaatcactaaccaagcatttaaggctttggactgaggttaacctgtaagtacaaaggtgaattttagtaaggtatttctaggaagaaaataatgcatgtaggtcttcattttgtaatggttgattctatattttattacaaaataaaagaaaagcacatctgctagaagtatcatcacactaaaagataaaatatctgtagtttttacatctgagtttatgcaagtgttaatttctttctattttaaaaacaatagctgttatgggagccataatggtctgcagtgaggcagatgaacaaactgaagaattagtaaaatactcccagttggtaacttcatcatgagaaagaaatattctgtcagggctttcaatgagatttttaaatcttgtgttgagtgatttattgttttatatctacaattttaaattgttctgagaaatgtttttgtactctggagagaattgatgaaaacataactgaaaatatatgcagtgccttttaaaaatctttgtaatctttattttaaaattcctttttatgttttctttcaaaaagatagtwttcttctgacaatgttattctattataaattttaattttcttattctgctttgtctaactttatagatttaaatacctcagcaaatctaaagtataaggatgaaraaaaaattctgatgtgatgacaatgtgccaactgaatggtatttatactttgtagtcagaaatgttacaatgaaattgtctctgcttgtgatctcacattatggagagttctgagggtctgacaactcctgacattatgatatactcctattacatggttaaagcagacagtcagagcagagttctcagcagagcacaaggaaagatttatagacatggcaaaagaacactttgcctgttcccttctttaaataattatgactttccatgaatctctttctaaatcaactacagaatgacaaatatctgggcaaagaaaaggccacaaaaatatcacttactgtaagcactattgaggttttagaagcacagtattgaattctctgttgtacattctgcatatgattcattatgtgggatgctccccacctctccacacaccatatatttctcccattctcattcaaaaaggacttttaaaactccctctctctgtcaagttckttcgtttctcaatacaaggagtcaagaagaaaatatttcagtgtatttttcattgaacaagttaaggagatgtgataaaaagatttgtctaattgattaaatggtatgtgcactctggaaggactttccaggattttggaaaaggaaaaataacatttgcaggtatatgttttatttaattgtgaaggtttatataaagtaacattttgaaatactgggctgggtgcagtagctcacgcctatgatcccagcattttgggaggcggaggcaagtgggtagcttgagctcaggagtttgagaccagcctcggcaacatggtgaaacctcatcactacaaacaatacaaaaattagtcaggcatggtggtgtgtgcctatagtcccaggtactcgggaagctgagatggaaggatcgtttgagcccaggaaccagagttgcagtgagctgagatcaggccactgcactccagtctgagcaacagagtgagaccctatctcaaaaaaataaaataaaacctgtattttttttcaatactgaaatactgaattttgaaaaatgcttccttgttctgaaaagggaaagacaatatttatagagtgtctgctctgcaagggcctttccatagattatatctgtcaatctttacaacagcccaaggagggaagaaatatcagtgccattttacagataagcacactaaattatagacaagttatgtgcccaagatcacacagcraataacagacccacactctaaagctttgtctggccctcaactcatgttctttccgaaggcctgactattgcctactcctaagttttgcatacaaaaatggataaacacacaaagtgaaaacaaaaataatctagccctcttgctttgctattataatctaaatgcacaayggggaaaaaagaggtgactgctgatttcatagtttatataattccacctatttgaagagtctaacaataaaatacttaagggatgtagcatttataaatttgcagacttgctgagctctgagctatgcatattatctgcattatattctgtaactattttaatcctcacaataataacacaaggtaggcaccattactatctccattttaatgatgaggaaactaaggctgagaggtaaaaaagttatccaggatcacacaagtgattctataagtggtagagctggtcttgaatctatgattatagggtgctgaagcgctcttatccatgatgctaaattgcctcctttaattacataattactacaaaatgaaactaaaacaagccactgattatgtttatatttctatgtattttacaagcaatatattgcattatctatgaaaactgtatgattcttatttttaattcccaaaaaatgcattaattctgttaaaaaatacagaatcaatgcaaaaaaatgcattaattctgtaaaaagaaaactgcagaaaaccaatatagaagttaacttgaaaagtaacatgtgaatctaacctgtcacattcctcattaaacctacctttcttatcaaaggtaactactgttcacagacatataaccttccagacttactaaatgtgtatgtgtgtttgtatatatatgtgtgtatatatatataaatgtatttatatataccaatgtatttatatatatacacacatatacatacatatatatcatattatatattatatcacattatatatgtatgtatatatatgcatgtatacatatgtatgtatatgcgtgtgtatatatgtacatatgtgtgtatatatataatacaaatataattttaagtcatattacataccctaacttttttttggctcaataacatatcttggagttctttctatattggaacacttaattttaatgctttcattcttcacttctgaatagcttaccataatacaaatatgtcatattttaattttccattttacagcattattttgtgggttctttaacctttctctaaagcatctgtcatgttatttacccaattacttattgaatgcttctgtttggatgcccatcaggtgggcttaaatttccccatgtccaaaatgaaatttatcaccatcctccacattgctagctcctatatgttctttaagtcagggctactgaaaatgtgagcaatggacaagtgatggtcagggattacttgaactagtccatggttaaataagtacagaaactaagagaaggcatttagaaaccttcatagcactttggcaatgctgcaacatcttcctgcactaacacgcttctactaatttatttttactgcattttacaaagtatgcaatgaaaaagaaatttaaaaactaaaaccagaaagcttatcctttaccacagatactctgagaaacagttaccactgcaattcagtgaagggccctgctatccaaccagtctaagccagaaatgtgagacttactcttcctatctctctgaccaagaatatacatcggtagagaatctagagaaaaaccatgagaatgtttttagagcaaaggaattgctttcaaacttttgtctttactggtcccttttccattaggataaaaacatgctgattttctctgaccttttgaataccctccaccactagtggcattgaagtggccctccaactattaccttagctctttccttctctctgtaataagatttttattaaacatttttaggaatgcaaagttccctttcatattccccattagttttgttaaaccactgcagtgtgattttccacaactcctctgctgaaaatcttaaagtaaccaatcatagccttatttctatgaggttggtggaaaagtaattgaggtttttgctatttcttttaattgcaaaaactagaattagttttgcaccaagctaataaatcccgtctttttttccttgacttctgtgcaacatctaataccactgaccattcacctcttcttgataaactgtctaatagtttctatttcaaatcattcaataaaatgtgaagttatctgtcaataggtgtaggagaagctataaaattgcccctgtagagattaagagagggctatgtctgtagaaaatataaagatggccaggcagtgttgagggcctagctcagcctggagaccatcactgtggagtagcaccaactgcttctttctcttattttcttcagtgaatgtagccctggtgtagatacggagaaagtgggtggttggattgacccagagtttgtcattttaaagagtttgggtggtagctgaatgttactagaatagataagattacctaaggaaaacatgtcgaaggagaagaaagcaaaaccaaggataaagtttcagacaatgttagtatttaaagagttggcagaaaaggtgtttactgatgatgttaaggaaatataatagccagatgaagggacaaacatgaaaagatasgggctaaaaattagaggagagagttttaaaaggcaggtgtggtcaatagtagccactgtaagcaaattacgctgtatggggcagggaaatacataattggttataaaaattaagaagccctgagtgattttttcaagggtggtttcagaaacaccctgagaagtccatgcagctacagcttttgctgaaccagacctgaacactgcttctgctgctctgggacttacactagtggccatggtattcccaaggccataaaatacatgaccacaattagtgggcagaagcaaatctccctggaaaaatctttgtacgcacaatgccttcccaaaggctttgaccagagtgtgttatctgtcatcatctactctattgcataaaccacccaggcccctctgtggaagccattcaatcaagataaagtccctttactttgataaagagaaatagcaaagtacaaagctgatatttcctacctaatgccccttccaagccctgtcttaattgacttctaagctctcgtgtctgactttttatggtgattttcttctgtctctctcttcttcaacacttctttctgccaaaaaaaaaaaaaacaaaaattacataggacatgaaaaccttctaaatcaacaacaacaacaaaaaagactaatctttttttgttcttctcattttccatttatatttttcattccaaaaaatatcccaagagccctccttgttttggcacacgtgtcatgaaaaccccagtcacttcctcccactcccaaagtgcctgatgaagggaacacaaatttctcaccatccaacttgagggaaaggagtgggagtcatattacataccctaacttattagggtatgtaatacaagatttcctaatgtgtcaaaagtgcaagaaaagtctcaggaccaccctgcaacttgaagtgtccctcagtaaagaggaaaattctcctgctttttcagaaagcactggacaacaagcatgttctaaatgccatgatgttaaacatgggacaggagaaactatttcactggatgtattccccgctctaatttagcactatggcagaatcaatatgtggccacccaatttcattttatagttgtgatggttagtattgagtgtcaactcggttggattgaaggatgcaaagtattgttcctgggtgtaaaggagattaacatttgagtcagtggactgagagagacagatccatcctcaatctgggtgggcaccatctaatcagctgtcagcatggctaggataaagcaggcagaagcaagcagaataagcagatttgcctccatcattctccagtgatggatgcttcctgccctcaaacatcagactccaagttcttcagcttgtggactcttggacttatatcagtgatttgtcargaactcttgggtcttcagccacaaactgaaagctgcactgtcttcttccctatttttgaggttttgggactcagactggcttcctagctacttagcttggagacagcttattatgggatttcaccttgtgatcatgtgagtcaattctcctaataaactccccttcatatatacatctatcctattagttctgtccctttagagaatcctgactaatacaatagttgttttccaagtatatatcaagctagctaccatgcagttaaggagggttatgattctgttccagccaatgaaatgtgagaagagccaatgtggcttgagatggactccctgtaatggtgaaggtggagttcgtgtatacagtggtagatacacaatattcaagcagactggtttgcatcagctgagayatcacatggagaacagtcattaccaagtatctctctacttgtaatcaggcttttcatgagtgacaaacttttgttgttttaagccacaagatttgaagtttaatttgttactacacagtgtacatagtctttcctatctcgattaatagaagcttcacacaattgtagatctaaaagagattattttctccaatttcttccgaggcccagtgagtatgcgtgacacgtccagtattacaaaattactgagtggcgcagaggagcctagaatgccagtcttctaacatttggttcactgttctctcttttttaacaaagtttacaatctacgatattggaacaatagtgtcaaatattttcatagcatgcatttatcaacattttagaaaaataggcacatttatatacatatgtgtaataaataaatattattttaaatgtatgtgtataaatgcagaaatgtatatcttcaatgtcttttacataacgtgttggaacttggtgccacccatcttgataaagatttgtagactcatattgttgttttaactagaaactgccttaaatattatatattgtttagtttttcctttgttgttggtaaatgacgaaaaagaggcccagaaagtaaaaccatatttcatgagttcatacaatctgtaggagggtaagatttgagagggaatacattgatagtctttaggaattatttattattattatctgctagggactaggaacaaagcaaaatagtgtgaagaaaattgctgtccattacataagactgtggtaatctcttggattcctcaggggaaggaggtgaggaaaacaatgtcactccaacttgttttcccttgtggttaaataagccattatgataaattacctcccaccttgtgtgcctatgtgatgtctctgcacaagctttcctttttgtggtgttttagtgtcctttcttggtaaagtactcatgccctagattcaaatgatcctctgttagactgtagtctctgtgaggccctgagatcctgaggtccaacaggtctctactagcgatctatttaattgtcaaagagcaatgcaattccttcagaaagctctgctagaaagataatatttcaaatcccctcctgtttatgaagtattttctccattagaattgtgaatattatatgtacacatcatatacgtaagctcaacagccatcttccatgatatgagctgaacataatcaaaaatctatgatctggctctcagtaacccaacaatagagctcataattcctctctgttggttaacttttaccttgccttcactggtcaacaagtagaagcttttcttcttttttttyggaaaaaaaaaggtatttgacacatagtaactgtacacatttatggggtacataacgatgttttgatacatatatagtgataagatcagacaattagcatatctatgaactcaaacacttatcctttctttgtattgggaacttttaaaaaactgttacacctcagcattaaagggtcccaagcaggttgaaaaaggaagaaatgctggttattcctccattggcaaaattatgcatatagcattgcctcttaccagttagcaataaccatatctcccctatgccatcatagtacttgggacatatgttcattacagattatttcattgtgacttagtatgattcatttgtataagtccctcctattaaattataagtgatttaaggtaagggattgcttcgtatatgcctacatcccggcaccaatactaaaagttaaatttgtttgtttcaataaataaaaggataaattgctatggaagtaatgatttgaaagtgatggaaaggatcccacaaatataaataaattacatgtacagaaggtaagaaagcgaaattcaaagttgattctgacttcactgcttatgagttttacattcatttatttttcaagagggtcaggctcacaagccggccttcctctttctaggagaaatgctttttcagatgcacagaaatacccattcttggcttaagacataaaaagaaaaaacaagactctatgtagaaatcagaaagtagggcagggcccagaaacatggtatctgataaactctgttctctgagaaggaagaagaaaatgccttctccaactaacccagccagcttcagcttcagctcactacatttttcaataggtggaagtatatcaagcacagagtaagaagagggtccttctagagtataggatttgtctaaatcctgcacagagagcaaatataaaggcacaggaaatgaaaattatggtgctggaaccacccagacagcatccaatgggactctctctcccttgaatgccagttaagtgttaatgagaaacctgggagtacccccaagataccatggccaagacttctattctccccatttttttaatcctcaagctgaatatcatcacaacaggcacttattcacagggacagttaaaaggatgtttgtaatatggcttgaaacccctcaggtgaaattggctttctgaagacaaagctgcggtgatggatctaacttcctctcacttcctgtaacttgctctgcttcctaaagctctattctctgagttgaccttgcttagctggtattatattttagataaacctatctattaataatttactcatttctcatttacattatgttatgtttgttttttaaggaagtaagagtattgattttaattcctatatcatgaagcaaattatttctgacctctgtatgtacagaagatatgcacttaagctgcaactcttactggccataaaataccctgctgaatcatgaatagtaaagcaaataactttccatcttgaggccaagggtgcatacttccatgggaaaacaaaataaggtgatttaattttaagaaaaaaaaatcatgtagaaattggggaaaatttaaggaggactataagagtttaatataagaaaatctaaatattattgccataattgtaatgctacaggggaaaatatattcagaattgtatcatccctttataattgaaagacaactatattttcctcaggaagttcttactttagtgaacaccaatccttaccttaacttcccaggatataattttttcttatttgtctagccactctattgaggcatataaggtcatggccttggaaatgctctatacacacacacacacacacacatacatacacacatctatgacatcatcaaaaatttttaaggctaatttataattatcctttaagatttcttatatgtacatggtattactactgtttccttccaaaatcatgagtgttctgaattttgtgaaattgatccttctaaaatgtttaagctagaagggaaagaaatatggatgcaccactgggaaaagagaaggaaaggtgatgtagtagggggtgagttctctctgctaggacctctgcaaaagcaaaagttaaaaagggattaataacagggttgatttgcaatagagtccaaactcacattgctttgactctttgttcttattctgataacacaaaccaaaacatattcaaaattgtaggatacaaacatatatagattttaggctgatgaaacgcttctctttgggaccattatcatccttaccctcatcagtgcttccctaaatgtttcagtacacactggcttctccctttctgccttctgtgttctgccttctttgttaactatccttatactcaatcccaaacaatttaccaggttgcttgcatatgatcatcttttctaacattttcttatcgtcccaacgatactgtgaactccakgaagacacggtttgttttttcatgcaccaaaaaaaaaaaaaaagaaaagaaaagaaaaaatccagcactatgtatgactctttatatttccagcttctacacagtgcctggcccatagcaaatgttaattctgtgtttaattagttagttgcaatagctgaagaatgatttatattatttatctagaagctaacaatggtatttccattttaataaacagatagtaagaatataattttgctcttartcttctttaaagttgtcacaatagaactctggaagggaaatgtatctatcccatgccattttacattttaaaacccacaaaaagccatctaaacctctaggacaagtgtaggtttaagtggcttcccgcctgttccaattaaaaaaaaacactactaagcactgtaaagtataaaagaacattaaaatatcatcatttgtgattttgtgacacaattctctaatgtgcagttttacacattcatccagttggtcattaaggcaatttttgtgatagttgtttttatctttatttagatctgagtaatagttataccagatagttttcaaatttgtgtattcttaaagaaaattgagataaagcactgatgagcatacttttacgcattattatagttattcttytttttttaaaaaaaaaaacttcatttccgttgggtgccatggctcacacctgtaatcccagcactttgggaggctgaggcgggtggatagcttgagcctgagcccaggagttcaaaactagcctgggaaacatggcaaaaccccatctctacaaaaaatatacagaaattagatgtgtgtggtggtgggcacctgtagtcccagctactgggaaagctgaggtgagaagatcacttgagcttgagaggttgaggctacagtgagctgtgtttatgccactgcattctagcctattcaacagaggtagactctttttcaaaaataataaaataaacttcgtctcacaagtatgtaagtaaaaatcaatatgtacttaaaataaggcatgccattaatatttagatgcaacaaattgcattttctcaatatcaaagtgcttggcaagatagctcattttgtattatcaattttttttttattttccagaggtgaaaatttacagagaattatgtcataatcaatcacgataaggaaaatacattaactgtgggctattaaagaaaatcttttatgtgcttgtgatccacctccaggtagatttattgacatataatagatgtcaaataactctaaatggttgtctagtggtaataattacattttggggccacactttatcaagtcgattttatatataagaattttactacccaactgacaatgttatgatgggctcttctctcctaactgatgatattttgttaaataccatgatcaaaccttcagcacttcttgaaattaggttgaagacatcttgcaaaattaacatttcacatacagtttgaattcagaggtgtgtttaactcttgagacagaaggaaatcaaggaatcatatttagcagttgtttttgctctcaatctgtcacgttttctagataaatacaacactgatgtgaagaagtaaattttcatatgacttctgtaatctctaacagctcattccatgtgtatatttatatagttttatctccctatgcaggatcaaagttgatgtccagcagcctctctctggttcctcccattaaattcacaccacatgcctccaccagcttttgtgtaattaaacttgctatttttaayacacaagcagaaaccattgaaaggtaatggtaactgttgtgtagatgaaaaaggcctatttgtcaccattcattataccaattcagccatgataaatgaacagaaatggagtattctccttatttctagtgcaactcccctaagctcatggtctgaatgctgagagagggtgctctgtagggagatggcatgcataatgcggaaatacttaacagcactttgcagtctggagccagaatggcccagatctgactcatctccatgtcaagcttgtttggcatttagctaatgtgtaattttattttgacatgaatcattgaaacttaaacatgttaaactaaatatttgaactctacataaaactctttttaaaaaaaactaaagtatatatttaaagccttttaaaaagtgccttagctaaacataaaataattatacataatagtctcaaagattcctgacttttctcttttgaaggggtagactattcttggcatattgatattttgctttgaataaaaggaaaattatttcagtatgaacttggctcttcagaatgaggtgatgtgaaagctcagcatttatcagataagctagaaattcaggtcatcagtgactgaggacttggggtccataaacaccagagggcaaatctttgtattatctgggtaagtactgccttttctttctaggccatttaaacttgaatggagaaatagaaaagttaaaagatagagtaggaaatttagaaaaagtcacttttaacataactaaacatggtctttctgatgttgttaacattttaaactgatgatctgaagagaagagttgtgatattaaaccttagatttagcatataggcatccactggaaaatacaggatagaaaccaactctgactggagacattctggatctagttaagggacagtcttccaatctaatccaacgagtacttcacccagaattcaggcatctcaaaacttacaaactttatgaaaggcccaaccttacttcctacgttttagaaaagcatattgtgggtactagtggagcatcacagtactgagatcaaaaatggtattctttataacctgactccaacttgcctctctgccaaatggttttcctagaacctagaacttttctaggaaaagtttcaaatttgaaaacagcaaaaaaagaaaattttttcatgacaaccagttgttgaagaaagctcaacttaccaaataaaatgaatatgaaatacaaaacacaatatyagaatatttgtaaaggcaatggaacccagtcctaaaacaagttgtaataaaataaagtgattgagtttttatttggatcatgaatcaattcagaaaatatagaaataattgaatttccaattttgcactagtgacaaaaaggctaagggtagcttgctatagcggtatcaaatgcagagtcatggccctcccagccatagttgaaggaaccaactcagtgagtggaatggtatgaaaggatgaaaacctcccctgaccgctgctcaattccctccagcagagctgatttaaattaaaaaaaaaaaaaatgcccttttgcackacattggccttttctgtgaataggtcagccaggtgcaagctaccagatgtgactttccatggtctctaagccccaggaggccatttatctcttttattagataggactcagtgctaaaaagaggtgtggcagaaccagcatcttactattagggtatctgaatttgtcaaaattttagctttttcaataggaaaagcactctgaatgtgttgtttctcttcattacatcatgattttatcataaaacagacttctcagtagtttgggaatagtttagacgcgcttataaagccatctccgacagcctagattattttatacttctacaaaatgcccttttcacccactttacctagatttcttaatgattcaaaacatgttgaataacttatgtaaagattttaagaaacttgaagagacagtttacaaagctcaaatatctagtggggctttactggagaacctcataacattgaaagaatgcttttgtactgtcagcgctccccttgggaagccctcaccaaagctcaggccccatctcgtgctttgtggcttttcccctagaaaactgcagatgcttctttctccttgaggaaacttgagggtctccaatcccatatttccacgtctcagtcaccaacctaaccagataaactaatctcagctgacatttaaaagacctttccaaagataacacgtactcaatttaacattcccctacctgcttcttcttctctaagtcaatgagacctaaaactggctgcctttagaataatctagacagctccttaaaaatgcaaattcttggggctggttgcggtggctcacacctgtaatcccagcacttcgggaggctgaggcaggtgaatcacctgaggtcaggagctcgagaccagcctgacctacataaagaaaccctgtctctactaaaaatacagaaatcagctgtgtctagtggtgggcacctgtaatcccagctactagggagactgaggcattagaattgcttgaacccaggaggtagaggttgcagtgagccgagattgtgccactgtactccagcctgggtgacagagcaagactctgagaaggaaggaaggagggaaggtaggaaggaaggaaggaaggaaggaaggaaggaaggaaggaaggaaggaaggagaaagaaagaaagaaaagaaagaaagaaggaaagaaagaaggaaggaaggaaagaaaagaaagaaagaaaggaaggaaggaaggaagagaaagaaagacaggcagaaagaaagaaagaaagaaaaagaaagaaaggaaagaaagaaagaaaagaaagggagaaagaaaattcttgagctatactccagacttttattctgcaagtctaaggggactcaggaatccccaagtaagtttgggaataatttggtcaacacatcaatggctattgtggaaaatttgtgatcacaataattggtaagacactatctccaggcaataaacaaattcatgatctcaatattgacagatctcrgttcaaatctttatcacttgtgagttgcttggcctctctgagcctyaactttgtccgttagggaaaaaaaagatgtaataatacttgcccaggttgttatgtgaattgaataagagaattttgtcaaagatgttaatatgaggtaagaaaaagaaaattgggaaaagggaggcaaaacaaatcttagtacagaaataatggttatgcaaggcagtgctgaaagaagtagtcagctatactgctttcctggggaggaattaaagtcattacactcttctgggctctgggtggaataattctggatggaaattaagaattgaggagattaagaggtggtcttgcttaggacacagggagcttcctgtgaattcctgagaattccattcactgagttaacataattgctgaatgcttactgtcttccaaacactgttctaacgcaaactatgccatataagaatgtaagaatgacattgttcccaatctgttggaatttatattctagttggagcaaggctggtaatatacaaatagacaaattagaagtaaatagatgagcaagaaagatcagaatcagaaaagaatgacttttaaaagtcaccttcttggtgagatattttaatattataatacacaaaactatgaaatgacatggtaaagtgcaggtaaattgataatctaagttagggcttgattttcttgttgccatgaggttaaaggtggacaaatatcctttaatatcaggtcagctatagagacagcagaaatgactgagcgctcacagtgtgtcaggcactgtttgaaatgttactctttcaggaaccttgtgagattccacgatcatcccattttacagagaaggaacctgaagtagcttccccattgtcactgagtttgccaggggaagtagagcttgaatttaggcagtctgactccagagcccagacactgaaatcacgcttgcaccccctgagaaggacgttgctgtgacctccggcttccctggtttcttctcttcagtgttgtttccatggaaagagttaaaaactccacatccctggcattcctttgacagagttttgtccatatacaactaaagataaatgagccccaagccctaggtgtttggaagctatgatatgagaaaaaataattgggttattttattcgtatattgctttaacttgcactatgcaataaaactccattaatccacacttcactgatctcatgtgaagataaccaactaaactatatgtaattaagaaatgttactttttcttcagatagttctttagagtcttatttgtaaagtaggcaaatccagttttttaaaaaagagtcatttatttttggttctagtaattaaatttattatgttatcaaagtagcttattcttaggatatagtataaaaccagggattttgtgaagtgtagtttttacaaacttagctttattacttattaaaatccatttatatcttagttaataatactaactttccttgacattactaaaactccacttgytcccaaatattttctcaggcagatttctcacatttttctttcattattccaaatgaatgaggttttaaagtgttcacatttatgggactacatataaaaataataataaacaccaacttttaaaattatgttctttttcattttgcagagattgcttagagaaataaaaatgtaaatggtacaaatttacagcccttgattcatggagcaatccttcccaagtggatagaagaagcccacaaatatccagccacataaaacttttaatgcagacatttcaaacaccaccagatttttgtcacttctttaaaggagggaaayttttgtgttgaacaataggaaaccatgaacagctggtttcgactgaagcctagttttcatattttaaacatgatcatttaaggtcagagaaaccaaaacttgataaattagtgttaatttttgaaaagaagaaagacagcttgttttgagaacttaccatgagccaatacctctattaagtactttccatgaacattcacaatgtcctgtgagatgtgccctctgattatgcccaagcagaggagaaactggcctgccaattggtggagtgcctgctgggtcacagtaaaggatgatgctggtgttagaatctcacccacctgcttcagcagggtgggctccagatgagcttttctttcctgagaagtgcccagggaacatgatcagcattggtcttttttacatccctatatcagcatcaggctttgggtggtaatttacagtgacttggagaagaagaagtgtactggccagttgatgcccttgagtaatagagagtaccagtctacggggctatgccagctcggggacctcagggaaggcttttgattctgtccaaacagcctattcattatgggactacatataaaaatgataataaacaccaacttttaaaattatgttctttttcattttgcagagattgcttagagtaataaaaatgtaaatggtacaaatttacagcccttgattcgtggrgcaatccttgaattaaatgtggccaagacagcatacacatctcttgacacatttaccccttcccagacctcaattgttttggggagaaacttcaaaacaaggattttcatatgtggtataaaaataaatatgttcttatttacaaattttaaatctaccagaaacatattacatgttcacgagtaagacttccctacacatttatctcctattgttttcccttctcttttcccataaccttctattttctccctcctattctcttcctttctggcatttctctcttgccttcatctatttgaaggaggaaggaggtgagaaaggaaaacatgggaaaaaagagaagttatggcaaagcaattatgcttagcacttcttttatatgtagaatatgcttgtgccatacacttcttggatatttgcttcctggttttaaactttatttctttagatgaaattctttagaactactgagggtgactttttttccttacattttttgtgcctcaagcagagaacttgagttctactttctggatgcatgtcttggtaaatgtgtgactttggacaagcaatagccccttgcatttttcacttcatcatcaattatacagagaataatacatgttttaccaatcagacagggcagctgtgaagatgaaaagaaacagcaaggaagccacactgacaaaagactgattttatgagcaattctggtcgcaccataacatttctgttcctttccccttcctttctccatagtcttatttcctcttttctgcctttctcatctgccattttagcaatgtctcatttatttgacatatcaataaataaggtgttccattagaaattaatggatttttttgccaaagtaaaccatggaagttaatttttttagatttcatcattttaaatggtatattttaaatccaagatttacttatattctgcctctttagacatagtttatcaacacaatttacatttcctgatggttcaggattatcttcactataaacacatgatgctctccctcaaattkttgacacccaccccatgctgccattagtacatactgcctcaattactggaacctacttctattgtttcaccttaacctacagtctaacttatgttttacaatctttcttcccaaataactctaagttccttgatgatacagactgtcgttcatttaattccatgtcccagtgctttgcatggtgtccacattccagtaygagtttagtaagtactacctgaagttataaaagtcactgataacctgaaaacctattcatttytaggagagaaggaactatttgcaacacccatgttggtttacacagatttaatcttcacaactgaataaggaaggtaatattactatctccattttagaaatgagaaaactgaggctcagataacttaaatacctgcccaaggtcacacagctaccagcagaagagctataacttgagtctggacctgtcttatttcaaagtctattcttttcctgccacaacacataccacatacactaactctgacattgaatgggctttgtggtttgagatgaagtttagggcttttataatttttctgccccaccctcaatattgcctgccacctctttggctatcatttatctaatgccctcttttactgtcctaatctgcaactgacttagaaaatactaactatgtttgttagacttgtttaaaagtaagaataaaacattctcagcaacaataaaaggaaagaatgacaaatggttttaaagctgcacattgacgcgggcttagtagtagcacctagagttgatgtttctgcagcaataaccatggctcttcaggaacgcccatagggagtgacggtttctggcgtggttaagtaaagggaaagtgaggccacacttctgggacctggagagttttcaataagtaaattgcaatgaaaaataccatgtagtcttggcatcatctatctagattttcagatgtgtcttttgctattccttgttcttagctggaggatatattgttaagggggctagataaatgacgtctggataaccaaagtgttcataatggtctttttctttcttgttcttcttactttatttttyttggcccatgttctgtgtttcaggtcttaggtttgacagcatcacccatagcacctaggctttggtcactgagagcacataggccaaagagagtgcaaacctctggtagaaatcagataactgcaaatgagtaagtaaagcatcaaacaaacaaacaactctagttggcataagtagtttttcccagaaatattgtgcctgtgaagatgtaattgtgggatgttgtacccaaacatccactgggttgctgataatgtctckgcacttcatgtctgcctcattctttctgcttccacagagctgatgatatttcttgggctcttttgctactacttctgtctttgtcaccaccacttttgttccatatataatctcctttgcttgctttcctcttctctctgcyttttttatttcttattttgttgggtccctatcatgtcatctgagcttcttggctacatctatatgaaaagactgacgtattttgtaaatctctattaaaccagaagatttcttccctcttgttggagaattaatcaatcccggctcatccaccataattttcatatttttggttcctcttaatcatgtacaaaatactcaaagctcatggcttatttcgttttttacaagatgcacgttattcttccttttgtaactgacaccattcctggtgcttgaacactagactccagataactgaagttatgctgtactccataaagcctagctgccagaaatcacttctccattgtcgcacacatggtaattgatgtatacattcacaactcctcccaggaggtatgaaggttaggctcaacttccaagtgccagctccaacaattcccttttggtcactcttcaccatatatctcgaagtaaaggaaattagcatcaccagaggggtaacctgattctcgaagtgattttcttaaatcattatagatagaggaggtagatcrataaatagaccaattatttgtggcaactcatagcaaaacatagtgagtttcggtcctggtattaaaaacttctaatacataggctttaatttgctagaagatcatcctaaaaatatgattcctgatggtttcacatcacccaggcaccagtttatcaagtggcatcctaaaggaccctgttctgccattagcctaagaccagagttacctgctactgcaaactcaattaaatagagatgtgaaggaaagaaaaacactagaaaaatatctttgaggaagaatgagaaggggtttattgttgytattttgttgttgttgtgtaagatatagagttttatctatgtttacctgttgaagagaaacaagaagagagagagatagaaaatacatgagtgggtgggtgaaaggaggtatttgtggtttaaaattgtgctgtccaatatgatagccagtaaccacatgtggctgttgagcacttgcaatgtggttagtctaaactgagatgtgctgtgagcacaaaatgcacatagaattgtgaaggcttagcatgaaacaaccatgtaactatcacattaatatttttcatgttgattacaggttgaaaagataatattttggctacaatagtttaaataaaatacactgtttaaattaatttcactttttttgttttttaaaatgactagaaaattttaaattacacatatggttcacatttgtgacccacattatggtttttgacagcactgttataaggtcttatctacccagattaggttcaatgaggagtaacagaaaacgataaaatgacccacaatgattactaaatataaatacttattgattcctcacacaataagccaaaggtagactggactaaaagggcttatgatcatcagaggctcaggcttctttaatctttctgttccaccatcttaagcacactgccttgtgatccaagattgctgctaaacctctaaccagaaaaaccacatgccggacagtaggaagaagaaaggaacccattaagactctatctctgtgaggccttctacaaccatcttctaccgtcttccttgattggtaagaactagctttggtcaagacatgagctgagaatctctgtaaactttggggaagaggggaactaactactgtgatctggtacttggccccctgaaaatacaagagagatcgaacagtgcagactttattcctaatagtcacgcacacagctaaacatcaggagttatatttaggatgaccatttgtcccagtttgcctgggagtctgttctgtatgtgttgacctggcataattattaatagctccccctttttctctctcaagtgtcccagtttggatgataaattatatggtcacccttgttatgtttccaagaaaaaagagagaaacagatgatagggtggcaattctctctgctaggggttcttgagaaatcactcaagaaatccttagcaaacagatgtgtcatccaacccaccccaccagaattctgaagctggttggaggtgagttgaaggagacacttatttgctaaggacttcttgtgatcttcatacagaaaattaaaggactttcctcgctctttattattattatttattcacttaaatatatatggtgcaactccatttgccaagtgctgtgcatttgggagacatatatgtaaaacagaatttaatactattaatcccatactattaaactcattttctattttaatggagtaataggagtttgaattatctgaatagtctcaatcctggtactactatttctccccctaaatacttttctaagtctctttcttttactggttccagaaaattctagcccactgttttccaaaatgtcttcaaatatattgctaattctttaagagagttcctagccaaataatatttggaaacgcagcattattaaagcattataatgcaagttagtatattaatagctctgagaagtaccacaacagaaattcctatttaactcttctaacctgaataggtttggggtttaatacctgctaacatctaatacagcatccctttgtactactcctagagtcccagaagtatgaagatattatcagactctcagtcctcggttcctccctctacattctgcttcctcatgctcacatttgttctctatttttacctctaaagaggtgatgcctaagctaccttctctggcctttacttctttctcaaaactaactaactggacatctctgcttaagttaaacattgtaatctcaaacttaacaacctaaaatttaatttgactttttgtccataatcaagtctcccctgatgcatgcctatttttggaattgtactacctgcagtagacattttgtttatctgtttgtttttggttttgtttgagtttggggatttttttttttttggtgagggtggagtgaggggttagggagcaagcctagcagtattgtacttcactcctattttcgtttgagtgagaagtgcattgccaatggctcttggccaraccgggcttgagcatgtggtctgggcttagccaatcagcctcccactgggcactttgaattttgagttattaatattagaacagagatgtaagaatggttaaaatgcattcacagtgtggtggggtgacattagcagtgttctgtgacaacagttttctcgacctggttactttagatgattgtgatgcaacctaaagtttgagaaccacagtattaggtcttatatatcagctcttccaagaataattattccacccaaaattgactctgccttttcttcagtcctataacccttaatatctacaccactcatgctgaacctatcccatattgctttgcagttatttatcttatatcttgactagcttcttagcttccagaaggcagggtgatataaatcaccatgactgacatagagtaataactcacttaatgaatcaatgaatattcactagtgacaaattaattgctcctgatatatgaacttccccattttctataaaataaactttaaattagttcacttctattcaagagcttctaaagcagggatcctcaaatttgctagatgtttaactaacctagagagttataacaaatattgatactcatgtcagagctctagagattcttaagtaatggatttggggtgcagcaatctggtcactgtgactttaaaagttcctgaatagttacatattgcaggcaagatagtgtgtagtccaaagactgaattgcaggagcagtttacccgggagtttctgaatgtgcatttcaacaagattaccagatgattccttatatactttaaagtatgagaagcacttggtttagagcaatgatgttcaacagaaacataatacaagccacatatgtaatttaaaatcttctaggagccatattaaaaaagctttttaaaaggtaaaaataattttaataatatattttatttaacccaatgtatccaaaatattatcattttaacaatataaaattattagtgaaatgttttataatatttttgtactgagtcttttaaatccagtgtgtattttatacttacagcatatctcaaatcagactaaccacatttstagtgtttcatagctacatggggttaggggtcactgtactggatagtgcatatctagagtgttctgacctttccttctccagcaccaactatagctttccttacaaaagctttttgctttagtcaaaagaaacttttcatcaaacaatcaacccaccattcactttcctctcttccactgttaccttcactgctcctcgaaccctggaaagacctccgtctgctctctcctggtctaggttccatttttttcctttaaacccagtctaattttatagctctttggtgaaaccttcctactatggttctagattacaatgattagttgttgctctaaattttgcaggataaacatatattttcatctattaggggagatggtaaaagatggttttagaaggctaaacatggaatgtaattagaatgataaaacatgctgcccttcttaataaaaatgaaacctagacctcagaaggttgatattgaaaggccaactctctggtgaggagtaacagccttcctaggaaagctaaatcaatctgmataattctactcctggagatcttccatggctacccttgcctaccttgccctgaccccataatgctagaactaaataactaatgctccatctcaagcataaattcaggtgtgagcaacaactcttgtcttgattgctccaaaatttaactgagataaaaatgaaatattcaaaaaatactttttcaatagccagaaggcaattaaacagaaatttcagagtctaatgaacttagacaatctagaaagtttgtaaaatttagcctgttttctgtatgagcaagattatccaattcacagattacaggaaggggaatcaaaaaagaacttgccaagtccccccgttccttgatcatcttctctttccacatggtgacattatgtttaggctacaaacctagcacttcctagacatcttgactcctgttagtctacatttgcactgtccaatactgtagccactagccacatgcgtgactgctgaatacttgaaatgtggttagtacaaattgagatgtgccatacatgtaaaatacatactaggtctcaagatttgtacatatatgaattttccattgctgccataaaaaattacctcaaatttagtggcttgaaacacccctttatcacatttgctatctgacagttctgtagaccagaagtcccatatcgagtggctcagctgaaccctctgcttattagagactcctaaggccaaaatcaatgtgtacatggggtatcattcttttctggaagctctacaggtaaatctgttccaaactaatttggattgttggatgaattctgtttctgtggttgtagggcaggagtcttgttcccttcatggttgtcagccagaagccactcagctccttaagaccacatgcattccttatcacactgtcccctccatcttcaaatcagcaaggacatgttgaatccttctcatgctttgactctttctgaattctcctgtcatatctcttcttcttccagcctgaacaaactctctgcttttaagaactcatgtgagggagctttccaaaacacttggtgagaggtggaggagtggtagctgcccaaactccttcttgctcccacacaccagccttagcccccttgccagctgtagaaagtggtgaaagaaaccacttactgtaatggtttgtgggtgatacccaatgccatccaggaagagttaagagagtcttacaggaaactggtcttgaattactaccctggtgagaatccaaataacaaacagaagtgtaaacagatttctcaagcttatgaagtgctctctgaagcaaagaarattgaattatttgagaaaagaggagagtgggcaattaaaaagggtgaagtgagtggcagttttggctccctcatggacatcgttgatatgttatttgaaggaagaggaaggatgcagagagaaaaagaggtaaaaatattgtgcatcagctctcagtaaccacagaagatgtatttaatggtgcaacaagaaaattagctccataaaataatgtgatttgtrgcaagtatgtaggccaaggtggtaagaaaggggcagtagagtgctgtcccaatcactgaagtactagaatgcaaataagaattcatcagatacgacctagaatggctcaagaatttcagtctgtgtgcatggaatgccagagccatggggaggagatcagtcctaaagatagatgtaaaagttgcaatggaaggaggatagtttgagagaagaagattctacaagttcatgacaaaggcgtgaaagacgaacagtagatatctttcatggtgaaggagatcaggagccaggagatattatcattgttttagatcagaaggaccatactttcttattcgaccagaagaccttttcatgtgtatgaacataaaactgattgaagcactgcatgtcttccaaaagccaatatccacccttgacaaccaaaccccagtcaacacctctcatcccccaactcagattgtcaagcatagagatattaagtgtgcgctaaatgaaggcatgccagtttattgtagatcctatgaaaaggatcacctaatcatcaaatttaaggcctacttccgtgagaatgcctttctgtctcctgataaactctctttgctggaataactcctgcctaagaggtaggaagtaaaagacgctgatgaaatggatcaagtacatctggtggacattgaycggtatcagcaaagatgggcaattacaatggagaagcttaggaggatgatgaacatcataccagtggtggtgttcagtgtcaaacctcttaatggtgccagtgagtaacactcactgctggtattatatgtgcagtagtgaacaagtgaaggactataaccataatatgctcacttcttgctattgtttttgttttaatactcaattatagtagtgttttaaaagttaaatgaataataaatgaaaatataaaagctctgactttgccctaaatatatgttgacatcagtgagcaagatgacatttaatatctgtaaaaattacttttttttttttttgagacggagtcttgctttgtcgcccatgctggagtgcagtggcacgatctcggctcaccgcaagctccgcctcccgggttcacaccattctcctgcctcagcctcccgagtagctgggactacaggygcccgccaccacgcccggctaattttttaatttttagtagagacggggtttcaccgtgttagccaggatggtctcagtctcctgacctcatgatccacccacctcggcctcccaaagtgctgggattacaggcatgagccaccacacctggcctaatatctgtaaaaattacttttaagaaaagttccgctagcatttgttaggtcatgtcttgtaattaatttcagatgtgtctatgagcaagcttagcttgaaatgctaagcatatgtatcgacctccacttatggccattcattgttaaactttgaaattaaaactctgtatggttcgccctccatatcagcaaattcaaccagccctagatttaaaatattaaaaaaaaaaaaacaataaaaaagataaaaatttttaaagtacagtgtaactatatagcatttacattatattaggtattataagtaatctaaagatgatttaaagtatatagcaggttggccaggcatggtggctcacgcctgtaatcccagcactttgggaagctgaggagggyggatcatctgaagtcgtgagtttgagaccagcctgaccaatatggagaaaccctgtctctactaaaaaaatacaaaattagccgggcatggtggtacatgcctgtaatcccagctactcgggaggctgaggcaggagaatcacttgaacccaggaggtggaggtttcggtgagctgagaacatgccattacattccagccagggcaacaagagcaaaactccatctcaaaaaaaaaaaaaaaaaaagtatatagcaggttgtggatgtgttataggcaaatagcacactatttgaacatctggattttggtacccaggagggtcatggaaccaatcccccatggatactaagggaccactatatttaactggtaatcagaagataaaatgaaatagcaagaagtgagcatattatggttatagttcttcacttattcactactgcatatataataccagcagtgagtgttattcactggcactattaagaggtttgacgctaaacaccacctctggcatgatgttcatcatcctcctaagcttctccattgtaatggcccatctttgctgatacctgtcaatgtccactagatgtacttgatccatttcaagtaccaacagaaatcttggtctgtatagttatgtgtattaagtggaactcattgtgatgcttctgcatttaccctattgcttcgacttttatttgaagatgcataatacataatttagctatggcatcagtaacataaatgatcatatttatagtttatatatcatataactaatgttatacaatatagtacatatataacatatgtagatcatatatagttacatatatatagaaaacttgtcgatcagtcctcgttacattcttttttccttctttttaggccatcctgagcccctaagtagtgacttacagagctgggttaaacttaacttagaacttaaagtgatgagatctttacatggaggagaagtaatctgcatgtacaatatgggaaggtattccttaggtatgttacaggttcactttaaaccatttgatttatgctccaaagtatctgtacttaatgctgggagtatagcaaactgtgataaatacctttaattgtatattttaaagtcagcatatggtcacatgcttacatttaaatatcagcatttaagcaattcttgaaatatatgaatgtctccttagtatactgattacaaagcattttcaacatttgtcactacaggcattttctccctaggtcaaagaattggcttttcactaattaaaatatgtaacttttcattttaaatagttaaaattagtaatacaaaaatattatttggctgtttaaaaaaagaactcgtgtgattagattgaacccatgcagacaatccaggataatccccctattttaaggtctttaaccttaattacatctgcaaaatccctttgccaggtaaggtaacacatgtacaggttccagagactcgggtgcaaacatctttaggaagtcattctttctaccacagtatgaaaaaaaaagtaaagtatttcattaatgataactatattgattacatgttgaaataatatttttgatatattaagttgaatgaaatatatcattaaaattaatttcatctgtttcttaagtttttgaataagctcctagaacattttagattatatatgtggcttacatttgtgtcttacattgcatttctattggccagcacttgtctagacctagagagaggtcaaatcctctttaccaccctcggagtttttgatatttggtctgtggacccactccttccatgagaaatgcttcccttacaatcagtcgtggccttacacttttaggtctctcatgactaaacacagcattgcacaatacagaaaccacaattttcatacaagagatacccaaatacagtgatggagcatggagatgtgggtacaggggcatatttccttataataaaatgaaccttgttcaacttgatagccctagcgattactgacctcgctcaatgagagcagagacttcttctattcatcttctggtttccagtggtagcacatagaaggacccttttctttccttttttaaattttttgagatggcatcctgttctgttgcccaggctggagtgtggtacaatcatagcacactgcagccttgacctcctgggctcaagcaaccctcccacctcagcctcctgagtagctgggactacaggcatgtgacaccaagcccawatatattttttaatttttttgaagagatgggatctctccatgctgcccaggctggcctcaaactcgtggactcaagcagtccttctgcctcagcctccgaaagtgctgggattacaagtgtgagccactgtgcctggactgaagggccctttcaatgaatatttactaaaccaattgaaagtcagcaattggctggttaaaagaaaaaaagatagattttggaaagtaagtcagctgccctcaatttcttcataatgacaaacatttctatattttactgagagggcagtctccatttgaagctgtaaagtaaataatatttcttatattttggagacagagccttgctctgctgctcaggctgcagtgcagtggtgtgatcatggatgactgtaacctcaaactcctgggctcaagggatcctcctggctcagcctccagagtgggtgagactacaggcatacactaccctgcccagctaattttttttttttttctaattttttgtggagaaggggtctcgttatgttgcccaggctgatctcaaactcttggcctcaagtgatccttccaccttctcctcccaaattgctgggattatagacataagctagcatcactggcccaaataatatttaatggttacatctttatgagacaagagagtatgctgatgttcaggaaaaaaaatatattctttaccaaatgaacactctaattaaccaaatgttttcattgctgtgtactttatttggcatagatgactaagctaaaccaataaatctgtgactgttttcaaaactgtatttcaaatagattttttgggtgtaccattatgtctagtgtttagttttatttgtttaatttaccacaataccaaaatgtttcttaaaatgttagaccacacccacccacctccacacttcacctagcagaaaatccaggtcatctgtagaagttgaaaagcaacacaaaaaagctcatgcaccttcatctaatcctccaaccctgggcaaggtaaaagctctttccagagcattgcatcccagtttttggaaccgtacctgctcccaaccccaggtgtgaccctgtagcaggtaggcaaaattactgtgacaatctcacaatccatcagctacagagcaaaggatcctctgaggagaagttaggattgctgagaaagcacaggctgctgagcattcctctcctgccagacataaacctgatgcaagacagaattatgagaaaccagattcagctcacccatcctccttctcagtcatcttccaggcacaaaagaaagactgaataccaatcaaaagataatataaataaaccttttaaataaagtttactaattgaaaggactaatagatggagtgatgcattcttcaaaatctattgtcatgcttttgtggactttattgcttatcagcatttttcccctcaagaaaaaaaaacagaacagcaacatttgttcagaaaaaaaacaaaccatgtttcttcctttcttattacttttattgtttgaggtttcttttagactataatgtggcattgtgattttaagatgggaaaaaaaaatctcttgtctttcaaacataggaatgtgattgtatgctattgttgccaacaatgagctaaagaggttaatggatcacatatctggcaaacagccatctttcctcctgctcaatatattacacagtatacattttattgttgctgctgagcatatgattttgtctgagtagttggtaaataagtttagacttaactggtctctttctaaaactcaacagctttgtcattcaggctatatcctgagatttaaaaagtgcagtttcggttcttagctcatgaccttttgaggtgatggtaagagtggtgggaggaaggaggtggggcgggctgttgaatgagaatctagaaatattgtgccttgtaaattgcatccgacctttcattttcagattgcctaaattaacagagtgaaattaccataataaaaaggaatgggtactggagaaagtacagcaattctttctagtgttgtttcccagattccttccaaaatacctctaattaaatggaccaactctctccactgacctcaggttgacacaaatttgcattctgcgactgtcatttgaaaacagacaagccgtcataagcaataatgctgtgatttcttgcctaaaggacttttctgtgtactgcatttgtactatgaaatgtaagcaagagacttaatgcctctacagataaaaagggaggaaagattttcatttttagggaaccccagagggaaaaagtttatcaatgagaaatacaatgttctggataattttggttgggtaggaatgtatgttgagggaggggactagagttgggagagaggaagcaacacatcagtctccttggagcagtagagtcctttcagtccggtaaagagcacagtaagtagcaggtagaatcagctcctggcctgttgttttgctgggggcaaagggttggaggaacacagactaaattgggaaggctagtgtgcctctcggcttttggacttgggacctgaaagaaggctgagtcctgagctccgcttcccagctaggcggtgatcgccccctgtgactccggatgcacacagcagccccaagcacgccgcggccgccgcccgacccttcaccgcctccggctctcccgcctggcactctggagccacacacaccagcttcctggacacctgtgtgccccaagctctgggtctaggcatccccctcaccccagagagaccggtctcagcgcctcagcaattgggtccctccgacctctgtgtccccgagttctgccaccctggtcacctccgcaggttccccaagctgcgacctcagtccaactgggagccctgcgcgcccacccggcagccccactgcgctgctcgcccgcggttccagcgcctgggtgggacgcgcagtggctcagctgcgggacctccgcctccgggtaaatcctcctcctcccctttctccgcctaaggccctgccctccccctgcagcaagccgctccggtgcgtgcgcccgtctctccgccgaagacacctgcgcttccttccccaccctcctcctcctccctttcgctgcggtttctccgctgcctttgggagctcgggagcggcagctggaggaggagcacggggaggaggggaaggcgaggaggagtaggggcggggtgggtggggagagagccgggagggtgtggactggcagccactctgcagctggtcgccagggacccggtccctcctgcgcgcccaagtgatggaggggaagagattcgcttagacacacacacgcgcacacagctgggcacgtctccgggaggcagctgccggctcgggcgctctgggggccgggcggcggccgtgacagcgccagccgcggggagcggggcgcccgcacagcttggcaccggaggctcgaggacgcaggaagggaagatcccagtcacactgagtgttgctcttttgggcggattgggagggagcgggctgcccgaggagctgtcaccgaggacgcccgaagtctcgccctctgcgcgcagggtccggggctgcgccggtgccctcgtggggcaaggaggatgcgcacctccccccgcagagcggctgcggtctccggcactgcgcggactccggctcctgcggccgcccgtgccgtgcccgcgccacgggagcgcgccctgccgcacctggttccagcctctcggggaagtgcaggaaacgcgccctaaactccactacttctcgcccgcctgcccccccgcccggctccccgcctcagacctcgccgccgccgccgccgccgccgccgcctgcgtgtggggcccgctcgcgtcttactcacacgcgccacgcacagccctgttggtttgcyctcattcacgccgactcgctctccgccgagcctagcccgggcatccgaaactactggaccaactgccgtccggaccgcagcagcggccgggtgaccccacgcgacccgccgccgaccyccgcgccctgaggctcccgcccgcgccgccaccgccggggaccacggtgagcaaggcgcgctgcccgcctcgcgcgggggaggggctttgagacctctagatttggggggaaatgagaaggggcaaatcgccaaagggaagcatccgggtgatgccagcaaaaaagcactttgtggggttcggttctcctgggcgctgcctggggaagacttttgagaggtttgcttaggaccagaggttaaactagtgcgagatgagaaacggcgggggcaattcctggggtaaaattagacagaaggtgtcagtcagcctgcctgtctgtttctctctcagkctctcccagagcgctgggtagcgctctctttgagggagaaagggaacacgcgtttactgcgctcgccagagtttaggggttcgcgttcggtcacttctggggtggctgtggagctgtttggagcgcgagggcagctttgggacagtgggggcctgcgaggccccagcagaggacaggcagagggcaggcaaagaacaggcaaaggctaagttaacatgtgggtggggttttctcttcccagctggccccccccacacccctcacagccccactttatgcatctcttcccacccaacacacasgcgcgcgcgcgcgcgggatggatgcagtcgaagggtggtcatactgttactacaaacaagtctgagaggtcgctgtcgctactcactggagcgctgagactcctgctcctgttacttgggcgaccaccttggtttagggcaacctgcaaggagcgtccagcttaaggtggatgtctttacctggaggttccaagcgcccagcaaacaaacaactccggagtcacttcaccttggtgggtttcctctactcttccgcttccctacttcagtgcttcagggcacccacccaagggagctgatgctcacattcgtggtctaccctgtcttcacccggtgggactcactctctctctctctctctctctctctctctctctctctccccctctctccctattccctctccctctccctctccctctccctctccctccctccctcccctctctccccctctcctctctgtctccgaatacgaataccagtttcttcttagaaaacactggggagagatttaatatttgcaaagtgctttatgtcatattacttcgtggatacatttaatagcactgtaactcttctctgatttatgtaaacttggtctgataaatagcatgcagggtcgggttgggtgggggcgaaagtgggtgggtgggccttctttctgtgctaatgctcctttctaaactgatttgctagaagtaataaacagctggtgcttctcaaaggttttacttagtagtttctacatatttcagagctttagacaaattacacattataatttatttcaaatatattaaggtcttttcaagaaaaagttgaagataataaaaggggattacaaatatgaatatcaaaaatgattattttttaaaaaaggttttattgctatcaattatgttgcaatagatttttgttgttgtcattgttaccttggggtttcctcctagtgaagtttttaaagaaatgaaaacaatactacttaccttcctctctctgtttggtcattgctcaaagtaactgcatgagcatcagggcaggcttcttaacttcaggaatatgawgttattcaccagtgaactgatggagacacaagaagatattacaagacacatagcaatgggaaggaaactgttgcttaaatttaaccgcctccagtgttttaacagtgaaaaagaaaactgctttggcctctcccaagctactctggccttttagaaacactcttttttcaattaataaaacatatagaaacatcattacttgagaaaaatattttcaaataggtatgtaagcaaattacatgggaaattatgagcacaatattcaatggagtattacagcaagtactgggatcctggtttctaggttgagccagagctcatgcttaaattttaacatttgaagttgctccctttgacatctttgtgaggaggtgttgcccagtgttttcattatgcttttatcattgtcctcaccatttttgccggcatacacagatgtttttgaatgaataaccttcttactcactgaattttcactcattcaaaaagtatttattgagcacatgaacacacacaatatgcaaagttgagctgggttgttattttaaacaaaaagggaggatttctggtagaagcaggaagcttactcctacacagtgtaaatagaactgtagagcagtggcttacttagggaagcagcatcttgcccagagtaggtggtcaacaaagagctgttgactcagaaatcacataagatattaaccagccaactttgtttccctcctaaattctacaattatccttatcccaccatgtcgttaagatgtgactcaacttcagagaattgatgttgactctaatctccttgctctttgtctgaatactttagagtaatataactatctgtgcactgtatgatttctagctctggctttctgtgtgtgatttctatggagtaatgccagctctgaatttgtcattagtattcatttatgagtaaatgcaaatattcttgttgcactgaaaaagtgaattcrcattcatagaacacaagaaatattttgctcctaaatcttaccgtctctttatttttacaatctcagaaacagtaacgttttttaaaaaagcaattatatataaatgaacaagttaacaaaagtagttatttaggattttttagaaaaggggaaatgtcttatggaaattttagttgaagtgaattttatttgatgctcttgacatgtctagcaggatggtctatttattgtaggcaccctcatttcatgaataaaataattctcaaggtaacttcctagtaaaaggggctagtggaggagagaatgcttactaaaaatgattccaatttgggaatagagtatgagcagtaacactagagttgtgtttgaacattgaaattatgtgaatatttctatatttcattggtttttatatggatgaattttttggatttctaaatactttatcccaatattttcatattctgagatgattgcaattaagtgaagacttattatttggtaatggaataatagtttattttaagtacaggtgaatagcttaaaagagagaacaagtcaagttaaggaaattgtttaagccatagatttcaaatcatttaaatcctttccattttttggtgaggggagctcaaaacaaaaatacctagttaaacttttcattataaattaaactgttaccattcagaaaaatcctgtattttaggctttctgtgaattcaacattaattgtttcaagttagcaaaaatgtaaccttttgtatatattttctggtatctaatttaattgttgacaaattttgctgcctctggaatcaatgtttgtttctgagttttaatgttatcttaacctttaagcagaagtgcaattaaagcaagatattagtaacttcatttaaaagtcaccaatctaagtaaaaaacatttcatagtagctaacccttatcaaaagtagagtaaaagattacatatggaaattcatataatgtagataggataaatgaacctctctaaatctcatatggaagttccattatggtgtcttactattaattggcattggtccagtagattatttttcttcttcttgaagttttatgaaggaaagctatgtccatattaagaaatggttgaagagtttatttgactttagaccactttgcctaacttgactctgcatgggggaggtaaattttatttatatttatttacatatacatatatttatgtatatgtatgtatatatatacacaatgtgtatgtatatatacattgtacatatgtaaatagtatatatttatgtttctgtttatgtatatatctgttttttaataaccttgtacaacaggaatagaatccctttgtgccatacatggtttgtgaagtcagcatcactttgagaatgatactcataaatgctctactagtttgatattgaaaatatggagtatgatactttttttaaataatttatttaagaaacacttgcaataaattttattatgtgcctgacaatrtccaaagagctctactcatattaactcatttaattctggtagctctcctgtcatttcccattttacagagggaaaataagtaggtacagctgctattattttatttttcattgatgttatcatttttactgccatttaggagttgaggaaggtgagggtttatgaacctaaataaatgactcaagctctgcagctactatatggcagaattggcatttgagtccaggtagtctactctgctcttgaatagattttttttttaagtttacttaaatagagggcccagtggggagcaagttagatgtaaagcaaatagattctagcaactgagatttatgataattttcaacttctagtgaattcttctgaaattcataaggaaggcaattgtaatgaagccgtgacataacctgaaccacagcggtccttgagcatagtgctgtaacttaatgtagtttttaatggactcaataatttccaaaggttcagctacttttaaattaggtaactttaagaaccgatgccatatttaagtagttttaatagctcagagaatctgatactgaatgttttatgcttcccatgatatccttataatgtgaacctcttgcacagaggtcaatgttgtgttactacggtgtatagtacttgccaaaggaatctgagttttatagaaggtgtgaagtgagaagacttattctgctcagacttggatacacacagttggcatcccattaatatttactgcatgtactgaagcagagcattccacatgttgcttctccagaggttaaaaaaaaggcttcaagtgtctttataattgcacagttttaagatgtgatttaatactgaatagacattttattttgtcatgatgatctcaggacattactatctatgaaaccttgtggaataataacttttatgagatggaatggcctgagatagaaaggagaaggatggtgtaagaagtgtgaaataataaacaggtttaaatgtttaagtttaggagtagacaaaaggaagaatgcctgtaattgtactttttattttaaaaaggcatacaaggcataattaacatgaagtaacagaatctttaaactgctaatgaggtaccacaactgttctatcataaatattaacaatcttactatttgagtatagtttggggaactattcaagaacatattaaaatgtcactgtaatgctctctgccatagctaactaactcaagtcaatgaaaaaaatcacaataattctgaacatgcctcaacataaatgaagtattcattggagtgtaagtactatagtcagacagagttggctgaattaaaatccctgctttactgcttattaactatggtgtcttgggcaagttacttcattcttatagttcttagtaatttaattaattaattattattattattattatttgagttggactcacgctctgtcacccaggctgcagtgcagcggcacaatcttggctcactgcagcctcctcctcttgggttcaagtgatttcgtgcctcagcctcctgagcagctgggactacaggcatgtgccaccatgcccacctgatttttgtatttttagtagagacagggttttgccatgttggccagactggtctgaactcctggcctcaagtgatctgctcacctcggcctcccaaagtggtgggattaccggcgtgagccactgcaccaggccaaattcttagtaattttatctattatatggtaatggaaataccacttcattgatatccatatgataatctatgtaaaatacttagcattgagtgtcatacatagtaaaaattcagaaagtagtaattgatactgctgtcatcaccaccatctttaacatcaacataccatcatcatagatgattaaacataatgggcacaacatgctcattatgtgtatttgaatacatggttctccattttaaaacatgggttctcttactcttgatggaagtgtatgaagaaagaattatgtgttttaagacttaagcttgattaaagtaataccagatttaaaggcctatgctgaacacagaaattaaaaggaggcttttggggccgggcgcggtggctcacgcctgtaatcccagcactttgggaggccgaagcgggtagatcacaaggtcaagagatcaagaccatcctggccaacatggtgaaaccctgtctctactaaaaatacaaaaattagctgggcatggtggtgcatgcctgtatcccagctactcaggaggctgatgcaggagaatctcttgaacccgggaaatggaggttgcagtgagccgagattgcaccactgcactccagcctggcaacagagtgagattccgtctaatttaaaaaaagaaaaaaaaaaaagaggaggcttttgggacagctaattcattgttcttatttgcaaggcctcgctttataagttcacttgattctttggaatgtgtatcctcttatccagatgtagtaaatggaaaagaatgaaagtttttgctatggaattgaaatatttatatttgtctttatatctgatatgagttgaaaactttaggttacacaaatttcttctgacatctttatatttcataccttatagaactyagtgtataaagggaaaagctatttcctaactctggtcactaaatgtgaataacttgacttaaragatcaagtttaattytattcttagattttttttttttttttgccactcatttaattctggtagttgatatttactatgtatcaagcagtataggtctttatacattttgcccttacaaagcattcattgggacatatgccgttagtatttccatttcacagatgaggtaattgaggcccaggaaggacccagagctaaaggggtggagccatgatcctcacccacaccatctgtctctgaagcccatatttaaccctcacactaatgggcttcttagttacagttagcccccaagtattttctgtggatttctgggccttaaaacccatgcctccctactttcctgtatcttccttgcaatgaacaaaagagtaatttaatttcaataaggctcaatttcttgactttgtgtacatacttttcatatgtatatgcaatggccactagaacaaagaattagataacattaatttttagcaaacaattgaatcgattttaaaatagacttaaataagtctgccaaaatccttctaaatacagtaatttgtcacttgacaatggagatacattctgggatatgcattgttagctgattttgtcattgtgtgaacatcataaagtgtacttatacaaacctggatggtatagcctggtacacacttaggatatatgatatagcctatcatctctaggyttcaaacctgtatagcatgtgactatactgaatactgtaagcagtcgtaatacaatgttaaggatttgtgtatctaaacatagaaaaggtacagtaaagacataatagtgtaatctaacragaccactgttgtttatgtggtgtgtcattggccgaaacgatgttatgcagtacatgactgcagttgcactcacactctgtaggcagtagtgggaactgacattttatgcaaatggaatgtcctcatctggtgagctagctgtctgtgacctaaagtttctatttggctcactttttctgagctgaatgcaacaatataggatgagagggcactggaaaagagcctttttcccagggatgcagcatggagaattggaaaagcttgccacggggaactctagggttcctgcagatctgaaaggtcccctcgcacccttgaaaacatccagaaaaggctcaaggactgttgtcttgctcacctgacttgagtgcttctcagggacagggattgtattcttttcatccctatttccgtggtacttggcacatggtttaatggtgcagacacagagctccttagtgtgggcactcagaacttcagaagcagagagctgaggcacccagacaggaggacctggggaaactgggcagaggcagagcacaagacgggtacaaggttgtatgtgggactgatgggcttgcagatgcttgggtagctgggagatacttctttccattttatttttacttaactatggttcaattcctctgtttccaaatctagactagatgtgtgataccaacttagctctgatatctgactctttaaagtgaagaacattattcccattgtcttgatagatgtgcctggcacatcataaaatctttaaaaatattagccgtaatacgtaaacccgggagacggagcttgcagtgatccgagatcgtgtcactgcactccagcctgggagacagagcaagactctgtatcaaaaaaaaattttaaaaaaatatatatattagccataatattttcagattttctctgaatataattattttttcttaatcggttgtttatcttatcttcataccctgtccattctgaaatggattgccagtgagttaagggttatttatagcagcatttactttgggagtttctgaattccacaaatattagcattctttaaataagggcttccaactgtatactaccaacaaaaagatcaagtgcttgaaaatttttatacaccattacttttttaaggttacctcttctcaaatactttatgttattttgctcttctgtattggcagtatcatctgcgcagacatccaagaaaagtgagaaactaagaatagtttgtcataaagatcatagcaggaacataggtacctcaagatcatctcctcccacttgtagtctgtcaccaagatgtgacaatcctgcttcctgaacactacctatctcaccagccccagtgctattccttaagttcaggccattggaacttctcacctgaatcatagtagcctcctaataagccttggatctccatcctcttcaatgcttgattttttttctgactacaaatctgatcatgcagttcacttgcttactaacctgcagcatcccttaccttcagggtagagttcaaactagctcaacctacaaagcccttactattccagtggaccagcctgggactcaacttctgtcactcctctgcaaggtccttacaattgggtgactccagggaaggaatggaccatgctccctcatacttcattcctttctatatgctgatccctctccctaagggttctctgcttgtctaacctcttatcttccacactacctctctttgttttcttgccccttttctatgtagctcacccacctccacccaagccaggatgggctatctttctgcttctctgtttggtagtacagatcatactctattgagttaatgttattcccctgtcacgcacacacatagacacacactctctcgccacccccaacagtacctatatctccagtgcctagcatagtgtctggattatataggaagcactaaatacattttgataggagaaataatcatcttaactctccctgtgtctgacttttttatgcctttcttactcgctgaacttatttcagtatacattgaacaggtactgtgtgtcaggcagtgtgctggatctgagaatatgattactttattagtctttatattacaagttatcaaagaacttgtaagcccaagggcaacccaactttcaaygaaacaaacagtatcgagtgtgctagatgatggagaaaacgcatagtgagggcacgatataagaaaatggggacartgtgcctggtggagcagggaaaactccacccctttgtcctgccctaaccccctactacctatttttctctagtattctaactgcctagaagtaagcatccatctgtcaatatgattataataatttttaagagatgatttaggtctccatttctgtaataatagtctatagagaattaggccatttttattttcattttctacttgcagaccaagaaaccttcaaaaagttctgtaatagtccatgagctcatttctgaggttttcttttatttaaattttttaaattatatctaataatcatattatttaagttcatttttctctacaaagcagaggacttatatttaaccaattattagtagccacttaatgagatttaaaagtctgagttctcttttaagaatggaaataagtatgaaattaaattcttttaccatgaccaaaatggaaaacttaataagatcagaagattagcgaacaacgtatggtaatcacactacagatgtgtctctagtactaaataaatagaaatgacctgtagattaatacatttaatggcaaacatttggaagcaactctttttttagatgtgcatggtcatcccctggtaagtaattatatatgcaagtaaaataagaaattagtttcaaaaatataacatgtaaaatgtaatattaccttcaaaatatataaaatataatacactattctctaaagacattgacatatttaatttactgaataaactagaccattttaggtgacttcttgtatatgattcctgaagttaaaaacaaagtagtaattaaatattatgttctttgctttcctctaaagtacataaaaatattttaattaatattccctaattatgtgtatattatattcccatttcctgtcttaaagtgagagaaaatcttgagcaataaaaaagtagaaccaaattaattctctgtacttttagttataaatttactttgaaattcttaaactattttgaagatgtaactatatcctgttttaaaagacaccttaacttctttctctgactttagtagctttctgattaccaataattccattgccctaagaaagggcctagttttattatcttgcaaccatgcggtttactgtgacttaattctatcacaataacaatcagccattcttggtctacaggtagttccctacatacttttaatattccaaaatattgaaatgttggaaagctgaacaagtcttacacgtgttataagtagctgaaagtaggacttacaatccatactgagagacttttgaaattgaaaggggatatattaataatgatgctgagaaaaatgttatgaagtcctaaatatggttaatgtggtgcttgctgccttcctgtgccagtggtttactgtttgggaagaccccttctatcagcctgtctttttttacccaacacaaggctggggaagacattctggtaatgacgcatgttgcagtctttgttttacccaggactccctagatacctacagtaggcttgaggagaaagacttcattgtttcagaagagaaccaagtggggtcttggctctccaaggtagaaaaaagggagactgatgtataaagggagtacagtgcagaaaaggaaaatagggacctctgtgagcgtggagctgggtggaacctgtggatgctcatgtgaggaaatagggtccatgttctccccattgtaaccatcactaaaccagaaggttggacgcatacctttggccctgctgcctaaacatttgctgtgaagcatcccccactcacttcatctagctggagtgggtagcaggaaacatgacagtaactcaatatcatgataatagctcagaatcattgctcctacattcagcagctatttaccgagcaactactgtactctaagaacttcattcattgatacaaaagacagttcagcatattacaggccatttaggaatgcattggaggaggtggtaggacccataaaagtaaaaaaaattcagaattccaaccattatccatgtttattttcttggtttttctttcaataaaccctactttttaaaggtgtctatttaatgtgttctttcttcttttgagatgctgatcacttggaattttaaacatttaaaaaaaaatctggaataatctaaattttctcagcaaaggaagtgagaatttatgtcatggaaatggggacatttataccactcccaccggactgtgcatctcttacccaagagggagtagcaggaagaagaatgcaagtgtgtgtcttttgccgactgtatttcaaacatacatttaagtagttctactttttgtcattatttccatctgaaaaacttttttctttcttcctgggacaaaaaactcaaattactaattctatttaaataatgtactgtattcagaagagtagctgccaaatttgttgagacctacaacaagataattaattatctagcacacaaggactattggagtgttggatataaaacagatggtggaagaagaaggatgaggcagtcaggatgctctgagggtgtgataagtctttcagcctcagtggggtaaaagctacttgtgcgccaaacctccttcatacttcctgctgtgcttactttgtttttgttgatccttccatcaccccatcactttactccttgagattccagtttccctttccactgccaccacattcattttaaatgtcaagagaagttagagaagttaggggaggtgagggcaaaggtctattccccttggacmcagaaatcagtgccagcctctgtggcagtcccaatgccaatcccgtggagcaaagcagactgcattatgcttgtcctgacattgcttttagtcatgcagatgtaggctattacagagttttaggttcataccagaatcagttagataaattaatattacatgcaaacaccatgaatttcttttgatttgcaaatttcaaagtcttaaactgaaatctaaacattttcccagagaaaacctggttgaatatcagtgaaaaaggttatacaaggaatggttactactccccacttcaaagtgatgctcctctatgtgtaatcaaatttgccagcaattagaaggtacattcatactgaactaaatatttgatggtagagattatagtgacttcactattggtgcttttcttatagatttatcatctattacaaattaccatcatgacgcatttacaactctgcgacagtcttagtacttggcattacaaagaggggcgacagttagattttagatattaaaaaaaactatttaacttcaaactttatgactcatgcactaaagaaatacagaataattcagataagacatcatcacaataaaggtactcattcatcataagaaagagtgagtttctgatctggggaagtaagcagtcaccttgcctatcccaccctctcaatatcaagcccatcttttatcattcaaagtagagttccctaaaatagattacactgacaagtagtaattactgacagctgcatttaattagcaaagcagattcctgctcatgacaataaagtattattacatgtttarcgttagcactgccagtgagaggtgactttgctaacacagagctagaagacctgttttctttatttaaaagcacacccagcttggctggaattgagcttgtgctacgtgggagtgtctatggttttacaaaaagaaagaaagacagtagctgtaaagtgtttttctttttctttttctttttttaggaaaacaggcagattgtacaaggatgagaagtagtctagtgccagccattggttcccattctgggattgtgtgtcagtgtttttgtgtttgtgagtctgtgtgtgtgatgggtaggaaggaatggaggtgtttgggtggcacagatggaaagaaattaattaatccctgtaaataagtaatttctgattatattaaagacactatcgctacccttccttccttccttctttccttccttccttctttccttccttctttccttctttccttccttttttcacttcttctttaccttctgtacttaaccctatacacatctctagtttatggaatatcataaaaagtatatgtgatcaaatttaggattttatataaactctaaattttacaattgattgcaatttccatccattcttttttacaataagaaggcttgacttatctgctcctacctctattatttcatttccactgccctatctctctcacctggcagttcttactaagtgtgagcctatactgatggaattccaagcatcacgtagacattcaatatcttgagcaatatcacctttccaacatcatcaatccataatgcataggtagatggtgctaactttaaggattgtgaagatgactaaaactagcaattcttgacttgaatgacatttgctatttttattatttaaatatattactcaagatatataaacagcctattgtgacattatcagtagaaccagtcctataacttaatgtagtttctcacattcatggaactcaattccaaaaatatttactggtagtctaaaagtctgaaaaaaaaaatgatgttgcatgtctggaccttatgtttgttgggataatatagcgtgttttcacaatgctgttttaagttatctggatgttggcatttatttttcaaggtgtaaaaatagactctgtataatatactgccatcttgtaatttgccattataaatgctatattcataaaaatcaacttatgtatccatggcaataagaggcaagatgaatatgaatagagaaatcctaaattgatcctcaaactaatttgcatcatcaaactgttcagcagatctgccaaacttcttcttttgtcttttcttcctccctcccactcaccctctagtggacatagctaaagaacaaggaagatgcatagtgaaagcccacagccaggtaaacaatggggaatccacaaaggatatggccaacccactagtttaatacttatcactatctacaagtacattatgaccaccaactgtattcacaaccccagacagggcactaaataaatgtatttaaggtaaagaatgtgtcatcattgtttgcagacactaatcattctaacaaggatatttaaagaaaaaaatgtcaggagcttatctgtattctaggagattttactcaaagaaaattccaagaaacagcagttgtgtggatactaaatgtaagtatccaaatgggcattcagttaagaccatttaagagttattttgaatattaaaccacaaagcttcactaacaccctaaatttaaagccctactgagtcttataatattctgatgtttaaatcctattaagaatagaggtttatttttattttgtgctttagaatagaagattcttcactgaaaaagaagtttacaggattcaagggcattgacaaatttaaagccttactgagtctcataatattctgaagtttaaatcctattaagaatagagatttatttttattttgtgcttgaatagaagattcttcactgaaaaaaaatctaaagacttcaagggcattgactaaaaagaagtattatgatcactgaaattgagtatgtttgacaactcaatatttcaactagaaaactttccaaaattacatctataaagttggaaactctactatgcaactgctctaattactgtgctagttcataaattggtactgaggaataaaggttcaaatattgtcttttaggaatatctttcacttgtaatattgtcattcctgtttcagtcattaggcaaatacttattgagggcctactggtttgttttgttttgttttgtttgagacagagtctcactctgtcacccaggctggagtgcagtggcgtgatctccgttcactgcaaactccatctcccaggttcaagcaattattgtacttcagccacccaagtagctgggattacaggcatgcaccaccatgccccgctaattttttatatttttagtagagatggggttttgccatgttgcccaggctggtctggaactcctgagctcaggtgacccacccagytcaccctcccaaaggattataggcatgagccaccaggcccagtgggcctacttttttaatagagataaaacacagtcctctggcttcaaggagtcaggtgagaaagtaaattattgcattgcaatttaaataaggggtagttccttgtaatttctcccctctcatcaacaagaatgtaaactccactgaaggcaagaatttttgttcaccaacatagcctaagcatgctaaaatattgcctggcacagagtaagtgctcaataaatacttgttgaatgaaatcataggtatatgaggtggcatgggagaagagcagtggaacagaaaagaggttgtgagggaaaagggtctgaaaatgcttccaggagggggtaaaccttgagatccatctagtaactctaaatagaaaataatttagcaaaacttgccaggatcatgtatgcctgcataaaactgagtgggtttgtttttccctttttgttttgttttgttttgtttttgtgtgtgtgtttatcttaaaacctgcgttaacagtgagttggagaaacactagtttagcagggaaaagtaatatacaagtaatttgaatattaggatgcaagaaaactccttgagacacctctcttcatctctatgtatgtttcacatgttcaacagttatatcccaaatctatctttctctccagacacctaacaatactatctgccaaatccaacccaccttaacaaagaaataacactttcatcatgttctgtcctaacatgtttttgaaagttatctaattttgatcaatattgggctagaatacctttttccatattttaaactggaacagccttttccataaagcctagacctcttttgtggtctaaataggttattattttaacccttcatcaattgtgactgagtaactaaccccaacaagttgatggagtcttggtcttaagaccaagttgatgaggtttgggtctcagcctcaagccaaatttcttactgaagatgataaacaaatcctctgctcatgctaaacctagcaattcattcattcagaaactgggagattcaactgatgcagtcaatgttcactttctacaccaagccaatcctaaggattttttagaatctttgtttaaatgtttctttctcctgattattggcctggaactaactgtagacatttcctgcaagtataatcatttcctagtttgacagtactttattaaccagtcacaggactaaagttgtcttaggctgtaatatcccttaagtggagtgagacacgttatccgcaattggaatcactagaaaccttaagagcagtgattctacagatgtataagtgatagttcagacctgtggagcccatccctggtccatctgaatgcacctgaatatgttggttgaatgtctgctttcagaacaccactatacagtgatggtaccgatagactttgtgcatctagaccagttgtcttataaattgaaataggctttggcttgaagaggcaaagaacataaaaacaagtcaataactgacaagtgacacttcatatgcacaagggaatttatgttgatggacactgatctgcaagaaaacagagaatacatcccaccctatataatgattaaataattcggggagaaggtcattcattttttaaaactgagagtcagagtcatcaagctaatgttgcatcaaaatgttttaggtccaaggattttgttctatggtaccatgtttgaaagtcaaaagccatgtgtaaatgatgaagaaaagtgatgagctgaaactagaaacctgctcacgtaagaaactacttgtccctctaaggccaagttagagatgacagtttttggaaaagatattaaagggaacacagttttaattctctcacattatctagaatttagaagctttctgatttttcttatccagtcactaaattgggtgccaatggcacctggcagccctgttgtctaaaagggaaccacagtgggtaagcatttttatgtagttacattatatgtgcaaaaataactatagcaatacatagcagtttttctgttaggttgtatttaycttcaccttcctcctcttgaatcttatactctcagaatctaagaaaggacaggaagaagccagtgtcccccagcagggggaagaagaccctgcaggggtcttctcaaaatgtctttgttaacagaaggaaacagcacagctactcaccctctgactcagtgttcctttaaaacagcctccyaggcctctttggccctaaaggtaaaactgtgtttgccttttgagaatcttcgaaacaccctgtctcaaattaagatccaaaacctgaaaccaatactctatagctttatacccyggataactctgtatactttatttttccatttactgagtgggaaagtataaactaaatgtgcataatgagatttgtactggttgaatacacattgtatgccacatcatataccatattaaacccgtaacatgcattatatgttatcttcataataatgctatgaggtagcctccacattatacttttacagatgaggaaattgcggcttaaattaaattattcaaagttgaacatttaaaaagaggaagagataggacttgaactccttatctttctgattcctgccaaaatttcatgatccctgccaccaatcatactgtcaactaagggttacaatgatttttgaggataaaatgtaagcacccttgtactattggtatgaacagattaattattttacctgtatcacccccaacacataaaaatcatcccaaaatgagtcctccttaatcctttaataattttacatatcattaaatatgcactaggcagttttacatatgctatctttctctaatctgaatactaatcctgctttatgttttcttccttcctaccttctaggtaaaagagtctcccttcattctggggcatggctccttatcacatttgttagttggcaataggctacattatgttgaggtaayaaatgaccagtctcaatggcttaagactttaaagattcatttctccctcccactatgtgtgtattgcaagttggaaactccactccaagtctgcactttaagtccccgaccagcagagcagcatttatcaggaatgaaaagagatcattgctaaggacacactggctctaaatgctttcctctgaaagtgacacaagtcactgtgttcattttattagccaaatcaatgcctatggtcaaatctgacatccatgaagcaaggaaatataattttcctacccccgggtggagatgcaaatatttgtgaagtttaatactgtctatactattaggtatgcatgcattgccatatcgcagtaatatagctagtcttttatgtgggtaagtgaaataaaccttcagagagattgggaattatagatggcaagaaaggaaataagctcttaggaattttctcaagtgctaccttagcagcttctacagaaatgacctccaggattcttgtcctttcacaaacaggtttcttcacatttattacttttgcttaaatggattttggtcattatcaacagggaatttataggcttcactgttaccttttttaatttagaatatatatttagaatttggaatcactttctctgatgtcagttctgcagctgattttttttaatatgttatgtgagcaaatgtagattataaccataaacacagtacaaggaaaaagcaggcccacctgtctctttcaaacctgattaggaaaggttgtgcagacaatatttttagtatggtcttaaaactaaggttaagctactttgaagccagttggctaccacagacttattcattttgagagttaggataaaacaaattgaaaatataaacacattctgaaagacgcattatattgctactttaaaaccacatttatatttcagttgygcaggaaatacatttgcaggcatgtagaatttttcttctctgactttgtgacagaaattctgaaaggctaaaaattctattacttgtagttaatgctactaacaagaattatcatgccaaggaaaagtctgtatgctatcaagaactgtgtaaatgaaaaaagccacatactatggtaatctaaatggtgtggagaaaagtaaattcagtagtgattgtaagaaaataagtggcttttccacttcttataagtatgatcttaataattaattggaaagatcaagtcaccaagttattaaattattaagtgagcaaaaagtgtcagactagcctgttttttctttaccttcctttatcacgggatatagacaaatgccaaaaatcagataaacagtcaaatgccagacacagatatatgtgtgtgtctatgtgtaaaaagatacattgacatgcatattttgctagaacattgtatattgtaccaaatctaatactttgaagtagactttatgttatgttgatattaacatttttatgtgggtaagtgaaaaaaaccttcatttattattgtgttgtgctacatgtattttaaaagatctttatcattatcgaacttgcactgttaacaactattgagagatggcaatggattggagtccccagcttcttcagcttacagtcttacagagaatgtggaacacagagcaataactcaagccagaaagtgctaagcccaagcaggataataaagagttttataatgaatgagaggcagagccagagctgttcaccaggctaattgagaaagaccttgagaacacctctaatggcattaatgaagaaaaaattaaaagggaaagaggacaggaaatttcagctaaaggtaggtttatgaaacagcaaatcgtttttgatatagatggagcaataaacccaaatgccagaatgtttcaggcactgtgctaggtatttttatatttttaatctctacaatgctattaggcggaagtggagcattctatatgagggaaaaatataaagaggcttatagtagttgggtgaattgcccaaagtttcagttagatgaagccaaaattaattaaatccattcatttatttgttcatccagaaatatgcctgttcatgcctgtaatcccagaaatttgggaagttaagacagcatgactgcctgaggccaggagttcgagactagccttggcaacctagtgagaccctggctttatatatatatatrtrtatatatatatatakrkakakagagagagagagagagcacttcctatgtactgccattataggtgctgagaatactggagtgaacaaaagagaaaaaatactcctgtccttatggagctaatatttcatggttttctgtttagtttttagctgtgcaaatttttctcaaataaaacattaataactcccctacacataaagcagatacaaataaagctgtttggttaaggtgatgtaagggactgggacctctacctggccagagcttccttcaccctttctcattacatttatacctagttagaaagcccctacaccccgatactgctaccaaaatggtagacatatcaatgagggacaagagaagtgggtgcagatagtgaaataggaatagagagatcacaagagctatcttatgatgcaatcgaattaatatgggagtgaggttatttggacagtgagaggaatcatagaagggaagaagactttgggaggtttttcagtagctcccctgaactagtggacactgagtagatacagaaggatttggaagacataatgaatcagcatataaagactgtcatgcattagagagacattataaatttgaagatagagtctaagtttagaaattagagcgttgaggcacctagcstggctttaatacttaaactttgtaactttggtgaaattactaattcgacctgagtctcagtttcattagaaaaatggatgtaataaatacaccctgtctaattgtaagaattaaagataatgtatgtagagtcccaataacagtgcagtcacctacagagtactcatgccaccaccaatatttctaagatttttctagggaatgtcttgtatgcattcaataacaagttctaatagttattattattattattatccttatttcttcctctccagtgaaagattacaaaagaaaaggatgcaaatgaaaaactaacaacttgatgtgccgtccattgttatgaaaaaggatgagagaggcaatgaggctctacgcccaattgggataatagtagagccactaacaacaacaacaaaaaaatagtatcagatacttaaagacgtactcatacatgtatgcaaaggaataaagtatgtttattacaatcttgtttgtagtagcaaaagactgggaaaaacttaaatgtccttctgtaaggacagaagaaataaattaaggcatagtcatacaatggaatattattcaatcacaagaaaaaataaaatagaactttaaaatatgaaatggtttccaaaataactgtcaagtataaaagcaagatatttatactctctggaaaagtaacattttaatttgctcacctgtgctacttatgatatatgtacccagggtaccaaaaaagagaaaaaaagtagaattaaaagatgagaaattgatgttgccccttaacaaagacttccaaaatggccttcacaaggcatcagcaagacatagccatagactttgaaaatagcagtgacagctggtaaccagaagctgtactatataagagtcaagtttaccaaaaacttcaagataaaaattattctcctaggcagtatttgtctgtagaatcattcccaggagtaatatctttgaatccaaaagaggggagttatctaaatcataaagttgtgtaatggtgcatgtaaattggataatgcaaaagaaatgtattaattaagaaaattaaacattctgaattcttatattttctgtgagattggaatatataacatcatcagaaacatgtaagtaaacttgtatcatgtttaatagaaaccacataaataaaaattggatgcatatttaatttatatatctagataaatatatccactttgtcttatatatccactgtttgtttttgttttgttttgttttgttttttgcaaacaaataacaaagcaaaacaaaaaactgctaagatgatagaaatacctacattttgtgtctccttgggctgataggagctaataaaagggatgttttaatcattcttagaaaaaagattatggaattataaaatcttaataggcattgagcacttgctaggtccaagcatagtgctgagtgattgatattttagttagtcttcataacaacttgacaaggtaactgcttctatttccccaagaggttcatttacttgcccatgatcttgtaggtagtgagaggtcaagtgggcatttgaacccaagtctgctgacaccttatttgtaatcacgatgctggttgctctaggcttagggtataacctgcaagagggagatggggtaggactcagttaattataaagagctagaggaaaagcaatttaagagaacagatttgtacatagaaataggaaataatgctgtgaagagccttagtgggcagaatcaatgacctatattttactattataattttgcccagggcaaccttttgttgtcagacagttattaaaaaaaatctacttaaagagtctgatattagatccctgagaataggggagaggaggagaaaaaaatagcaatttgaacaatccagtgaggagtagatacataagttaggaagataatccacatggattttgaaatcaatgaagggattgaagttgagttaaagcattgttaagaacttgttaaaaaaatatatgtcctatgcttctggctggtgcagacattacagctttttctaattagtcaccctatattatgggctggacatgaagtggacagaatatagtttactctccaggacagagagccatgaatagcaaggtgttaaatggtggagattaataagccttggcaggtcagggtaggggactttgggtggcatctgctcacactacagtgggcttaactctcgccagttgtatgcgtaagagctaagagttccaactttcaagtggagaaaagctcattttatttactaaagtaccctaatttgagtatttgaattaacagtgatgttaaggaggacatcccattttctcttgttgatgtgtgtgttttaatgtaattttgatgatggggtagtcagatcgctagccaccctgtctaaaataagcctcataactttttcccgccctccagcctacccccccgccccccgcctcccatcattactcttatggttccttcatggcccttaggaccatttgtggaataatttagtttacctgatgttggtgtcactccccaaagtaaagcataagcatgacgagggcaggcaccatgttacttttgttcmcagctaggtaggtgcctaacctaccactataggtactcaataaatatctactaaataaacagatggatgtatgaaatgtatttttcattaaatgtcaaagaataaaaaaattacaatatactatttaaatattatatccatagatatggctccaaacccagaagaaagagtattttccttattgtgattttaagactgttatagaattccttcacatttcagttagcacctcattcttaagggacatctggatactggaactacatgcatccgtttactccaagtgtgttaacrattacccttgttagtaatgcaggaagcggagatcatttggggaggaaaagggcacttctacatgagaatgtgagaaatcctatgggtatttcctccaagattgacctatatattttacctaaactgaaaataaaattatttatgttttcacagtgacttagcttttagggggacgttggacataaattccacatttgatatttttacatcttaaggaaaccaggaatcagggaaattaaattacttgcacaaagtttcctcactgataattggaaaatctaagatattaaatcagagctttgaatcaaacttcagtgagtttcccattaaaacatagaagaataatttgcttttaaaaggaaaatctcattttatttttctaactaactgtgtaactgctatgcaacaatttcattgcctcagaacctgaaaataacaaccactacctaccaaacaaaaaacattcatgattcacagctcacctctttcagagaagctaatctaaaacattggcatgttcaataatctaaaacattttaatcttatctaaaatatagaaaaattgttgttgcccttaaaatctttaaaataatttgtgctgttgattcaattgacttgttcatctaggaaggttttggttttttctagcagcattaactgtagaacataaaagtaatattgaaatgcttttttgttagcccaagagtgtaaatatctggcaagtataatgtgagttactcttcctttgcttttattaattttttttcactttttggatcatgttgtcacttgaacacttttgcgtatatctggaatcatctcctctgttctccatttcttgtccccttggaattaaaaaatcatcaatttgatttcagtgctcatctgatatgtgacagaataaacaatactggatgtgttccaggcacacattacattgaatgccatccctcctccaacagatggccaatgtggtgtttgttttatgagtgtccttagatcgggacagcttcctgcatcattggtttattgcaaccggtagtgatatggttggaagagtaacttccaaaagcagatgacattttggtataatttrtacaaataattatctatacacagacagactactaaaatacaaaaaataatttctacagtcttgaacaaaggtggcattatggaggatccttgctcactgatggcctaattcactttatattacaataaattcaataattgttgatagaaaaagtcacatgcctgcttccgcttctcttaatggcactgcagggttagattgcagcatgaatgaaaagatggtatgttttcaaagccttggcagcttgtggtgaccttcagaagaaatgaaatgctctgctggctagagaaacaattgagctgaaaccagtgaggcgcagtaaactcagagatacacttcccaaattaaaagctgttagcaacaactcagacaagaagagagagagtaaagaatatcactctgcaaggtgattttatgcaaagattttaaagtgggagagaaaacaaagtgcagataagaaaaaaaattttttctcttcctgaagaacttagtgtacatatggtatctagactgtgaacatatatgtctataacctgttgaaaagcatacagaaaaaagaaagtccaatcttttcataaaayagagcatgaaagaattagtaggggtcataatattttataatcaaattgttttctgtgcatctctaagtcacaaaacatcagtcagtggactacatatttgaagaatccttttaacatatttgtaataaaatatgtgtgctattgtttctcagatgaaatgattaaaatatgtatactaaatctgcttactaaatctgttgatcattaagctctatgattgtttgcaattttttctattttattaaaatamrtttaacaaagtttctagtagtttgttgaaagactaaaacmaccccttaaatatgtgtttaggatacagatcagacaaaggcagaagactgaaaatatatcttttttatatttgcacggaataaaaagaaatgtgatggacaacaaatagatgtgccatgttctaatatgtgcagcagttctgttaaaatgcttataaataatgctaaaataggtataaaataatcctaaccattcatgtttacatattccacacatgaaaatttatttgcacaaataaaaatgctcttatatccacaaaggctctatttttcctgtgttacccaagccacatactatagttattaattctacattaatacttgttgctttaattacattggaactagaaatggtggaggatgatggaggtacaataacataaaattaagactatgttaattttaatcttactttaaaaaaattgtacttctagaatgtcttgcaactctcagaagccctctctttacttgttactattttaatggtgcacccttattcattcctcttcacagttagtgacctacataatatttatgccaagtcttaaatctaaaacttctgagtgctcagcataaataaaaaatgaagttgtaagctttcatgtgtacctactgtttatctatgaagaaaacagatgtaaatgaaaatttaaagctgaaaggatactcctaaagttattttagtgtttcttaatcttttttgatcattttcacttgaaaatttgatgaaagcctggccatatctccagagaggaaaaaaagagcatacacacaaaagaactgtgttttatttttgaggatttgccagctctttctatgaacttcagggacttcttgggcctatgaaagcaactataaagctcatttttgttttttcaaaaaattactccaaacgttaaacttcattaaccattaaattgagaggcatatatatggatttcaacttcaacatttgctccatattgaactgcagcaaggctatcttggctgcaactgaaattcttctgtataatgtcttagcttaggaatcatttgtgtctatgtctaaagtagtggttgttaaagtatgatgtctagaccagtaacttcagtgtcacctgataatttgttagaaatgtaaattcctgagacatcactccagacctattgaatcagaaatggggattggggcttggcatagtggctcacacctgtaatcccagcactttgagaggccgaggcgggtggatcacttgaggccaggagttcaagaccagcctggccaacatggcgaaaccccatctctacaaagaaatacaaaatattagccaggcgtggtggggcatgcctgtaatcccagctactctggagactgaggcatgagaatcacgcgagcctggggggcagaggctgcagtgagctgasattgcacaactgccctccagccagggcaacagagtgagactctgtcttaaacaaacaaacaaaatgggggttagatccaacaatctagttaaagaagcactccagatgatcctgatgcaaggaatttccttatttctaattctcatatccaagcatctgattttaattactcgatcgatacataatttacatacaataaatgcacctattttaagtatacattgagttatgacaaatctatgtactcatttaacagccaccacaatcaagatattgaacatttttttccatctctccagaaagttctcctgtatatttgcaggcaattcccaccacctcctccccaataaactactgatctgattttcattactatcgattagtgttgcctgttctagaacgtcatttctaaatgaaattatacagtatttatttttaaatccagccagctcattgtgtatatcattacttcatttctttttattgctggatagtattcagttgtatggacataccacaactctttatcccttcacctgttgttggacatttgggttgattacagtttagggctattataaacaaagctgctgtgaatattcttgtacagatctttttgtgaacacgtttttctttattgtaagcaagtgcctaggactggaattactgggttgcatgtayggtatatctccataaggctatcaaactgttttccagtgtgatatactcccaccagaaacgtaagttccagtcgttccatccacatcatctccaatatcttggtattgttggtatgttgttgttatttttaacaattaccctgctaatgagtgtaaactgatctctcactgtggttttaagtttcatttctctgatgactaatattgagcatgttttcatgcatttattggccgtgagtgtatctagtgtatcttttttttttttttttttttttttttttttctgatgcagggtctctttctctcacccaagctggagtgcagtggcatgatcatggctcattgcagcctcaacctcctgggctgaagtgatcttcccacctcagcctccctagtaactrtagrcatgtaccaccatgctcggctgatttttgtattttttaatagaaatggggtttcagcgttgttgcaggctggtcttgatctcctggcctcgagtgatctgcctacctgggcctcccaaagtgctgggattataggyatgagccaccacggccggctgagtatatattctttgatgatgaattatatgttcaattctttttaactgggtttattttcattttatcattcaactttaagaattttttttccacttctggatataggtcttttgtcattacatgtatcagaaatattttctctcagtctgtaacaagtcttctttattttctaatatcttttgaagaccagaaattataactttaatgaagttcaatttctcagttttattttttaagtttttaatttattatttctgatctaagaaacccttgtctacctcaaggatcttctcttgtgtcttgttgtaaaagtgttataattttggcttttatatttacaagtattttacatttctatttagatataaatatatttggtatatggtgtgaggtataagccaatggtttttgttttttgattttccatttgtatatccagttgttccagcacatttgttgaaatttcagacaagcatcagtttttaattttctaaaataatttacactagttttgttttaaaagtttaagactcttctccattattcttagattttgaccagagcttctattagataatgttcacttggaaacatagtaacatgaaatccaaatattcctggagaatttagtattagtctaaatatatgtattagttttgcctaaattcagctagaggaaagaaaagacaagaatgctctaggtagaactctacttcattggaaaggtgaatctgctaatggagaacatttcatagttaaaatacttagttggtagttaaaatactaccaactttcaaagcagaatgctaaattgaaagtaaaatgactgaaataatgaaatgcatagtaaattatgaaattatgcattgatttagttatgaccattgaaaatatcttccttgcagctgggcacggtggctcacgcctgtaatctcattactttgggaggccgaggcaggcagatcacttgaggtcaggagttcaagaaccgcttagccaacatggtgaaaccctgtgtctattaaaaatataaaaattggccgggtgtggtgttgcgtgcctgtagtctcagctactcaggaaactgaggcacgagaattgcttgaacctgggaggcggaggttgcagtgagctgagattgtgccatagcactccagcctgtgtgacagagtgagactgtctcaaaaaaaaaaaaaaaaaaaaaaaagagagagagaaagaaagaaaatatgttgctttaaatttcattttaagtggtaacaatttaaaaatagctttatatttaatattgtgatggaaatatgtttgtttgtaaaagttgagaagttataggaaaacataaagagtaatttaaatcaaccataaccgttctactyagaataagcattcttaacatattggtatatattcttccaaatatacaatcacaaggaccaaaatggaaacatattctaaatatcattcttttccttaaaacattgtagatctctatatcttagtaaatgaaggtcgaatagcatcagattttattatttgaaagtaatacatcttgtttaaccacttcccagtaatgttcattacaaatatttttgttgttgttttgttttgtttttatttttgtcattattaacagtgctatgattaagagcctggtaggtataattttgcattcttatctgattgttagactgtttgtttcaatgaataaaattggtagttacgtttctttgtttatttaatgtatttattcttgagcctgaacttaatcttgatgacattggctatattagcatattcaacctattggaacatttataatctggaagtaaaccagaaagttgccaaactctatttgcttttccaggggattttgaggccttaagtgagtttacatatgtgaaagtagatggaatattctgttacacatttckatcattgaaaatcgtcggggaatataatcatatcattaattaaacatatacagacagttctctacttatcaaggttcaacttaatgatttttcaactctacgatggtgtgaaaatgagcaacataagatatttttaacttcccatgagtttttggggacataaccactattgcaagtcaaagagcatctatatwcaacaaacatccattgtgcacaggtctctacctagatgcaaaaggcctgaaaaaaataaaagacttcctaggttcctagcaggaaaaaaaaaaagctatttggtgagtaaataaagtcttttccacaaaaaaacgtttttgaagtttttgccgtttataatacaattgaatttgagaacttaagatgccattttaataggaatttcttgctctggagtccttaataagttacagataagcataattatttgttttcatatctctctgaaaaaaaatctagaatcccaaaccttttcttacacaactacctctccctgaccattggcatatagtaaaggcacgttttcattcatttattgaatagctattgtgcaataaatgtactgagcatcctggaggagcttgccacctactcgggactataacatttgaaagatatttcagataggagaattttagtttggatttaaatctaagtcttctgtgaggactatgagtttaattttttcccccatcattccatcatggactcatcatttccttgtccagtacaatatattggagagagcaagtttactgctcacttccattgaatcataggtctttttctctgcacattaccctgaagaccttaatgaaaggcatgtttgaaagtatacgtaaatatagatactttttctttagatgtactttatatttatgaaatcaaagttggaaaagagccctggcaggcaatatttagtgcaaacttaattctctgtttagaatgtgaaacaatcttggcccaaagacaaatgtagtactatatttttcagtgttttatttctcatatttaaaaaatttaacacaaaaggatatttaatgttttcttttttgttgtttttgagacaaagcagcatctcactctgtcgcccaggctggagtgcagtggtgcaaccttggctcactgcaacctccgccttctgggttcaagcatttctcctgtctcagcctactgagtagcagtgattacagatgcacaccaccaagcccggttaatttttgtatttttaatagagatagggtttctccatattggccatgctggtttcgaactcctgacctcaagtgctctgcctgcctcaaaagtgctctgcctgccttggcatcccaaagtgctggcattataggtgtgagccaccacacctggccaggatatttaatattttcaacctgtggttactactgaattcattatattgggtaacattttagaaataggtggatgtgttttattgacaagtccctcacatagtaagaggtttttacctattactgcttaaatctcttctggacaactctatttgtactttaagtattttacaaatttcggttatttaagcctaccacccttttagagactttatgtccctgagtgctcatatgtattctgtgaaaagatttcttagagtgtggtcaaagaaatcactttcaacagcatcccctaggttacttgttaaagggctttcctggccctatctcttctaaatctggatctctgtaagtgtgactctgtattttatattattgacgtcccagatgagtatgatgttcactacagtttaagtaccaatgacttacgggatcagttctcatttttgcctcctagttgccggttaacatgatgcctagtctgaagggaacatcatccttctcttgtttcatacctgcttggctctgagagcacctgccatcaaggacaactgtgtctcaccaacttgggaggagaaatgtttctatgggcatttcagggttttgttggcatgcagggagctgtcaagagaatcaccttactgatctatttgttcactcatttctccttacctggtctggttttcacctcctcctgggactgggtgctggggcagttcagggggtcagaggcatttcatgagctacaggtctatgtcaacagtgaaagagctattctttcttgtactctactcaaatgttcagtgagccatctagttagtttttgtttttgtttttgttttttgagacagagtcttgctctgtcacccaggctggagtgcagtggtgtgatctcggctcactgcaagctccgcctcctgggttcatgccattctcctgcctcagcctcccgagtagctgggactacaggcgcctgccaccacgcccggctaattttcctgtatttcttagtagagacggggtttcactgtgttagccatgacggtctcgatctcctgacctcgtgatctgcccgcctcggcctcccaaagtgctgggattgcaggcatgagccaccgcgccctgccaccatctagttagttttaaactacactgttttctgctatgtaggagggtcaaataagtacaagaatattaagtttaagagacttatgctccagagataattttttaaaattcaatttatgcttaagatattcctaaacttactagtatatagatgttcaacttaaatattttaatagtcatttacaatgatcatttttctctgtttttcttgaagagtagtctattaattacttattttctctctgtgaacaatgtcaatgtataaaaattttatttccaaattaatatattgttatctgcttcctaaagcaatttctaagcattcattatatgacacaactcattaggtattttactaatcagtcttaatattgcacattgagtaattatcttataaatttgagcagcattatatatacagactaatcaaaactcccaaatcatttcaatcaaaaaacaatatgaaactggtaaataataatatattgataagaaattttaattcacctcacattgatattaattaaaacggtcatattccaaattttcttggttatattgctatcaatattttattatctattaaaggaaagcaaatcacatctcactagtaaacgccaattcatctactttttaaatttaaatgcaaattctttccaccccttacctttacaaagagataagtcaaaataggaattgcgtatgttatgcattactttatacacacttcaatatcaaaattattttttatcatgattctccagaaacttattttagaccgacatcaaggaattcaatttttatcctagtttctatatgaaattgcaatacaacaataaaattcttagacatttcttattaaagaaaaaaaaaactaggttttatcctagttctcacaaatccctgtgtaattttcaatagattactagatggaaaaaaaaaaacagtaaggatatttgtgctatacatacttcaaaggtrgcatcctatgctcttctcatgaaggacagagaaatgccttttatattatgaactactagtaaagtgagtaatgactaagaggatgtcctagcaaacctgccctaggtaatctcatacaggtttcagaatcaaagttgtaaatttcctcttagtgcctacaaagtttggaaactgcagttttacaacataaggctttgggccttctgtatcaacaataaaggaatccaaatccacattttctctaattatgatttggaagtccttgcttgaagtgaatatagtaagatgttcatgctgcccttgctactgtcgttaattgtgcacagttctcccatgatccttcaccmgctgctgctactgcctatactgaggtggtcagaacaaagttcaggagaaatagatgttgaaatggacaaaaataagtgatcgtatgtcctatatgtatttcttaagaaggaaataaatatttagcatttggggagtctcttggttattcagatttctagctagatcagaaataggtaagatttactagatttcttaatccttttattaaacttattggattctggattgtaaagcacttgatacactttcatttaacttgggtactcaaatagtatctttcacatatagctatttttatagcaaccacacctgtgtcttatagagcaatccataggtgtcttttttatttaacctgtagaatattgagaatgtttttagtctagaattgcattgatgtataacacttcacagctaaaatatagaaacactttagaaaaattactataaatataatatcgagcactaaaaaacaatgttttagtaatgttataattcaaaattggctctgagatatattctaggtcaaaattatatactatttgtaatccagtgaaaaaattatttgcttatagattatatatatgtaataatttatatgtaaatgattttactaagagataaaggatgagaagaccaaagatgtcccctaaggatgctgtaggaatgaagaatatatattttatatatatatatatgtrtgtgtgtgtgtgtgtgtgtacdtatatatatatatatatatatgtatatttcatttacagaagctttgccttaaatagtccctgaataaatgagaaaaaaaactaaactgaaatttggacccttatgagaatagaaggatatgttgaacattttttaatagtcataattatttaaaaaattacattcaggcaaagactcccagaatttaaagcactttcttagaggcagaatgcaatggtaattgtacaggaatgcgactttggactttctgaacttaagtgtttatgtctgttaattcaagatgccaaccagttggtctctcagttcaacattatgtagtccagtgtattatgtcaatcctgcttctcaaattgtggtccatggacccctgaaatcttctagtcactgtcaagagagtcccataataatattaaggtgctctttgtctgtttcattgtgttgagatttgtattgatggtgcaaaaatcagtggtgagtaagatgctggtgccttagcatgaatcaaatctaagtggcactagactgattgtattatttactgccacatattcacgtgaagagaaggagaagagacaggagaaggagaaggcaacttttcttaagagtgtccttgatgaagcagtaaaaatctcaacttttgagcatggtctttttaataatctgtgtgatgaaatgaaaagtacacataagatacttttactgcatacccaagcacaagggcagtcttgaggaaaagttcatgtgggtcctttgagttgctagctgaactagccactttttcatggaacatcatgtttacttgaaagaacaactgtcaagctgctattattcatagttgggtatttcacatgcattttctgaaaaataacatagtgagtctgtcacttcaaaagaacaactgacaatatttgttttcaaatttgaacttttacttgaaagcttgaattttagaattagaaaaaagtattagaaaattgtatatgccactctgagtatgactgcttctgaatatgtaaagactttcctgatgaggtgggtggtgatattaatgaatatgatttttaaataatgacatatgtcaacatttaggagaactgcagaactcagtgcaatattttcaaaatgaccagtacatgatggtaaaatttatgcttagtaagagatccattcaaagtgaaagataggccagtgaattttaatgtaatagagtacattgatatggtttcagatttcacattgcaactaatctttaagaaatgattacttgtcaagttttggtgtagtattaaagaaaaatacccacagctattttaaaaagctattcaattactcctttctttttcaactctatgtctatgtgagagctaacttttaaaaatatacatcaaccaaaacatcttgcaaaagattgactactgaagcatttatgaaaatccagctgtcatttattatgtcagacactagaacttytcaaacatataaaacaatctatctcttcttgcagtttttgtttgcttggaaaggacagttatttttcataacaatgttatgtgttaacatggaatgagttcatttttgctatttttaaatgaatgattttttaaaaatctgttttaatttctaatatggttaatagtaataaataaaacctacatgaaacaaaagcttctaagaccaaaaagtttgagaatcgctgatataatcagggtggtttggaagcagctattcaaatccaaaataaagcttcttttgccactagagggagcttccattttacataaatgtattgtatagaggcattaaaaatttatatgaaaaataaatgtgagagttctagaatcacagcacttactatgcagcacaaagctttgtgagaacactactgctttatttctgtggtagccctttaaacaaaatggaaggatttttttcctacattcataattgtgtttgtgcctagtatgcttgagaaaatkatgtcaacattagatatttaagaaaacatcacaaattcttaatatatgataccatatagaaagaattcattatctttttcatctttctaactgcttccttataagtagcaggtgttgatgtagttctttcttttctgactgacctttgagtaattgctaattgagtgtaggtcagtcagaaatacttctgacatcttgtatttctcccagagacatttgtatcagttacagagaaatgactgtgcatatggaagcaatggggaagtcctgaatgatttagttctcttctctgaggtccacatggaatcacaccactactgcagccagtcattactgtggttttataaactctccctcagtgacatgcattttttaaataataaaatttatctttctttgtcttcctgaaggcttgatatggaaaatcacattctgatttatgggcacaggctcaatagataaagctgctagattaattttgtagatattttagaaataattgcatgcattatatttcataaataatcttaagtagacagtgttatagtagaatttaagttaagcacatccaaatttgcagcaccaatgttggtccaaattctttaggatgtttgtcttcttagtatgatgtaatgtgccctgataagtaccaacgtgagaaaacccctgtaagaaaaatcattttccttgagtactttcttcttcctgcagagccttttcttatattctcttaaactagtggttcttaacatattgaagtaaaaaaaaattgtttttaaatcaggtggaagccatagtcactctgcccagaaaaaaaaaaatgcaaacacagtatgatatattttgcttacaaattttcaggtttttggacctcctaagtccatgagagttctaggttaagaatccagactttaaatcaataggaaaccagtgaagctaaaatgtggcaggtttcttttgaggtgggggtggggggactgaggaaggagagtataaatatctgggacaaacatgcgttaatcaccttatttatttgaaatcacaaaaaaatctttgggaatcctgaaatacttttagtaaaggctccaaaatccatttctactaaaatattatatatataaaagctagagctgaaagcttaggtagagttgaggccggacttggtgaaacctggttacaccccagtgcagaaatccatccaacctgccagtctccgtcatggattttaaaaagtgatgtatttagaaaagcagtattcagtccatcttagtttaaacaaattaaacttttttgagtttccaggagccaaattagtctcaagaattcattaagaataactacacaagtttaagttatataaaagaagctaagagcattttaaatgtgggcaaacaactcacaatagtaacattaaagttgttcatccatattcagtttgtaamattttcactcttaattgagaaaggattgtcataatatatttcaactatgaataatgaagacataaaatgattttactaagagataaaggattggaggaccaaagatgtcccgtaaggatgctataggaatgaagacgagaaaggagagtagaaagacagtcctttgctcacaaattcttggcaaatgttgacagttgaagcttacccagaaaatgaaataattttttctttctttcaaaataattgtaccccgcatctctgctccctaaaatgtttgtgaagaattttcattattacacattgctctccagatgtccttcttttaatctcacatttacatacctgaattattgtcctaggttttacttaagtagcaggtgattgatagtttaattttgcatatgtgcttggatatagccatggtggtgaaatgaaactagacaaactttattattaataaacttaactatgactttctcttaccatttcatgtctactgccatattctagtgatcatgaaataataatttgcaatggctttcagcaaggatagattactggtaccttgattctacttttttgagggttatgttgattgaaacgattaatttttctgtctttctcattacctagttgagcctaacaaatatattaagggtgtctagggtcatcacacataaaatgaatgtgtgactcctgcaaaactgaaaaattgagtttgtaggctgccagtttggcaagaatacattcaatacctttctgggtaacttcaaatatttgcaaaacttggagacaacagcagacagtatgatttgcagcttggagagtaaactttgtgagtcaacaatgatgttgaaagccagcgaagatctaataaatacacgttacagttttaacactgaaaatcaacttgcagttattcatgaggctattttttcttcttaaaaagcccttggttgcccttccattcctctaaatttggcagacacacttaagtggtgatgatgagtggatggtggcatgtggcaggctgtgtcatggtcctgggagacctgtcccattctgaagagaaccccatgaagcagctgagggctcagccatatgtccagatttttcaggagatggatgatgagagctaaggagagtgtcagtgtccctgaaatggagatcaggtcaaggattcagccccaggtagagaagtgaaccaaagctttaccatatttaggaaagagtgtggggtaaggagctctggtgctgatgcaatagggagaatattatggcttcttccagatgtagatcccttaaatttacacaattgcctaggataccaaggctcactcttagaccttacttgctactgggaatgaggcttctcaaattaaatatgccttgttcaggattgactcaggtgagctaagacaacaagtgtttgacagtggatccacaactgagaaaatgaggacatcttttctccagtgcaacactttcatttcccaggggaccctagtgtgtcctatgaatgacctttagaaataaattaacttttcctagaaaaataacaaagatgaactaaaaatgaacttattattaataacatacattttgcacagaattgacctttgatgaaacctgcttattattttttaaacagctttactgagatgtgattctcataccataaaattcacctatttaaagcatacagttcagcagtttttagtacattcacagagttctgtgaccattaccacaatctctggaacattttattctagaacattttcttcatccyctcagtaatccctgcacccgttagagtcacttttcagactcccccactccaacgtactagctctaggcaactactaatctactttctgtctctatagattttcctattctgagcattttatacaaatctaagcatacaatatgtggtcttttgtgactggcttttttcactcagcataatgtttcaaggttcacccttgttatagcatgcatcagtactttattcctttttactgtacagtaatattctattgtatgaatataccatcttttattcattcatcagtttgtaagtatttgtgtttctactttctagctatcatgagtaatgctgctgtgagcattcatgtacacgtttgtgtgtgtggacataagtttttatttttcttggatatgtatctaggaatggaattgctgggtcatatggcaaccctatgttttgtgtgttgaggaattcacaaattgttttccaaagtggttgtgccgttttataatcccaccagcaatgtatgagggttcaaatttctctacattcttaccarcacttattattgtctgtcttttttgttttagcttttctgatggtggtgaagtgatatctcattgtagtttgagattgcatttccctaattactaatgatgttgagcatcatctcatgtgcttgttgaccatttgaatatcttctttggagaaaatgtctattcaaatctttagcccatttttgaattggatttttttgtatatttaaagtattctttatatgttatatatacaaaactcttttcagatagatggcttgtaaatattttctcctattctctgggttgtcttttcattttcttgatgatgtcctttgaaatactatagcacaatagttttaattttgatgaaatccggtttttttcttttctcatccatacttttggtgtcatatctaaaaaaaaaaagactgcctaaaatactaggcatattaagccattttacattttaacccttagtcttttagacttgcataatttttcctttgctgtattatcaggctgtcttcaccagcacttaaggaccatttctctggtgttagaacatgagagagggaacagttttcaggaagtcctttttttatagaaatcatttagctcctagcagccactagcagtgaacataggaaagagcagataagaacacaaaacttacattttcttcttaacctcatgtagaaatttcactgaggtatagtatatttctagttatttttatgtattttaattaatgcccaacactttgaatgctcacaaagaatatcatcactagaaaaytcagtcttatctcttccaaaataaattattggatagtgttacttagtacaggactatcggggaacctgcccccaatagtcacgtaggttcttttctattttccctaagtgtcagccgggttgagaaataaagggacagaatacaaaagagagaaatttcgaagctgggcatccgggggagacatcacatgtcggtaggttccgtgatgccccaggagccgtaaaaccagcaagtttttattagggattttcaaaaggggagggagtgtaagaatagggtgtgggtcacagagatcacatacttcacaaggtaatagaatatcacaaggcaaatggaggcagtgcgagatcacaggaccagggcgaaattaaaattgctaatgaagtttcgggcaccattgtcattgataacatcttatcagcagacagggtttgagagcaaccggtctgaccaaaatttattaggyaggaatttccttgtcctaataagcctgggaacactatgggagactggggcttatttcatccctacagtttcaaccatagaagatggctacayccaagggggccattttagaggcccaccctcaggggtgcrttctctttctcagggatgttscttgctgagaaaaagaattcagcaatatttctcccatttgcttttgaaagaagagaaatatggctctgttccgcccggctcaccagcggtcagaatttaaggttatctctcttgttccctgaacattgctgttatcctgttctttttttaaggtgcccagatttcatattgttcaaacacgcatgctctacaatttgtgcagttaacgcaatcatcacagggtcctgaggtgacatayatactcctcagcttgtgagatgacaggataagacgggcataggaaatcacaagggtattgattggggaagtgataagtgtccaygaaatcttcacaatttatgtttagagattgcagtaaagacaggcataagaaattgtaaaagtattaatttggggaactaataaatgtccatgaaatcttcacaatccacgttcttcttccatggcttcagccggtccccccattcggggtccctgccttcccrcaacataggacaagagtgtatactctggagtcgtgctgccaggttgaatcctgactctaacacttggccgtatgagtttgggcaagttatatgatgttttgtgtgtgttttaattctcatctatgacattggaataatgacaggacctacctcatagaattgtgaagattaaatgagatattataggtaaactaattagaacaatgtctgacacataataagtgcccttaagtgttaaatgagaatgatgttattgttttgtgttacagaattagtgtatctgtggaaaattggccaaaacaaattctgatggatcttctttattgctgtttaaatatttcagacaaaatgaaatataacctagaatatgaacagtgctagatatgcatacttgaaacaaaaatcatcatggtcatttatatatttctattttactaagatttttttctcttataaaaataaattataccttctaatagtaaggaaattgcctctgccagtttttrttgtttaatttgttttaatttcaaacattaaaatagcacattaattgatcaaggaatctcaattactttcaaatgctgcaaatatactaatatttattcatggcagtcacagcaggggtagagggacaggagacaaccatcttctagaggaagaacttttaaaacaattatattaattccatttataggaaaaagaataattcatagaaaaattaatgttgcagttcctaaaagcatgttccagttactattcccaaaacaatgtgtcagattctattgtattcattggctattagtcattttggcagcttgggctatgctgccactaacagtttcatgagactagcatactatcttctagtttacacaaaattgtgtagataccttgtctctctatcagactgttgctccttgaaggaaagcgttaaccaagcctgttctgtattccccatatccagtatggtactttgtccatagaaagcactcagtagattccaaagggatcatacaattttagagccacaggagaaaggccttcattagatatgggtaaattcattgtgtaatgtatgaaaaaaatatatactaactctacagtaaaggaatgaaaaaagtctggaaagatgcttttccccatgaagcctgctttccctttgctcctttgcagtttcccaatcttgttcctcttcctgtcactcatggtgctaacacagatgcctcaggacaccgcttggctgggtgcatctacaggtgttccctgcgtatccgaaatggscttattcagcagattctcttgcttgtgtacgtccctgtctctccctctaaaccggagccctgtgaaggcagaaatcattcttgtcttgtgttgcattatttttgtctagtgtgtagtggtccggtgtatatctaaaaaaaaaacactcatatatagtaatgattgaagtaaatgtctagctctgctgtgggctagctgtgtgatttgggggaagtccgttagcctctctgggcctctgtccatctctctataaagagatgaggctggacctgatcagtgwttgaaatgaggtgatccatttgctgattctgatccagaacggtgtttttatttttattttttcttgtttgtttttacagagaagcgtgtactcccattttgctgcaagaccccctttcaactttcacctttgtgttcagtgttatcctccaagctcctgaaggcactctggcataggctgaagctttgtgttacctttctgttctaaaatttggagtctgtggttttaagacatgcatgatttcgtgcttcacctccatttacttacaagcaggagctttcatttacattgtcttgtcgtcttgagtatcatttgttttgactctttctacctggcaaagcttttggatttcaaagctcacaaattcctgctgttggctgtgccctttactttaacaggggtgattatatcttctctctagatatttttattagcatcctacagggtgtgaatttttagcattatgttgaagataaaatgaatagtgggaaaacaacatctttcggaatatatatccacacatgaattttagaaatcctattactaatttgaaattatttattttcctttctatggattatacttatgagtctatgttggttatggagatggatgaatacattttgattctgaacttaccagcaaaattcataagtaagtatacatatgtactatagacatgttaataactttatttaattagttataccccaggatttttttttccagggcaaaaccaatataaaaatgggtataatcctcagtgaatctgttgtgtgaggtctgattacttctatgacgtggcattctataaatattgctgcttattagattgaagtatagttgacatggacccatatttagagtgggccataacatgcctttgttgagtaaaaatgttaatatagctagtagttatgaacagtgagatgaacttctgctatttttgcactcaaaaaaagtaagaaatgtaaattttgtgagtgtgttttctgtgctgagtagaatagcagccattacattgagagataggtgaccgtttggctgattattgctgcctattttagaacattctgtatggttagctacttgaagcatagattcacaataggagcaactttcaaatctagtagaaacccgtgggacatacacatgggcctgttcaaataattgaactcccttccacttatgactatcttatttgccacttggtgcagccctgaagattgtacaagctgtgaagaagccacttggatatggtctggcagtctcaaagcaatcatttcagcttccgtcacagtagacctactttatggagcaccaaggggcactgtcattaagaatactaaggaagtaattgcttgtacatggccctgagtagttccttcccttctatatagtttgcatgcttttacacagttattctccacgttgttatttcagatattaggagatttgtggtcacaggctaaagatgaccttattatacaacaatctgacgtttgaagcagcagtatctagatatgtcagtttcttatatatagctttgaataagtgtttctgctttggaagaagctctacctatctgatacatctgtaaatgtggcaagttaaagattaccatggtcaatacagtctttctccatctttggtcttattaccctcaccctatgtcaagtgctttatctcttttggagaagggagcctgagtttactgaggactcaatgtgcttgctatcaatgcctactcacttaaaagacatttattattacttcatagacaaaatttattgattaataaaatatctgaaatgaataaggggcattagagaagacagttctgattcaaatttatttttccccttattttctgtaaatatattttaccttattaaatgtgtgtgagtacataacaatgagaaagagaatgaatgagaaaatgtaggcacacactctctcagaataaaatcttgctcttgtgtgtgattttgttctgatgccagctatctgggtttgaaaaaaaagtttttagtgccttgttaattatgtgttcaccattattacataagtaattaccttatgtaataatattaatgatattaagctccattcaataagagaactgtaatcctcaattgcacagacatcctcgcctttagatatttattcaaaatttagagaaaaagaaagatacatagaagaattagatatttgatctttgtaaggatttccaaaaaactttttgaccaatttcagccaacattagtgaaacataatcagtgatataacattgcatggtattaacattgtttcaggatcatgagaaagctctttctgtatcagaaatgcatacctttaaatggaatcccagcactttgggaggccgaggtgggcagatcacgaggtcaggagatggagaccacggtgaaaccccgtctctactaaaaatacagaaaattagctgggcgcagtggcgggcgcctgtagtcccagctactcgggaggctgaggcaggagaatggcctgaacccgggaggcggagcttgcagtgagcggagatcacgccacagcactccagcctgggcgacagagtgagactccgtctcaaaaaaaaaaaaaaaaaaaaaagtttctaaccttgaccttagccatattaattttaggagttcaagaggacacaccaaaaaccatctaatccaagtttttaccaaaagctggaatgtctcctgagatcttcatcagacatttgtccaggctctgcctgaatacctcagaaacaaaaagttcatcatctagtaaagtgtaagcattgtggtgttggtgaacactaattccgcaggttttttttctgcttccaatgcatcagctctcttttcccaatggcatctcctggagacaagcaaagtgatcacatcttcaatcatctgaaacattccaaatttcctgcagctgcttctccttaagtgtttctccttaacacgttattgagattaggtgccctcctggttgcccttctgggtggatattctcatccagctctttccatagtttaaaatatctccataactttgtgtcatgccaatgcttcctcacttgcaaggcactccagaaagtaccacagtttggtttctcctttgacctaaattctcctgaagtgtgtctccatggggmtattgatggtctcctgggcaccaagccctgaatatattagtctctctgcagcatttgacctggttggctgtttgaggctctttcttcttttggggtcctgaaacctctttctgcttcttctcaggctcttctttgagttcactatttaaagcccagagttggcattttccaaggtagtatctgtcagcttttcatacagtgcacatacttactgagtgattttatatgctcttatgtattattatccatatttagataattcacaaatacataatcaccaatccaggtctctcctaacttttacaattaagttgccccatgaacttccctagcttaggaccttgtcacttcctactcattttactacaacagtctcaggactggtcttaggtgcaattcatgtattcccagcagctaggctaagctttctgaaacaaatattaataattatcctgaatcaaagacttcagtgactcccctttgcccaccaaatccttttcaacctccttagttgtttagtccatagactttttatgacttatttcaggttatgtctccaatatcatgtaaaaccactttccatcttaaactctaaagttatagtcatagagaaccagcctctgtgtcctgaacacttggtgctctttctcctgctctgagccctaggctgctgcttctgcctgaaactcctgacattccctctctcccctctcttcacttgactacctcctgtacagctcagagacaccactcctctatcccatggcttactcttccaaagagttgagttaagtgcatctcctgtggacttgtggagctcctgtgcacggtgcacctctctaccttagcacttcttacactgtattatgatcattaatgtacagtcagccctctgtatccatggattccacatccgtggattcaaccaaacttgatcaaaaatatttgggaaaaaaaaaaacaaaaaatagcaatacaatactaaaatatgatacaaatttcaaaacaatataaagcgatttatatagcatttacattatgttgggtcttataagtaatctagagatgatttaaagtatacaggaggatattggtaggttatatgcaaatattgtgcaattttatatcagagatttgagcatcctcaggtatcttcgggaagccctggaacaaatcccctgtggatactgaaggatgactgtacatgtctgtccaccaccaaaccatgagtaacttgagggaagggctatcttttctcataaccccagtacttatgaaaatgactctggcacttgaatgtatgccttaatattcatttattcattcagtgaacactttttgaatatccatctgctgtggttttagtatgtcccacagaatttgtgtgttggaaacttaattccctatgtaatggtgttgggaagtggggacttttgggaggtgtttgggtcattaagagaagctgaatggattaatgccactatgaaaagggcttgcaggagtggattctctcattcttctgctatgtgagaacacaacattttgtcctctcttgcccttccaccttctgccacgtgagaacgcagcaagaaggcccacaccagacgccacagtcttgatcctaaaattcccagtttccaaaactgtaagaaataaatttccattcattataaattacccagtctgagattctctgttatagcaccacaaaatggacaaaaatactattgtctacaaagggctacaatagatgttactgattacatgaaaatgaactggctcttatgaaacttactaacaattaaacaatgtctttattccctttaaatgttatttcattttttattttaaaatgtgggatcattttaaattttcatcttgctataaaccatattagctagttttcctgtctatgtcctatggagatttgctctttagaacatactttgggttgcaaagtgtgcacttagtgccaacatttatctcctttcatcctcagagtaactctataatgtccgtgttgttattctcttacgtgtgaaaaaacagaaatgtgcagactgtgtcaaagcagagtttcaaattcaagrccctagagctttacattaagctgatctagaagctctttttgcctttatttaaggaactgataacaaatgctgaatgargaggagctgaactctgagcccccaggactgacatttcagatctttttcctggtggcaccatccatttatcagacattcttatcaatcttcccagtaggcagcccacctttcttcatcctgtctagacattacaaagagctcactaatgccttgcagaaatcactctctgccatctccatggcattgcctgtatctacaaatcgaataccccatcaaatgggggaaatggaactagatgacccgaggttcagtccctgcttaatactgagcctcataaatatgtgtcagactaatgactgacttgactttcttccctattctttccattacagccactaataacttgcgggtgcataaatactgagtgtaattaccctttaagtccttaggtgtgctacattactgttagtatgaatacaaaacaaaaactctcttcagagattggatggcttccttgcatgaaatgcacatagttgtgtgtctgtttttatcagccttctgcttgctccaaagaaaagatttctgaaatcatgcactccccaactagtagttgtactaagtggctgggcaagcgggactgaacccaactgtgatgagacttctttcatctccagagaaaaggagcatcaggcagccctaccctggatagggcctgagaatgagagcccatttgacaggggacagaaagagtacctggtgtacctagaaagagactgagtagggtcgactccccggaattgggcactgttaggttcccagccccagttttccactgctgcttgatagtgcaatcaggagtaacagtgggaaacaaattaaataatagattgtttacaacatatttttagcagttttcccccacaagggttaatggctgattgcttaaaaaaaaaatagtaacacaactcttgtacataaaaccatctcctttttattttttaaaactttcttaggaggatatgacagtaccaatacaagtggcacctagtaattgtcaagttgtaattttagaaataaaaaatgtgttcccaatgagcctgtgttttgaaagaaaaatttagcatcaactctgatataccatctggcattcaaatcacattaaaaaaaattcatagtagtgtgaattctcctaggacaaggctggtgaggaacaggagactgaattgaacaaccttgaagaaaataaaaccccttttggcattaccggtttctgtgtgatcttctctgttagtactccaattttagtatgatcttgatcagaaaggcataatttatagacaaaatttcaggatgggactttagttagtgtctgtaccatgacatctttaaagaagttctgaattctccatttaaacctaatggtttattgattattctgaaattccaaaaaagagcaatagattgaaccttttgtcttcctcagcctgcactagtaaaagcagtagccactgcatttggtccacttcacacttttcaaagctgattcatactgtgtttagtgtgtcttcgaaaagaccacttttggcatggtaattagattctaaaaatgtaattacaatagaaacaacaacaaccacaaaaaaccttgtggtttaatctctccatatttatgtaatcattttaagatagtacataagtatggaacttatagaaacataccatttataattgtgctgcatttcagtgactactgaggacaaagaattcttatataataagttgttgtggctttttggaaccccagagcttatgtaatcattattataaaagaaatctatcatttttgtttttcatttgaagtacaatactattatataacccattggatatttgtgctaaatttaaaactgtggtaaatgaaaaatatttaactttgatttcaaagcccataggaagatagtttggaaaattcaaaatttatttcctttaactttcctgagttcagctctatctgtcccttaggtaatgattatgaagtatgagctttgtacttgtagagctcacattagtgagcaagtgggttctggaaattacttttctttacagtcttcctgaggagatagataacaagtattaatgtcctttagctgaaacaaactaaaacacaagttatgattgactgaaggttttatcatctgtgatttacaaggaaaccaacctcttggaatgacttctcctyagcctcccagatacgctggaagaagttgagaatatttggtgaattaattctataaatgcttgctcactgactggggccatttaaaaataatgaggaggaagataattggtgggatgtctttaaattttatgtcttgaatttttttaaaatccagttatttgttcttgtagaacatataatattttcatgtttcttggatgaaccaactgtacacgttgctgatttggaagcagttgcagcatcatttttcctacccaaggaaaaatttataaatagtactgatcagtatccaatgtgtattatttttttagctgtgactgaattgtctttagtgggtgtatttttggtgtaaaactacaatgttgtattatgatatcttctatgaaatagattttaaaatatgtatattctagatggaaatgtaaaggataacattagaaaaatgcagtaaatggttaaatatattcactcatccattcaaatattccatcagtcagcattcatcaagggcctactatgtgtcaggcactgttccaataagaatgtgttgaaaatgttctctgtcccaggaaccatgtgaggctttccaaatacaaagttcataaagcacagctgtgttcttcgggagytacagatctgtgctattgtgggaagcagagatgagtacttagcagctgattaggtcaggaaaaagtcccaaggttatgaggcaatggtcctcataactattggactgaattacttttattcgattcttaggcacagactatatctaacatctaatcatttctgggaatggcaacaaaggcaagcaggtgagaaattttggaaaagagtcagtatagagatagcataaatgccttcttcatgaaacctttagtagtcagattggtcaaagataatcactgtacctcacaaagctcatggatctggtatcatacatctatatctacatgactctctgtctgctgcctatgcacagcagctcagagctccaagagcaaggattccaagagacagtaagtggaaggtacaagtctcttatgttcttatgtcctttttcattagaaaaaggaaagatagcaaataatttattttttggagccctctttaaaatgttgctgtctgcctggctagcatgccaatatactagtgatatttttagaaccacatgaaaatccaaatataatataatcgcagttcataaaataaaatgtaccattgcattgattttctgatttgcactgtgtagaaacttacccagtgaattttgccattcaataattgccctttggttatctctcctaaagagtgtattttatgatacactattaatggaggaaaagattactctatcaaatgctgtttacctgttgatcacactgctgctttacattacttaacaaatatttttgcatagtcctaatggattaattatgcatgtatattctatgtattatacattgatagagatagctatagtaattcctgactttcttaagctacacaggaataaaactcatttctttacacttttagcgtatatgcgagtggatatgtgtgtggtaaaataacatcttcacacattgctagtttcagtaagataaaatttcaaggacgattccctcttaagtttctaggtggtagaagataagatgctggacaaaggggacattctcatcttactacagtgtatcacacaattaggcactttatgggggattttatgtcttctgctaaaatagccagcattggacaatttcagaaataggatattggaatgatcagaccattggtcggttctgctatggtaacttgtttgcctaaagagggtgatgtttgtttgatttgaatacatgtcagaaaatagagagtgttctttgtttcaggcttcttgaatcatcccgtgccagaaacagccataccacaagatttctagcaagtcaaaatgcttctttttcaccttctgtgataagagattatttaacaatgtcagaagatatttgtaatatgttacatggattaaacaacaggttataaaacastatgtacattataaattatagcccttttatgttttacacacagaaaaagacttcatgtggtacagttgtggttatgtctccagcacaatctctggtgtagttcaaagagcccagttttaaatcccagtttttccacttactggagatgtgatccttgaccctaagcaagctactaaacatttctgggccctaatttcctcatttgcgaaatggagacaatgatagggtttgtaaactaatgattaaatatatataaataattaggagagtgactggtacagagtaagtgctcaatgttattaaaattatattactgccatgaatgcataatattaatagtacttatctttggataattaccttaaaagtgatttttattttcttatttataattgtctgtattttctaaattgtctaaaatgcacttgaataaaggttatgttattcaaataagaagaaaaaaggcgagtacactaatttatacaagacaccttcaagcacaacttcagttatctttaacatctaaagagaaactactctgtaccattctaatttttatttcatttttacctttcttcttaatgcattaaaattggaatgttactaagttactaacatctgaacagctccacaaaagtaagattagcagacaaaaatgcgagttgtttttttcttaaaatattattcatgataaatattaagacagacttttatcatttgttgtaacttcataggtttctttttaaaattaattacttatttcrttctaatgtaaaatgaaccacaagaaaatgagaaaagcaaaattgtatgcttgagggaaaaaaatttaataagtcactggtaattcaatgctagtttgtaaaagggaaggatagattttaacaattttcttatacatttaattggaaagaaaaacaaggttctttgtggtacaacataaacatacttactttctctttttaatttgttaagcaaattaatcaatataatatgatatatgtggctaataaccatttaaatcgtttttaaattttatattggcaagaacacttaacatgagatctacccttttaacaaatttttaaatgtacaatgcattattgttgactaagcataatgctgaaagcacatctctacaacttattgatcttgctggactaaaactttatgcccattgattagcaatttcccattttttcctcccctcagccgctgataatcaccattccagagtatatgaatttgaccattttattaaatttattaattttttgataaaatggataattttttgataatcaccattccagagtatatgaatttgaccattttattaatttttttcttaaaaatacttttcttattttcttatcaaaaacagcattacatgttaattatggaaattttattgaaaagtagacaccgggaaaggagtaagtatcacttgttatccaacctctagagattatggcattagacagtttttgcatatatcttttcattatctttccatacgtgtatatttcgattttttttaataaatgggatcagactgcatgtggcattttggaacctattttgttcatttagtgatgtctttccaagtcattagcaattgacttcaccactatttgcgatggcttcatgaaggttcataattaaatgtactataatttttttaaattttattttattttaagttccaggatacatgtgcaggatgtgcaagtttgttacataggtaaacatgtggtttgctgcacctatcaacccatcacctaggtattaagccctccatgcatagctatttatcctgatgctcttcctcccaccgscctccccaccctgacaggcccaagtgtgtgttgttcccctcgctgtggaatttgaccattttatatacctcatatgagtggaatcatgcagtatttatctttctgtgattggctaatttcacttagcacaatgtcttcaaggttcattcatgttgacacatatggcagaaattttcttcatttttaaggctgcatagtatttcactggacgtatacaccacatttatttaaatttaacttttaagttcaagggtacatgtgcagatttgttatataggtaaacttgtttcataggggtgtgttgtatagattattttgtcacccaggtagcaagcttactgcccattagttatttttctgatcctctccctcctcccaccctccatcctccaataggccmcagtgtatgttgctcccttctgtgtgtccatgtgttctcatcattcagctcccacttataagtgaaaacatgcatataccacatttttaatacattcatttgttgacgacagtttaggtaatttccacattttggctattgtgataatgctgcagtgaacatccaatgctaatattcttcaagatcctgatttcaattcttttggataaatgcctagcagtaagattcagcattcagatatttactagctaatctattttagtttgtaaaaatggcatttgcttgaaaatagcgtacaaatagaatatcctagccccttagataatgggtcatattatatagacaaatgagctgaagatcaatccagattttagtgtgatggatattttctcagtcttttttctcctgatttaattttattaagtttaataattttcttctcagatttagtactgttctactctgatctatatgtatatattcacatatatatgagtgtgtgtggtgtgcatgtgtgtgttataaggagcagcttggagattcactttttacctctacaatataactattatgactgtaaactcttatgttgtaattttactttatgccgcttattatggaaaacaatataaatatttgtaacactaatattaaagaaggatttagctcttcttttccctgggttccatggtcatagatccaaattttaggaggtggaagattccattccccttgggttgtggttgaggcaatgcatagtagagagtggtcataaggttttctgtgccaagttgtgactaaggctagatcttgtggctgagacaagcttctcaaccttcagcacaattacttgagaataaaagatttcataactagtttctcaccatgaaaaggaactcacacaaaaaaagtttaaaaaaatagatgactgtaacaactctccaactagcacaaaaatacattcttggtaaaataatgtctcgatatgaaagcctttgggtttgtacattgtgaatgggtttgtgaatgaagaatggatttttaatgtgaaaaatgaagccaaaatagacttagtattaaactttaaaatactttaatggcttttaagttcccctataaggtgggccaagcattttctgagtaagggcatatgagtatataatcattttatcatctttaaaggaaggtgtatttccttttttccttaatgttgaacatttaagattagattcctgatcaattacaaggcacacatataattaacatccagtgactagacctacgtggaatggagataaactctgtctgataaaattgggtgactccctcatcagtttttcctgcctcagatatatgcaatgttatttctaataagttcttcctctctgtatttcctgcctaaataatccacctgcttctgaaaaagatttggggttctttttgcaaatgtatcatttttttgatatcctgaatcagtttctaatagtatttctcagcacaggcaataaatttcacaaatgctctgtttattaactagaagaattgcacatctcattaggaattttcaaggaacatatttttcttccctgtcgttttcttttttcctaaaagaacagattcactgtgtaggaatggaagataatttgactgtctgcattgtgaacttggtaacttatttttgtaagcaaacattggagaaaaacttccaaaacatttttatttaactgagtgaattggaatgtaaactaaagatgatgtttattttatgacatgaaaaaataataatagcaaaaatatgttaatttatattactttataattttgaaaataaactttgctgaatataatcctatgtgatttttgtagtcttgatagcatttatattgttactaagctgccaagaggtcttacaggttattaatgacaaaccaagcttagaagttatgattactgtcagtgcaatgatatatatcatcttgatggtgattttggttataaataaatcataatgacagctcaaaacctaaaaaattagaataaaggaaaaccaaggttggtattttaagcaaatgatgaaaaacctaatcaaagactgaaatctagactttggtatttaaacagcattcattcaactaaaaatttaaaaataattttaaaattaaaaaatggtattcttttattttttcctgccctctctactgtctttctctccctgtagcttcaacaaaaaatatcaagaattctcttattgattctatattaggagtcaaaccaaatttatagcttggatttgaaagaaaaatgtttagaagtcctggaactctgactaccaaagtatataaattatgtcacttctagtaaaaaaactgtttagggaaaaaagcttttttctacgtgagaaactttagttgagagattattttgcatgtgacttcacatactttctgtaagaaattagctacactaaaatccatgatttattgttgtctagctatgtaaaagcttaccaaagtggtccttggttcctgcctttaataatggaagaaaggggagggagaaaggataggaggaggaaaaagggagacagagaaatcaaatttgtggaaaaagaacagttccaagtgcacctcagtgggccaaacagagcattcaatacagtgtattaacatgggcttgaataattcaaactttcaaaccacaggaagaggctttccagggggaggaaaagtcaccgtaattaaagcttcgctggcacatggaggcagctgtatcctccgacagaccgagaaaattggacatggcctaatagcctaagagaacggggatgctgtggggtagcattgtttgagaagtgttaggtttattttggcgttctccaattataaagtcaattctctggataccagcttcttttacatattaatggtctaacccttggcatatggcaagaatgcaggattcaactcagactgcttgaaaaaggaatagtgagttcaaagatgcaaagatgccagcggctgcatgttacatttttgagaggtagccttcaaagtaaacaagaaaaatgggattttttatgttaatatgtgattcattttagaaagaatgtttcttcgcttagtctctccacataagatacttacaggtttccaaatattatatacatttattatacatacccataaactcatacatacacatacagtttctgagttttatttaaagattatttcagtatatactttcttttccatagcaaattgaaacgcctacctcaactcgctgctttaaagtgttcaaaaatcccagttgtttttgattcatccaaatgccaagactcatcagcaccttgctttttttgtaaaaggtgcttatttttcccctcgagtgcacttcctacttgaaatttcctgccgtctcccaatgtcttctgcaaggatgttaattgtcatgcgtgttttctggggattgaatacagcaaagggtttatctgaaataaacaatgcagtgtgttcctggggcccttgccagactgagaaaagctaaaacatattgcggtgttcccttggggatttcacaccatgcctggactaaggaaggtggaaaaaagagggtagcagcaatatgtcctacttcctctttttcttcttgacagcagagtttaaaagcttacctctctctccaagtttgatttcccacttcctcactatccctaacatcagtgtagtggtgagctgttttccatgtggccacaggkgattggaaaataggcttggaaaacaaggaatccgaagtctacatctccagggagaaaagaattttattgttgtcaagctatgtaaaagcttaccaaaaagcatttgtaaccttttaaagaaacttttcactacatttaggacaacctttaaaactatcaggacaaaagtgtgttatacagaaccatcattccaagaattagatctgacactatacaactacactggcatactttgtaaagtacagctcatttaaaatcagttattttaattgaagattcttgttacatgttattatgtaagttatactacggactaaggatgcggtaacatgaagtaagtgaaacactgagatacattggaagggatcagagatggagatatggtaygttatttggggaaatggtctaccatatcctagaatatatcttcttattctgaattccaaaattaaatggtatcgaaactcttactttcatgctcaaaatctgcttctaataagaacttggccaaacttataaggcttatctttcttataagccttacttacaaggctactatcttatgttaaagaagcagaagtgtgtgccctcaaaaggtaccacaaacccattgacgtgaagcttacatttacagattgcaatgttagttcgatgatgatttgaggttttatgaatttattacttatttattacttcagctctgtctacagctgaaggcgccctactttggttttaatgctgaatcgtgaataagcaggtcagattaccttcaaaggcatacaaattgaaatcagatctctgaaggctcatccaaaggagaagagatgaagtctcttatttactgcctttagaaatatcttacttttgaatggggaaaataattgtactgaaatcaactttaaatacaccatttaygatgtgtaaggcagcaaaatgtagtcagaagtaacttaatagtttaacattcagtaaccatcgttatgccactggaatgagtctttgacgaactggatttggaataactcctgctggcccagattctctttcccagcaatgtgtccctctgcctgttggaagagggygtacctcctgaatcttagcctggggccagagccctcatcttacctgttgaaaggctatgtgatgctgacccacagtctcctttcaggctcagctcactaggcccctgttaaatctttcttaactttcatggctgccatctcctgccctgtatcaccccctgtatcctggggtagagtatcccattgtgctcaggagcaagtgaaatcaccctgaacaattttaccttttccacattctttgtgttttctttccctctgcctggaataccttttttccaacatcttcccccacacctcatcccccactctctcacacatctttatcctggaaaactctcacttttttcaggtatcacttagatatcacttctttgggaagccctcccaggctggcttggcctcccttcctgtatcctttcctagttccagtaccatgtaatttagctttggtcccatttatcattctgaattagaattacctgcccatttctgatctgtatgggaaccttcctagctactccataatattggaggtcagggagcaggattcaccatgatgtttctaccacttgtcttagtgcttctacatagtaatatctcagtaaatatttgttgaatgaatgagcacactgtttggagccagcttgtccaaaatctcccaacttctggaaggtagcccttcctctcccaccagaccactgccctgctgcaagagacatgtcctatatctggtactcctacttctgctccttcctttcaaggtaaatccagccataccggggccatgtcctgaccataatgaggaggttttcaggaagcaataaaatggggacagccttcaggagctaatagaaatgtggggactgtccagaatagagaayacccccatttggcatttttatcatttagatctcactgcaattgcaacaaaaatctgggacagctttgttagatgccatcaccgcatggtctagatttagaactgtgtataacacataaagcacagattccacctatttttctctaaatagaaagaacaggttataaagttgaaattttgcttctgtggcagaaccccatggtgcaatttactgctccttatttctcttgtactatattaagaacaaacacgatttatagggcatttcctgaagcagcacttttacattttagtaacattgcatatacttgcttttgcttgtacagacagaaatacattcctgctttcaattcaatgctgataaacacacaagcacacacatctaaatattggcatagatgctgatttttttaaaaaaatacgaacttggaatattcctgaagttttaacatacttaagtagctccagatttctttgtctaattgccaactaaagaaattgactacttgttgccattaaaggttgattagcaatcctatagtttactgcctatttatctaagtggaattgatgcagtaaagtagaaaaagagtgaataaaaggagttttcttcttgaagtgcttgattctttaccaagcttgggagcttttcctgagtggtgacttactgataaactgattgttagctgcattctgtcgtttgctgtggagaacacatttccatctggttttcgaaaggaatcctttgagatctacatgtgtgcatgaaattatatgcagagaaaaaggtatgttcccctagccttcgtcttttttaatataaattcactcagaggttcttatcactccctgtctgtttaatttctacttcagcagtgtgcttcctctcacccaacctgccctcagcctttggctttctggaaattagtatgcagtaatcagaatgcagctgaccaaaaattaaaaccctggagatttattatgagttcatggtccctcactttactggacttttaaagaatactgaagtatcagtattttagaaataaatatgaaaagacctcacatttctcttaatttctaaattctcctccactttcattttattttgttggacttcactatttatttgggagaaatttttctgttctttttgactctaaccttctaagaattgttaaatttgcaagcaaaattatgcagaaaatgtaaccttaagrcagaaaaattaataataatgacaagaaaaagaataatgctttaaattgcctacattcaaattcaagaagtagaagaattgaacagcaaggatttctattgattttgacatttattttttattacagcatggtgttcatttatggagctatataaatcgcataagaataattgaagagcacatgtaaacctgctcctttgccccttttgggtttcctccctcatgacttaacccgaatgtcaggaagcagctgtcagtcatgagtggcagtgtttaatcacctattgtttctcccactaacctgccccctcaaagcccatcgcaggtggccttcatcaaaggtaagtaatgagaaccacagagctttgtcatcagtgataattagggtgaccatttcatgtttggaaaattttaacatacattttaaaatgacagagtaaaaaaaatagtcatctttttgttcctttgtaattacaactataacctcgacaaggcaacctgcaatgagagcattyttgctcaagaagggatataagaataactctctggagctaactcttttaaaacgaccttgaatartatctgcatatggcttttcccgaagttagtgaaatttccacatgtgtactcaagtacggagcagtttagaatacattcccttatcgggaactatttccccttccctttgcctatgaaataaatgttttgtgcaagaagcattataacccatgaatgtatccattaactccagagatacaaatggaatgggaaaaaggaatggggaaaaagttaatatttgcatttatacaaaaaaatttatgactgttataattactgttactgtctgtataacttctgttgtaagcagcagtgtattaggttggtgcaaaagtaattgcggtttttgccattaaaagtaatgtcaaaaaccgcaattacttttgcaccaacctaatatttcctcttgtaaagaagcaaaagaaatataatttattttttccttttcctagttctgcttattacttatccaccatgggcagacaataccatattgatactctaactcagaagagccactcttgggttacagaatttaaacaagaattaaatcaagaattaaaaaaaaaaacagctttaataatgtatcatccttatagaggaggaagtgattctgcaaatatttgaaacgttaasctgaaaaaccatgaatcttgtggtatgtggtcttataaacaaaacaaacaaaaaccccaaaatactctgactatagaatttccattgaggtgagagaaagtcagactggggaaagggtaaagctgaaaagtcatattgatgttcattctttgccaaatgcaccactcccttcctgttgtagcttcctaatgcagccagatgatcataatatcttccaacaagatctaaactaatcccatgctgaccatcgttccattatttccttacataaatacaaggatataggaaagagcaaatattttatgcaaggtaggttatgtggatcaagtaggaaaaaaggaacaaatgcatatgcttgaaaaataggccttttgtgccaattagaccccaattgttgctgtagaaactgtcctatattttataaaatatgagttaaagagtagaaaattgaaaatggagtgctgagtcatttaatatatttcatctggaaactttcaccaaaatttgagagtttttttgtttttttgttttktttttttcccacactctcatagcttttggagatttagctgtagcaggtcatgggctaatttatgtaaatggaatttgtactcatacaaaaaaatgctttttgctttttaatagctgatcagaagaktactcttattatgtgtaaaagcatgagttacccattgattacaaagatactgaatacttattcacttacgatgccaatatttaaatgttaattcatttaaccaataaatatataaataacattttatgtgcatggcatatgaagtattataagcacattcagagcaaggtattaattattagcatgtcttttacagcgtagtactctaggatgtccaatgawctgagaaccccatagrtcaatgattctaatcccagctctctcaccttgagagtcacttaatttatttaaactttggtgttattaaagaactaacataagcatagtaaagggtttccaatttccccccttgccttctatgtgccttttatttggggtggggtgggagggcagctagccacctctccagccccataaattttgaccagcctataaacagctgtcagaaaataattttcgggtggtgtttgagattgtgctaataacctcaggcaaggggcatggaaatgggaaaggggcccaacctaaatttccattaaagttgaaaactgatgcctaagcccaaactacgaggactttttcctatcacagaagtcagcaaactatatagcctgtgggccaaagacctgcaccaggttttgtacatctcagaattgagaatggtttttatacttttaaatggatggggaaaaaattaaaaagaataatatattgtgatgtgtgaatattatataacatttaaatttcagtacctgtaaataacgttttgtcagaacacagccatacctattcatgtgctgtggatggctgctttcatgctataatggcagagttgaagagttgctgcagagtccaaatggtcaaataacctaaaacatttgctatctggccttttacagaaagtttcctgatccctaccctatgctataaaaaccctaaccttgttttagttgggagccacctggtcatcatgtactccctgatgcacatgtgctgacaaaatcctccatgtgagtcacttaaatcattccctttttcacagtttctgtatgtattgtaagcataaaatatatacaagaaggtgttaatgtaaagtttagtaacactgtgtgaagcactaaagagaatgcttggcacaaagggacaatgttagctactactggtatttagttgtataattagttatatgtttattgacttaataaacatatattatgttctttttatttatagtttatagtcagggaactagtaggtgctaaggagcatgaagatgactctgacacattctcagactccaaggtacttaaactctggaacatacctagataacaacaaatgcaaagtagaatattgagtcataaagaattgtagataaagtattatgaaacttagaaagcaagagagggggagaagggaagtcagggaaggcctctaatcccagctctgtcaccgtgtatagtcaggtgtatagttgtgtagttgtatacatagttgtatagtcagggaactagtagaagggaaatcagggaaggyctctaatcccagctctgtcaccttgtatagtcaggtgtatagttgtatacatagttgtatagtcagggaactagtaggtgctaacgagcacaaagatgactctgacacattctcagactccgacacattctcagactccaaggtacttaaactctagaacatacccagataaatatttgagctgatcttgtccttcaccttgctgcaaccactcttaaagccataaagtcttcaagctttctcatgtccaatacctgaatatcctttataatctcaatttcaagtactgcatccttaactgccacttgtctttccatatggctccctttattattccaatttcagaaatttctagaggcctgtgatccattgattctttatcttttcactgtcacttactcttttatctttactttactcctaccagcttaagagtgtcattcaaattagtttcttccttataacctcagttccatccataactaaacacaactcctagtttatgtgaggcctgctcccttgcagaccaacctttctagagaaaaacacacaaccgtgctgactattatcactttacattggtgatcactaacttcaagggatccttagtgctgcccagaagccatggtatatttcctgagtccgtcatcagcctctcttctcaaaactccacatatcttctctattgtctctctccgctgatctcctttcctcttatttcattaaaaatagaagcatcagaagagarcttccaaagatttcaccagcagaaccatttggccccaagcctttgtgcctgcattctctgtcttctcctcattactctgggtgaaccacccatgcttctacctgaggccaccatgttgtcactagatcccattcccttgtacttacccatgagaactactccaccagttctcccctcttcatgttacaccatcaaaatgtccctctctactagatctttcccacatatgtaaacatggttatttcttccatctataatttctttcttctttgccctacttctcccttcagctacaccccaatttttcttttgccttttagagtagaacttttctaaacagctgtgaggactctatctccagtgcctcttctcccctctcttggaccaccctccccagtcaggctttcaccccacaactcccctgaaactgctctttcagcatcacccataactacatcttgcacatacagaggtcagttctcattcctcatccaatttgacctattggcatttgacacaatcagttactccatttttcttgaaacactttttgtttgcacttgactttcaggaggccatacccctctaggttttcactttcctaacgggctgctctttctctgcatcttgtttatttctcctcatgtccctaacctcttagagtgtcataaggctcagacgctggatgtcttttctttcctcttctcactcctttaatgatttaatcagtcttatggccttaaataccatcaataggctgataattttcacctggacctcaccctagcgctccaggctcagatgcaacagattatatcacttagattctaataagcatctcaaatttaaagatccaaaacaaatcccaatttttcagttaattctcttccagcaccttttcccatctcagtagatggtaatagtgtccttacaattgcttaggacaaaagggtttttctctcatactttacatctaattcatcaggattaccttgttggctccatattcaaatttgaccacttacccccttctccaccattatcactctttcttttgccacaataatctctcaatggcattatttcatatctttctttgtcctttcctctgcccttgttccctaaagttaattttcaacacagccagcatgatccttttaaaattaaatttaatcgtgtcactccttaaaatcctccaatggctggccattttactcagagtaaaagtagaatcctggctgtgacttgcaaggctgctgtcattccttccccctctctcgtatgtctctgaatgtatcttctgctactcttacttcactccactctagtcagacactgtccactttgtgtcctcaaatatttacactttaaggcctttgcaccggctgatgcctggcattttcttccctctgttatctgcatgccttgttccttcacctcattgatcaaatgtcatctcagtaattgccctgccctgcatgtgttggtagagagaaaggaatttgtagaggaatcccaggggtctttgtggaggtcccacgtggatcctgggctgaaggctgggctcagggagaactctcctgtggcttagcagtaagtgactatgtactatggagttgaaaatggaacagcagcactggaagactttggtgttccatcttaggcaggttaacatcttcgcaccttgtaatcacctccaacatctaatgcaacattagaaaggctatgccttaggtttagtaccatacccttctctgcaaagcttaaaaacatgtgtgtcaagattccttagaaggggagataatctttcaawgttaagtcttgccctgttagaggggattgagagacaccttgacctttttacacatctgtcctagacaatgtcaaggtgatcatccagtaattaactgcctactagaataaaatgaacactcctcaaagggagaacacagactccagaacctttacaacatatcgtctaccaaatctaggattcaatccaaaattctgtacatgtaaagacataggaaaatgtggctaacaataatggaaaagagttaatagaaggtgactcttaggtgacccagaagtaggatttagcagacagactttaaagagcctatgataaatatgttcaaaaaattaaataaatatatgttcaaagaagtgtagcattaggatatggttgatacagtggctcaccagtgtcatccactatccatccaacactgtcatttttctgctttgctaatatattgagaacatatttatagcatgccaggaaagatggaagatttgagaaaaagaaggaggacttagtgggccacggtcctcctgcagacaggtggcaatcatagagtggaaaatgtagaatttgttttggaaaggagaggagagaattcttcctctgaagtgaaagagaaggagaaaatgaaaatatttatcttaatacaaaggcttatcttaaatatatagcttaaggcagaaagaatactaattgggatgtcatattgaatgaattcaatcatgtgggaggcaatgaggggataaaattgaggaaaatttttaaaaaataggatacaattgtaagggaagagatactgagtcagcaataaataaactagatttttgctttaatttgaagttgtaactttcttcttaggtatagaatatatatttctgaaacataagcctccccagagcctggattaattatatttctaatttattagaaatataatttctgttcatccagggctagattatatttcttaagagctgtttgatttctactctaaatgaatttgtcaattcatttatttcatatatacataatctcacttactgtgtttaagaatctccaaaaattataaaagagaaacaggaattggtagagattagtaagaagaaagaaaagaaaccagggagtgggcctgatgagatggcaaaatttggtctccatgatcaattgagaaacaacatacaccagaactgagcagcagaaatcagcaaaggcaactggaagccaggttttaactactacaaagaactttgtaacaattagacctgtccaagtggactttctcctattattagttaatggaaatactcaagcaacagatagacatcatgtctctgtgttactttagaggaaatttatattgtgaatggtatttaatagacagcctctaagatcccctctgattctacgattctatgataacctattataataagtctacttggggcatttttaaaaaaaaaacatggaacctaaacaaaattatattgatttaatttcttttttctccacttttctgtgataattgttaatctgcaccacccatttttggtaatattgctttttatatggctaatcccaacccyttttattttttgtaatgagaacaagctttctgaattcatattcagtgataaaaatgttatgacagaatcataggcttatcaacttagagctggacaaagccttaaaactcacacaggcagacctccacatttttcaggatgaaaaagtaagtcctagagaggctaagtgtgctacccaagttcacgctgcatagaacctccctgcatcccattccagagctgtctctacagcatatgctgcctcctgcccatttaagtcaatttaaatgaagctttctgcagtgtttttatttaaaatatgtaatttatttcagtactttaggatcatgtcagatgactaggagcatgcatcaatttgtaccaaaatgaaattttataatgcagtctaaaaatgcaatttattttagcagtttcctcttatacccggtttaaagattttttaatggattttttttaaaagttccttcttatattttcactgaaatggaaatcaatgaaatcataatactttgaaataatggtgtggatggaatgttttcatttgcaatagactaattaaattacttattttgtcattataacttgcctttatattagcaaaattggcagtctgcctcattaagctgcatttgagaagggcatcttcttttttctcatttactaattcagaatacaagaattctcagcatcatatcaacttttcctgacatcgtccacagaccactctggtgccagacgacgtggtgccaccgcagctaatctgattaaagctcaaaagctaaatagtatctggtaatgctagatcaatactagcactggaagggtcaatttgagcataagcccaatgttttctcctcccattgactgatcatggaggcatagatgatggccaaaagtgactgattactggataaatattaaatccattatcaagccagtgaaaggctgtgtgaaaatgtgagtcactctagccctgagggtcttggttttgtcatctataaactgaggggattggactatatgatctccaaggatcttctagtctaaaattatattaatgaacctacaatagcccctggggtgtgctgataaccagaaattgtatgggcagccgccaaacagcacacatagccaaatggactcttgtatatttcattattatttaatctcctttctaaggtttctacccttgcttcaatcaccagagaaaattgagtatgttgggaatgagcttatgatgccatatggtggaactgaagggggaaatggctgttgttttctaaatacactgagtgcagtggttcttcaaattttatggttaaccctttgagaatatgatgagaactataaattgtcccttcccagaaaattacacaactattcaaattttgctttagcttctagagctacctgaatctgtctccctttaaatatccctggtttcatgcatggtcttacatatggtggggttttcatagaggtaccataatatgatagaaacaggatgagcactgaatcagatctccactctctgttacataaagctgtgtgatattaggtaagatggttaatcactgtgagtctgttttcttacccacaaaatggaaagataactccttcatcacaggattgtggggttatatgagataatatgtgtacattgcctaataccgtgcttgacacataggcattcaacaagtttgtttcttacttcttttcaaaaatgtgactagcttatactttaggtgaggttttagaaagcaactaatgaactgttttagaatcataaaatgttaagtgttggaaggtagcagtctaatagcccataacatccttaacccttatcataactttcgcaacttgagatattggagagctagcatgaggaatgggcagcatcttcagagtcccaccacctcctctctggcattcagtgaccttctgtggtcagctctgcctccaatgcagggctccatccagaccaggaatgacctcaagcaccagcctcctctcttgcacttgtcaaagcccatctatcctgtgtttccatccctctatgcctcactctctcacctactttgagttaaagtgctaacaatgaataataaaacactccttactgcatctcccttttaactgctgccttcagttcttgttatacaaagaaatgacgagctgcaagaaatggcctaactgttcatttctgaattgttgctaatctatcagctagctatgagtattccttctttcatattttgggaaaagaagaatgataattggtcagcgctcatactgtattacacatgtctcttcttgttgctgtgttaggatgaaaattaaaaaggaaacaggtttaaagtattgattataagaaatactaggtaagggccctcttaggaaatatatactgtttccatcctttgtagttattttctattcctcaaagtcaggaggaagagcaacaatggcagagttaaactgggcagatctgagctggctacccttttagctttagtgcttcttattccaagaataagaataccttctataccaaatctctaagagaactgagtaaacccgtatacctgatacatctacactgcattgtggaggagtggaaactgcrcaaatggtggcaatgaaagccatccaagaacttggggtgtagtatgagtgcctgagccacagacagacaaagccacaaggccagtgaaccagaggagggaagtcccctgcccaatcataggttgaggaagtgggcattcatggttgtttggcagaaagctcacgatgtatatgtggtgcacaaacttaatgttgcgaatgcatatctgtacacagggaaagatgataaattttgtaaatagattttttttgtaatcattaagtgtgtccatagatacttggatcatgagaactagaacaggggaggttaataataaaagtttttctaggaaagatatccaagaaagaagtctatattttctgaaactagtgacccggaattcgagaaagagtatactgatgtagatactgtacaaaaaccagattgcttgttctacctggcttctggatgccatggcccactctctcaggccctctggaattctaaagaccaactgcaacttggccaaattggctgtttggttggttctacttgttccctggattcagcaaattgttcctctgttcaaaatccctaccttataaataaagaagtaagtactccaactctagacgctagatttatgctaccccgattctaggaagggtgcttgtgccttgtgttctccatatctgattctctgctcagttctctgggatctgtcatctgcttcacccttcctcacctccaggcccagagcacttgggacaccctattcttaacatcctgcataatggtgggaagtggtaggtgctaagcacctcttatttttagctgtacattagcccttttattggtgcttcttgtcatggcaagttacaaacaaccccacctgaagattttcatctaacagattcyggcttcagtggaaattgatcccctttaaaatgggtaccttttcttattgaagcaagtagctagattattaatgcaaaaataattttatcacatagactcatttttatcayttccattcttatcattattaaattagcctttaataaatctttagttatttgatttttttcccatacctcctgatagtccaatgtgttttgtgtcacgattgccatttctgagattccctgtcaagtcagaagtgactatgttttgggcaaaggctggcatttttgtatgtgtgtgcagaggcaagacaataataagatgcaataaaatgtgagagccaagtgttctctgcagacatgaaaacaacaggtaccaaaaagtgtatcttgagggcaaccaaacatattttttgcaatcgaaactgaattttcccccaaatatatttgaactttgaactaatatttgagtactgagtatgaaccagaagcttagcttggccaaccactttaataatatcagaaataggtgttctgtaaactttttagtgcctcttgatcaataaaagttagagcaaacatattatttgcaaaaagctggtacttgtcacttaccacaagttcttggtgatatatatgtctatgatgaagaaaaatagtggcaaattattgttcttgaacctgcataagtattaatgttgttttctgttcttcgtaatttgatgtacttctgataatttttgaaaaataaacccacacattgcattttaaaataaaaagtgacaatcagcaattgttttttcttgcttctctcatgaacagacaactgatacagagagttagctaatgcctcactatttaacttagcaagtttgaagtgaaaagagagaagttttgactccatttacttctcaaaactaactttatataattttatcttaaattttttgccaaatgtttcctaatttgttaaccttatctctgaattcaagcatttttctcttagtcaaattcagggcatcaacaagcctaagagaagagatacaaatacgtgatatatagacaagtttttcatcattgagtttatgatagcaaaggtctacaggcaatctaaatgtcatcaataaagaatgagttaaataaatttttggatatggcatcggtagttgacagtatcattaactgagagaacagaatataggaagcaaatcttaaagcagagtgtgtgatgaattcagtttgggatccttgagttttaggttcctgtgggatatttgggtgaaactgtctatcaagccattggctataagatcaatttctgaggttggaattaggtttcaatgtgggagtcatggacatataaatgagagtttattcataagtccaaaagagatcacccagggacagcatgcagcaagagaagaaaaatgaaccagagatagggtgctgaaacacaccaagaatggattggcagggaagagatgccccaaaagaagtttagaaaatgcattcagaaaggacagaaaagaaccaggaaagagagatgtcatggaagtcaaggagtagagggaataagtagccaaatgtgttaggtatattagtaagatgaaaattaacaaatcttcattagatttggtatgaaggtcattggtaatcttggccagggattttcacaggagtccatccttttgctagaacccgtgtcctcttgcttgcttaaaaacttgcctccttcggttttcccatcattctcctgcaacacagcctttctttgactggattattgccatcatagtgagcttctatcttcaaacttgacccaggctctccctccagccactacgttctatctctgctttcacagtgaagctacttgaaagaagtgtttgtgtatgctctccctgccatctaggatccaattcactcattaacccactgaaggttaagatctgcaccattacctcccccagctttctgccagtagccttcaagcagccaaaccccacacacgtgttttagacctctcagcagagttacacatcatcaaccactttctccattttgatacattctcttctcttgtgacaccataatcttttggcaccctttctgccttactaacaattcttcctggccgggaggtggcttaaacctgtaattccagcactttgggaggctgaggccagaagatctcttgaggccaggagtttgagaacaacctggacaacacagcaagaccccatctctaccaaaaaataaaaataaaaattagttgggtgtggtggcatgcacctgtagtcccagctactcaggaggctgaggcaacaggatcacttgagcccaggagttcaaagctgcagtgagctatgatcgtgtcaccgcattccagcctgggtgacagggtgagaccctgtctcaaaaaacaaaacaaaccccaactcttgctctgtattctttgctgacttcttatcctttcttcaactttcaaatatcagttttcctggatttttccctggaaactcttctccttactttgtaaactttcctcataggtgatcacatatgatactggactttcaaggcatcccatagactcttaggtttacaacactagtccaagcttttcactgaacatctgataggcacatccctacttaatggaatgaacatgaaaaactcttacaaataagtataagaagaaaaaagaaaaagagacaccacattaggaaactgagagagcaggaaaaggtgaaaatgtccaataagcacatgaacatctctattcaacctcactcataatcaaaaatcaaaactaaatttcactgggcaagatgaagatgaaatataatacatattataatgaggaatgttgaagaaatttgctcttctatgcaatattgggggcaataactctgcatttagaagtacagtttgtaaatatgtatcaaaacgtagattatacgtgtccttttccacaatgttacgactttcagaaatgcatcctgaaataatttcataaatgcatgctatgcagacatgtttttcatcattgagcttataagaacaaaggtctagaggcaatctaaatgtcaatcaataaagaatgagttaaataaattatgtattatctgcatataaggatatcatacacatagtaatgtggctctacatttatttttagaaataagagcaatactatattaagtttaaaaggtagtttttaaaataatattcatattacaatccttttaaaaagtatttgtttagacacacctagaaaagcatctggaaagagacacgatataaagctgatagtgagtcttttggggtagtgttattgtggggactctttatgttctttatgctttatgtgattgggataccatggctgtgttattagattttactcccttaattataaaaaaaaaaactatctccttgcaaatgaatatgggtgttacttttcagtccttaattactatgattgacatttgacaatatggggtggagagatctctcttcataatacattttctcttctgactcattttgaaaggagaccagagatgctttgtcacccactccttagcttttcccactgctgactacataccttgtggttcctaaatacctttatggaacaacttaatgcccttaaygctatttcacttggggactttcgctatcagcaagcttcgtgttttgtttttcagttagaaatcaatgatagaaactttaaaagaaatgagcttccatctaaawtaaggttggcagaaaagtagccraaawtaacacatttcaaggctttgaagattaggagatatgtgagaagttcaaatagcttttctcttatctggagaactggataattcactgcttcacaagctaacaagggttttgtttttttattttaactggatttaatgagaaatgataacatataagagttcagagcatagtgaagatctttttcttataagtttttttccatttttgaatattaagatggaggctataattttctgaacaaaagtatataataagttaataaaaatcttgaaacattttacttaaaaatatacctgacaggcccagagtcccaaaataaaatgctaattttaataattattaaatgcttatctactaaaaataaaacaaaattttattgtttgaatattttgtaaacatgggagtcacttagagtgcatgggagatattgatttccctatcccttattttcagaactaaattggcaatacttaaaagaaatcaaacttaaataaagaacttaagggaaacagcaactgaatgccattatatatttatttcaatctcctacactttctacattttcaagcatattactaataatattctggttatattcataagcatagaaaaatcttcaaatgtcaaagaagattgatttgtattcaatatatttccaaaggagaaaggtggtttttgataccacatctccaataaaaactcattcaacaaagagatttctgaatcaaaaatttcatagttcatagtctcccatgcattccaaataattgagtttttaagttccttttgcttttatctttattgttaaatattattgctgttttattaatacatttttaaaggtaaatatatgtataatatgaaaaaaataaatatatttgcaatattctaagacattttcatttcattttaaagtgagaggaagtacatcagtacaacttaatcaaaagtatgtgctatgaatttttttttttttcttttgagacagagtctcgcactgttaaccaggctggagtgcaatggcacagtctcagctcactgcaagctccacctcctgggttcacgccattctcctgcctcagcctcccaagtagctgggactacaggtgcctgccaccacgcctggctaattttttgtatttttagtagagatgggatttcaccatgttagccaggatggtcttgatctcctgamcttgtgatcagccctcctcgacctcccaaagtgctgggattgcaggcgtgagccaccgcgcccagccgctatgaaatatttttataagatgttataatagtcttttcctgagacgagatacaaagttgtcatttcttagagcagaattccagttcaattcatagattcaatattatgaaaagattctttaggtgatctgtggcctcattattcagatgaataatctgcaaagtaggatgtgcaaaatagagaaatttcaatgctttgtcttactacacaaattaatgatgcacgaacctcacttaatgaaattgcattgaaaacaatactcattattttctgctgctggtagagaaattgtgtgagaagagggcttgctgaaaagagagggtccagtagacagtaagttccacgaggacacagactgtcttcctcattcagcatcatgcctgtactgaggccctccataactacttgacaaatgaataaatatggaggcagaaacactctcctgcagatttttaacatggaagaagcacatggggcctggaggaggctttgtccttctgaagcactgcaaaaagcaaaaatgttggaggacatatctaatgtaagaatattaatcaatagttaagaatttacactcatttagcaataaactatactgtaaatggatttggggaaaatgcttattgttaagtaagacatgggtgtatttcctctgtgtttgtagtatacaaattattaaaccctacttctctcttctcctctctctgtgaaaaatagtataaatatcaacttcagttcgttcatatgactaattgtcaccactctctttaatattcagaccatacttacagaaaaaaatagaaaccatcaagtatatactcagccagcttccctctcatgcatctaaaattaccttcctgcttaccccttaaacaagagattcttagtctcttgcccagttaactcttctatttgtgtgattgtacccaatccctcaacttcccatgatagcatctcattagttaattctcatcttttcttcaattgttttttcttaaaaatctcctgtcttttaccaaaaccctgaacttttcccattctaaagaacagccttctctcagtcctatctttcatacctactgctctaacccctcattttttttcctacccaaattcttgaataagagtctgcactgttgcgcactcctcatcttaggcattattcaagccactgaacttggtttctgcccctgtcatactcgatgagttgctcagatagctgctgtcactattgtcatcgtcacagccatcatcattagactgatgtcactgcagccattgttgtctccctcaaatcagtctcacatattgcatctagagtggagwtctraaacactaatgtcatcatgccatcatgcctatttttaaacagtttaggacctacctaatgttgcactcctctccagcttccttttttgccattttatattccagccaaaaaacaaaaacaaaaaaccactttaggcttcttgaacagatcatgctttctcaactctgtccctttgcaggtgctggcccttttgcctagaacacctgccttctcaggtcaacctagcatttagcgtagaggatggcttcaagtatttgtttttatcttttagattaaaataatctggggtctgatcacttagattatttaaaattctggaaatgacaatgatagctatggttactaggaccctatgacytttgtctacaactgccaaagaaaactgtgcgttctagttaataccctgacttctctcttaaaaatcgattgctacctttttatattgattataaatatcacatctttaaactagtatcttactgttaaaagagcaaagtgaaagagttgtttacgaagtcttrtaattattttaagcattatttatagttaaactcattgaagaattttagcgattttgtaatttttatacagtaatttttatagtccatatctctgaggaaaatgtgtgttaaaaattagtttyaaaaaatccaaaacattcctaaagtttttataactgttgttatgttcatcaaagcgatatatagtttgccatattagaatagatgatataagatttatgaccaaataatactcaattttgcagtttttattcaataagagaaacattatgatattgaatttattaagattcttagtatcaaaatatatgtcaacaaaatataattttgttacatgaactatcataatttatctgtatgtggcattttggattattaattaggctgaattcttatgtgtaaaaaccataatacacattggaataactcaacttgataacttatttttgcatttttattgtgacatagcataagttaaatagaaataaaaaattccattttaaaaatataaaaacaatttattagtggaattttttgccattagttgctcttggttagttataatattagcttcctttttcagatgtttcatgaaacctgtgcattgtggattgatgcacgtgttcctcagacatatttctatgtctacatctatatctcttctgtatctgtatatatgtatttagggacttcatcaaaagcatctaaaaatcttagcactacactttccaataaacaaaaatgaatacattgacgtaccacattgattttaacttgagtgtktaacagcataaccaccaaagtgttatctctataaaacaactgcttagtttcaaaagagaacccatttcaccctgtgtggggtacacgtgtcctctcgtttgcttaaaaggatcagtcaatagattttaattgaattcctaccatgtgtaaaacaggatgatctgtggagacaccaaacagcgagagatagccctgtgttatgtatttacagtctaggaagggaaacatgatgtatatttataaaaaatcaacattacaatgatgccacatgagtattaaaagaatttaatttaatttattatatagaggaagagattgttggaaaggcaacagtgtcatcaattatgaacacaaaaactcattctgagaaatcctatgtgaaatgattaattgctcatgtttttactggctacaggaaatgattcccatgttacctagaactgatggctaattggtcaataacatgtaatagtctctagtttataaagggtattgaggagaatctggggaaactgaagctaatctgaaggtacaaatcaataacaacaatattaatagctaacattaaccattactactggtcagacactgtgatatggcccatgcatgtcttatacaaggagaaaaaactttttagtgtctcaaaatgagaatctgagccaaggaatcataaagttccttgcccaaagcctctgtattaatgtttgttttccatatcatctcctcttcaaactccatgtctttatttcctttattgtctctataatttcaaataacctggagctagcaattcagttggaaacaaagagccttatcaaatagaaatcaacatgagtaggagagatcagaccttagaagatcaaaaccagggactccaggtagttaaaagaatatagcaagaggtcagaatacccaacagtttttaaattgggagaaaattacctggaggcaaagatcaagagcaggacaaggagaaggggcaaaaagagcttcaattaaagggagagggacacattcctaagaggtgctctggccccaagtggccggcaaatgctgaagcctgaggacaagacactgtcactcacccccaggcccatggctgcaaacacctctgtcatttctttgccttccttgggtctcactcctaccccaaacgtgttgcacagcattgggctggccctgctagtgtttgtcactatgctgctgtttgtcatcacactgctgctgatggctgtgaagttgatactctgaatggaatctgggttttctttttttcaatctaaatgtagatttatgtgagaactggtagagacataggatcccagcagggaaatcctgagtcttcaagacctgaaacaagaagggaatcgtcacgcactccccacagagtcagatcagctctccagaggagggcatatgtgggtaacaacaatcaccccagacaccatcttttatttgtgaataaggaaaggcagttgggagtctctgcatttagtgactcatttgataaatttactgaaagacagaccatttatatttggatttcaggttcttaataacttattaaatagaaacaagctgggcatggtgggacacacctgtagtcccagcactttgggaggccaaggcaggaggatcccttggggtcaagagtttgagaccagcctgggcaacatagcgagagacctcacctttacaatcaatcaatctatctatctrtcaatcaataagtaagccaagtgtggtagcacatgcctgtagtctcagctattcaggaggatgaggcaagagaatgacttgtgcccaggagcttgaggccacagtgagctatgttcatgccactgcactccagcctgggtgacagagtgagaccctttttattaaaaaaaaagaacaacaagaagaagaagaactaatatacgtgacatatacaaataaagggattaaagacagatgtggagtgtggacaaaagttattgaatgtccaggaccatgataacaaaaatacagggttgcctcaaccagggtattcttagtataagtttcttgttagttttaatcaattcttgagtttcatttagcctgttatctaacaggagtagagatgtacaagccaaatggtgaacccagattttctaggttcaaatgctggttctacttctaactttgtataagttatttaacctccctgaaccttagtgttcttctctgtaaaatagggaggaaaataatagtacctacatcatagggttatcatatggattaatgagttgctatttgtcaagagcttagaatagtatctactatttggaaagtgcctcagaagtgtaaatttttttcaaaatttttcttatttttctacgttaaaaacctgggctatgccctgcatcccctctttccttagcctactgcctccatttaacaaacactgctgatatactttggcagtgtccccatccaaatcttatcttgaactgtagtttccataattcccacatgttgtgggagggacccggtgggagataattgaatcataggggcagtttctctcaaactgttcttgtggtagtgaataagtctcatgagatctgatggttttataagggggaaacccctttacctggttctcattctctcttgcttgccaccatataagaggtgtcttttgccttctgccatgattgcgaggcctccccagccatgtgaaactataagtccattaaaccttttttttctttaataatttaaccagcctcaggtatgtctttataagcagtgtgaaaacagattaatacagtaaattggtactggtagagtgggacactactgtaaagatacctgaaaatgtggaagcaactttgcaactgggtaacaggcagaggttggaacagtttggagggctcagaagaagacaggaaaatgtaggaaagtcttcctcgagacttgttaaatggctttgaccaaaatactgataatgatatggacaatgaaatccaggctgaggtggtctcagatggagatgagaaacttgttggcaactggagtaaatgtgactcttgctatgttttagcaaagagatggtgatattttgcccctgccctagagatgtgtggaactttgaatttgaaggagatgatttagggtatctgtcagaagaaatttctaagcagcaaagcctttaagaagtgacttgggtgctgggtgctgttaaaagcattcagtttgtttttttttgttttttttttttgagagggagtcttgctctgtcctccaggctggagtgcagtggcgcaatctcggctcactgcaagctctgcctcccgggttcacgccattctcctgcctcagcctcccgggtagctgggactacaggcgcccaccaccacgcccagctaattttttgtgtttttagtagagacgaggttwcactgtgttagccaagatggtcttgatgtcctgaccttgtgatctgcccaccttggcctcccaaagtgctgggattacaggcrtgagccactgcacctggccactgtgaaatatttttataagacattataaaaagcattcagttttaaaagggaaacagagcataaaagtttagaaaaattgcagcctgacgatgtgatagaaaagaaaaacccattttctgaggagaaatttaagccagctgcataaatttgcataagtaatgaggagtcaaatgttaatcaccaagacaatggggaaaatgtctcctggcatgtcagagacctttgcagcagcccctcccagcacaggcctggaggctaggaggaaaaaatgattttgtgctatgtgcagcctagagacttggtgccctgcatcccagccactctagtcatggctaaaagaggccaaggtacagcttgggctgtggcttcagagggtgtaagccccaagccttggcagcttccacatggtgttgggcctgcatgtacacagaagtcaagaattgaggtttgggaatctctgcctagatttcagaggacgtatgtaaatgcctggatgtctaggcagaagtttgctgcaggtagggggtgggcctcacagagaacctctgttagggcagtgcataaggaaaatgggtagaggctcccacacagagttcccactggggcactgcctagtggagctgtgagaagagggccaccatcctccagaccccagcatggtagatccaccaacagctgaccgtgcacctggaaaagccgcagacactcagcggtgtctgtggaaaagctgcaggccatgaaagcagcctggagggaggctgcaccctgcaaagccacaggggtggagcttcccaagaccataggaagccacctcttacatcagtgtgacctggatgtgaaacatggagtcartggagatcattttggagctttaagatttgactgccctattggatttcagacttgcatagggcctttagctcctttgttttagccaatttytcccatttaaaatgggtatattattcaatgcctgtacccccactgtatctagcaggtaactagcttgcttttgattttacaggctcatatgtggaagtcactagcattgtctcagatgagactttggattgtggacttttgagtcaatgctgaaatgagttaagaccttgggggactgttgggaaggcatgattggttttaaaatgtcaggatgtaagatttggggaggggccagaggtggaataatatggtttggctgtgtccctacccaaatctcatcttgaattttagctcccctaattccaatgttttgtgggagggatccagtgggagataattgaatcatggcagcaatttccctcatactgttctcgtggtagtgagtaagtctcatgagatctgatggttttataaggggaaacccctttcacttggttctcatgttctcttgcccattgccatgtaagacatgcctttaccttccaccgtgattgtgaggcctccccagccatgtggaactgtgagtccattaaattgagtccattaaacctctttttctttgtaattttcccactctcgggtacgtctttatcagcagtgtgaaaaaggactaatacaactgccaattctgcctcctaagcagaacttgacaccatctatttctctctctggaaggtctgctaccctactcaagagactcaactctctttcttgacttgcaatagccttttcattggactttatagcctcagcctagcacccctacgggtatgaatcccaatccacaactcaagtgtccagaacagattatattaatactattttccatagccccagctatttactattttgaagccatgttgaacctgccaggatggccagaaatttaaacacattcatttgggaggttcagggtcttccacagtgccaaatctcaggtggggcagggacaatagaaaatctgatccttgatgaacactggctgccaggaggctccaccactgcagtgcgcttcatcctgttttccaggacacagagctcagagagcctctgcaccataattcagaaccctctctcctttctcttatttttctcttctctctcttttctcctctccttttaggcctctctcttttctgcctggaggactgcccttcctgccttgcattttctcacacctccacattctcttcctgttacccattgcacacaatctctaaattgctctaaggcaattttggatcaaaagagccagagagaacatttctgtttttcaccttgccatattccttacctgaggcaatgagcagagggcctgttgtctgcttaaatagagaataggggagaaaaacgaaacacagggagaaaaaaatagatgaatatctgaaatactatctcaccatgcattcaatatacagaagccaagcagactggctgcaagacctaaaacactaattgaatctcgttattcccttgtgtgaacattttcggtggcttctaattgtgctgagtgtcatgtctgaacttggagacctagtgtacaagttgaggcaagtcattgcaagcccacagcctcctctgctctcctgtcattctctttctttttcccagtgttgggccatattaaaacttacagcccttctgagaaggaatatggtagctcttcagatttaaattacagtgtttgatagtatttgcattcttaagattctccctaccccactccaaacaaaacaaaactaagcaaaactcagtaggaaacagcgattctttggatctttgttgaccaatacaaagtacctgtgtctactaaacacctgaaatgtgccgtaacttcagattttgaagacttactatccaaatacgcaaaatatcttattaatatttttatgattacatgttgaaataatgtgtttcatatattgggttaaagcaagtaaattaacattaatttcatgtgtttcttttgagatagggtctcattgtcttgcctaagctaaggtacactggcaccacaatagctcactgcagccttgaactccaaactcctaggctcaggaggtcctcctgcctcagcttcagagtagctgggactacagacatacactacaatacccacccacctaagttttaattttttgtggagatggggtctcatctcctgtgttgcccaggctggtcttgaattcctgggctcaagcaattcccaaagtgctaggattacaggcatgagccatcatgcccagctacctgtttcttttaacttaaaaaaaaaaatgtggttaccaggaaatttaaaattgtgtatgtggctcacttgcattataattctcttgcatagcattgctccaaattgcgactacgcaggaagacaacctgatctatgaaaatacataaagggcagaacttctgttcccatcctgtcctctgaagacccaaagatgatggtgctttgacataagcctcagataggatcagccttaaattggagtgactttataggtagatgacttttttttttttcaaaagaaggcattgcttttcatttttaaacacattctgttcagaggcccttaaacatcttgaaagtttgattaagaattctaggtacccccacaatwatcctcaaataacataagtttctcttgcaaccatctagaacttttgctcattccccctccacagatgttcaggatattcttaaacaaatagtgataatcctgcttttattcctgtgaattatacattcccagtcctccaatgtatagcttctcttttgagggtcaccataatttcacagtcaggcagtcagctgagggaggaacagagccaccttaaccttcagctaatgaaaaattctcagtgggctaaattcgtacagaattgaatcagtacattaactctaaaacctctgcaggttgtctgagacacaaacacctaagcaataatctgcatgaaggcatagagacacttacagtgttagagtactaatggattttttttttttagatgagcctgaacaactttctggttttaaaagatagaggaaataagacctggagtagttaagtgaattgccagttagggctaaggaaataattataatttatggctcttaactctttcagtcaacaaatgctgagctacccactgtgtgtgaggtaccctcctaggtgctgggatacaatagataccagttacagtgctttcctgttataacagaagacacaaggaaaagttgacttgaagagtaaagacaatttattgtcatgtaactgagaagttaggctagcatcagactactcttgatacagtggctcaaatgatgggatgactgccttcggttctcattgccacttcttcagtgctggctccatttctgtgggtctcctccattattgtcacaatataaccatcagcagctcctggrgttatgtgttttcagataccagtcaagcacaaaacaatttgaaatttattcttgcagctctaatttgcccaaattgggttgtgtgttcaaccctgaaccaattggtgtggcctggagattagatatgcctactggcttaagccaatcagggcccactaccaaagacaagaacggagtgaattccatccaaaccacatgcttggaattttgaatactgtaaggaagggggaaagggaatgtaaatgctgagaagcaacaaaaaaataaaatataattctttccctcaagtgctcacacttgagagctttccaattctcctgttggtttttacactctgtgtcatggagccctagatgttctctagtggcatctcaggatttgaggggatatgcatcactatagcctccagcccattacctccaactttaacagagctagccctctttcatctgttcgacatattgggcttccatatgagattttatttgaagaaagtgcctcactgctgaagtacagtggaaagctgctctcctacacataatactgttgcaacaccaaagtcacctacatttctttttatacgttactttttctttgattcaagaatttacccctatytctgtattggcttttcccatgctaatttaatggaatcagaatgtcatggaggcatttcctggaacttaggttttagtgctgaaaatttcatttcaggggttttctcatgcttctgatattttgctgatagtagtcattttgtagatagactttcttcccattttctccttcatttacttactcaaaacacttgagaatgatttctgtatctgtaagacttctaaacactcaactttttagtcatgagtaagcaagtgaaattttttaataagcaagtgactatgtaccagtgaggtgcattagtgtagacactaagcaagtatagtatgactgtccttccaataatctcactgtttatctggaatacagttatagctgatagtatgaatattaacacttaacaaaaaaagcaaacttttattcaagagaagacaaaatgtctcttccttcaggtcaaagtttgcagtatatttgttatggtcatatacttggtgaattcttcactttctctgataaattttttttttttttttgagacggagtctcgctctgtcacccaggctggagtgcagtggcgtgatcttggctcactgcaagctctgcctcccaggttcacgccattctcctgcctcagcctcccgagtagctgggactacaggcgcctgccaccacgcccgactaattttttgtatttttagtagagacggggtttcaccgtgttagccaggatggtctcgatctyctgaccttgtgatctgcccgtctcgacctcccaaagtgctgggattacaggcctgagccatcgtgcccagcctctgataatttttttaaaatctctttcatattctagtcaatgaaaatataaatttttaaatctatcacatttgtcattagctctcaaagaattcagatctctatttgtattcaatttcctcccatcccatttcaccatcatgggataattggtttataaaaawtttttaatccctctaagtactttcagagaagtacttagagaattcagactgtcccctaaaattcagtcttaagcaatgcatatcataactttgtgtagtgagtctattatatcaatagttatttacccacttaaaaagcaaatgattaaaaagcatgaaaatagatacaaatgcacaaatatttcagatcggtatggatttatttttacattagttatctttgtttttcatttggtgcaatatccccatttaagttccttggaaatagactccatgagaaatttgtgtgtstggaattttgggaagtgttttgataacaacagctgaaaggaaatgaaaaaaaaattttggacagatggagaggctcatctgtaacactgtcatgacagaggccccaggttatcatgggaactcttgacttagctggctccccagagctgtcccaaatggaggcaaaggggcttggcctttgtatcccacactgaccaatcactggatgcacaacacccctggggaggggtcgtaccctgagcaaggcagtttccttcagccaagggcaacactcttgtctgcaaccagcactcttagcacttgaggaaattagctcctcagttctaaagaggaggggcatccattacagtgcagggtccccatcttcatacccagagaggagccttgaggtgtagaatgatagttatgtatcccaggatttccaaggggttctattctctctcatgccttgtttgccattcacacaagttatttctagtaactttaaatgcatgattgagtaaggtaaaagacatttgttgacacaattaaagtacaagtaataaatggtaaatcgaataagaaaaacatgtaagggcctaaaagattaattattaattagtgcatatgtgctgaatctctattaataaaagaaacatggacaggccatgaatttctggaggttgacttttttaggtatgtagtctctttcttaagtaggggagaaaagaggaaatcacaaggaaattatttcaagtatttcattggttaaattgcctagtcttggcaaaactctgagaaactgggtagcacttttgttatcagcagaaacaaccaaaagtatcacggatatcttcaaatagcatataaacagaaaagcattaaaaatcaaatagggatagatagttggtataaacaatgtcttccacctaaagtgtctgctaccagactgaaacagccagtaataatatgatactataggcaatccttgcttttgctcactgctgtgttaactgaaactggtatatattgaaaccacagaatgtaaggaccatcttgttaacttttatttcaattattgtaacttttattttcctaaaattatgcttctatcttgaaaataattaagttgtctgaatcattagactgtaacttcatgaaagaagagaccttgtctgttttgactgattaattttatccctatagcctaatacagtgactggtcccacagcagacatgcaataaatatttgatgaatgaacggcagaaccatcaaccaaaggaagtaattgtatagcagcagcctggtgcccatgactgtctggtaaatatctgaattattgccagatgaaatttttttattttaattttattttttatttttttctattacttatcaattatacaacctgggtaaatttagcaaaactaacataactttatgtaagaaactgttagtgtttgcttcttatttagagatgcataattttatagcaatctttcataatattgtattctaaacaaagattagttgttctcttatttccaactaattactatagatctagttcccaaaaggattcacattcatatgtatgtataattagtggarcccatagtgaatattttwtatatatatatatatatwttttttttttcattttttgagatggaatctcgctctgtcacccaggctggagtgcagtggcaccatctcagctcactgcaacttccgtctcctaggttcaagtgagtctcctgcctcagcctcctgagtagcagggacttacaggcatgcaccaccatgcctggctaatttttgtatttttagtaaagacrgggttttgccatgttggctgggctggtctcgaactcctgacctcaggtgacccacctgcctcagcctcccaaagtgctgggattataggtgtgagccactgcgcctggcttatatattattatttttaataaaataagtttaggcttttaaatttcattagaaaaataattttctgttgacttaaaaaaaattcaagtttctaaccctactcaatattattcatgcttacatagactgggatatctagtatgtagaacagaaaaaatayggytattaaataaggactagaaatgcaaatatgagatgcagcaatgctcagaggcatggagaaagctgaatgatgactagaaaacagaatgcttaaccccatggagtctcttaaatttgtgtttaacagcagacttttaaacatgaaggaatagctttttatatttataagaaatgccctggtaccttgaaacagacaaatttgtgatttataaattgattgtagaagatctagtrctttctgccaaataacatttctgccaatcactcttgtttcttggactagtctcaaacctcaaattcatgcattttctgctttttggagtttatcttattcttggtttctctctcatttctcataaagatgcaattttccggttttcatcactaaggtacaagtaaagaccagcctaatatgttgacagccattgggttaactctttcattgcttgagtggctggtattcccaattcaaattgacacctctacacaattactgagcacctccctcatgattccttgtgttaaattcatgaaagctgaagaaccaccgtgttgcaacaagattaacaacagtgtaagcttaacctcagaaggatagttagaaagataagaaacaataacccacagttgagtgaattaccagttccaccatgatggcaaaataaacaacattaagtggcattacaaaaatgacttcatttgggttgggaactttcattgaaaagaaaagaatattagaaaagaagtaagttttgtttaatctcttcttttcattctttttcctgttaccgtaataaatgaaaccaggagtggtggaagaatagagtttactttctcactcaaagttggttttttctgtttgtttctttgttttgtctgtgtagataaagtaacagtttggctaaaggagaaatcttttctctttgaagattctccttattatgttggtaaagcagaacgaaacccatattcttttcggtgactacaagttggtaaacagtgctcacccttacattcagaagttgtgtaaggtctaaacaaacgcgccaatataaaacttgattttgagtagaagacggatttcctataactattaagaagaggaggagattttgttcttttcttctcttaataggaacactgctgtataagcgttgcctaaggtatcattaaagccactttttatttgccttagcttaaacgactggcagacaagcttattgtcttttaaagctgaaccgagtacaagagccagttgtaataggtctgctttgaacattgttgttgaagccctcttgattatacgttaaagcttgcaaaatgtatgtatagtgcttgatggattacaaaaccacatctatatctattatcactttcgatcctcaaaaaaacactgtgacttaagcaaggatgctatctgacaaattacaaaactcatgtgcctcagcaatgcctgcaagtttccagtaatttccctgggtaatttggttcatggaacatkgctctgtgtcacatttccctttgttagtaatcatggaaatagttgaatgctggacaagcactgttcctacaatgttatattaagatgttttattcacagagaatataatatagctcatatacaagcattatgtgtgtagagtgctgtatcctgggttatagctgcygagaatttccaggctaggtccagtgtatgaaaaatcttattcagtttgcctgcattcaaagcctgaagatgtatcctgctccaccatttaagcttcagtttcagtggcgtcatgagatttgattgaaacatcttgcctgaaccctttccacgaaaatttttacctttatgtcagtataaagcatagtgtttttccagaagatttggcactagttttactaaccgggtttgggtcccacatgtatgcagcttttctttcccacctgtatgcataacgcctgtctagtttgttggtggcttctgctggtgtgggcaaagcctaggactctgggagtctgctgtttgtatgaggtttgcttgatattttgccttgaaaacaagtcactgtccctgatttctatgtgtcagagcaatctatcaggctttctagcttctcagcagtctactgctctccacagtgtccgttgaaattatgcttcaatgtccttgtaggactgtatctgtcctcacagcttgtggctgtccccacaccagctccccaaaccacttctgcttggttgtcctgttgttgtctattcttctcacctctggtgttccagtgtgacaatccatgcaagtaggctggccacataccaagacattattcttgatgatgatcctgactttccatttaatgctaagcattaacatcacaagtacataggaaaaccagatgtttttctaacctgtttctgtctcataactgtgggttaggatgtgcattaccgtcctatctctctaaaccttcattttatgtcagaagcatgatgctgtatggggactttccaatttccagaaaagcatatttatctttttaatctactttcttcttgtatttgttctgtgcagtcttaggcaagatgctgcctacatagcatcagctattcatttcatgttgtaattgcaaactgtagatatgtaattactgatgctttttcaatatagatcttctacactgaatagtatctaaaacctagatgccaccttgtgattcactggttgtattgctaattaaaactggaattctgtaagttcctagtcaatttccatacagtaacaatgtatgttttcaaattttactactgaaggtaatatgttatcatgagatcaaatactgttttgattgtgggtatacatctgctgtctcctccttgaagtaaacttaagataataatggaagcaartgtaaggtgatctttcagccttttaatttaaaagccctcataagtggtcacttctttattggccgagtttcccagcatttgagttctctctacctggggaagctccttatcagttatagatggtaaggaacagatttttttctttttttggtcttccacaaaaataactataagggaaacagagatgtctttgtcaattagcaactgcttaagtagtcagctgcagctactaactttggagcacagcttgaaggtacagatacagggacagtgactttaggccaaaccttgaattttcataaagaaaacatcgtgctcaaatatttcacctaacatttatgtctaaaaatgagctagatattttaacatccaccgtattatttaatcctgagaagaacctatgaaatacattattttctccatggtataaatgaagaaaatgagcctcagaatggtttagttaactgtccaattacacagctagtaagtgatatgggcagtgaataaccttataggtcctgaacattctgtccactctagccaccatgccatcacttcattccatattaaatttatttgtacaaaatcattaccataaagctgcgatccacaaacaccaatctaagagagatggtattgctaaaaaataatagtgaattaaattaactcaagttttctacctacagtttccagtcttgtaaagggaattcagatagcaaaacctgcagaaacgtttgttaaaaccttctttccttctctatccctgctctctataacctcactttatctgagtcctctcacttaaaactctttcacagactcctctgtccctgttggagcttttctgtcttctacaaaaggatagtattctcctcatcttaccctctactattctacctataattccacttctatcgcattctcactattctaatttggcatcacaaaagcccaaagaatcaggcagtagaaggaccctcctaggagtgtattggggacagcatagggggatgacccaagtgggcaaagccagtaccctcttcagtagtcagtgtaataagacaaacctgggagttgaacaacacaagtcacatggtcaaatacaaagaaaaggggtagagaaagacatcccaccttcttattgggtcaaactaaaaggcacatagcagtggacatggatactggaagaggtaaagaattggggacatatgtcaacagctttccctcaacaacaacaacaacaaaaacaaaatctaggaacacctacatctggatttaacaaatccarcacttgcttggaaaattaagaactgtgctgtgctattcaattccacttaagtcctagaatccctgctgctgcttactttaaaaacccccatgataaccaatgagttatacttgtaggttgaatttgtccagctcttgctagagtatcttccctagttctcatatgtgtcatggtggccaaaaatattttatttaagaagtcagagaaagggagaattttaagtatgatgctgagatctcctatactgtccactcagttcagttctgatgatttcacttctgcatcatttaggtattttgaataaagccaggataataaacacaaaatctccgcaacatacaataatatgcatttatctagctcatgggtctgtgggccacttggagtgggctaatctaggctgggataggctgaggagttatgatgatcttagctggtttgcttctgtggatgaggtcagctggggattaggctggactccactggggcagtttagttttgctctacatatctctcatcctcctccttggataagccagttaacccagagaggttctcacaatagtgaaagtgctagagggcaaattcaatagtgcaagcgttgcccaagcctttggttacatcatgctcactaatgtgagcaacacaagtcacatggtcaaatccaaagaaaaggggtaaagaaagacatcccaccttcttctttttttttttttttttgagacggagtctcgctctgtcgcccaggccggactgcggactgcagtggcgcaatctcggctcactgcaagctccgcttcccgggttcacgccattctcctgcctcagcctcccgagtagctgggactacaggcgcccgccaccgcgcccggctaattttttgtatttttagtagagatggggtttcaccttgttagccaggatggtctcgatctcctgacctcatgatccacccgcctcggcctagacatcccaccttcttattgggtcaaactaaaaggcacatagcagtgggcatggataatggaagaggtaaagaattgaggacatcaataaaatctaccagcattgacttatttttcttgagtatcctcctctaaaagttatatagtatacatttaggtagtgtcagctctagatgcaggtaccatccattcatttactcattattcatttaacatataataataattttttacacaagtgctgtttaatggaaatacatcatgagtcacatgaaattttaatatttctaatagccacatttagaaaaggtaaaaagaaactgataaaattaaatttaataatatgcttaattaaataaatccaaaatattattatttcaatatgtaatcaatataaaagtcattaatcagactttacattatttttccctactgtcctaaaaattcaatcagatccaacacctctcagtttggactagtcacatttcaagtgctgaaccaaaaacagctagtaactattgtattagtgaaattatagactacgaattgaatttggtgctgaagatacccgacacttgccctatggatagtacagtctagacataaagacagaaaaaaatgacccaaagctgtaaacaattgttgctgatgttatgatggaaccaaacaggatggtactatggagaatgacagaaggagaattaatttaaattgcatagtcattatatatctttctgagaagttcacatcttaatgaagatctttgggaagatttttgtgtttacatctcttagatcttgtcatgccactgtacagcatcacttctccttattctaacagttctctattatacacccccaccacaaaactcatcaaattttccaatctcctagccgggtttagttggagacatttcaacataccttttcaaaatctcttataaaaagtcatcactatgctcctaagtctggaaacgaagatgcagtttgttgcaaaaccaatatagcaaagggatattacctgagatcttattaccaagtggataaatttcctcattatgactttgcctgataagagcccaacattttatgataaaaaagttgaatggaaaagttgtttttctctgtgtttatctcctttataaaaaaygtgagtggtaatagagaaaatacataatgaatgtagataaaagggagaacattgcttcagaagtaatacaaggactaacagaagcagagaatggaaaaggtgtgagaaaaaaaggaaacattaaccgtattaatctgttcttaacctgattaaacttggaactgcccaagagaaagttttgacttttccatgctaaactatccaagcaagttttatcaaagagggtaattttactaaagcaattattgtctattgaatttgaaagcgtcctggcaagaatagggagataaggtatttctttgtattatagtaaaaaaaaaaaaaaaaaaaaaaactgatttttctttaaatatataaacatagcttaaagaactgaaagagctttcttttaaaaggtatgaatcaccttgtgatttcattttttaatcctgttcagtttattacatgccttttcattagtgagtcattgctttcgttgtgtaacccattgatatcaaaactaccttgctcggtgtcctcatgcttcattgttccttgggcaaaatggcaggtcccagggatggcacttggaataacactgtcagcgaacccagagcccctttgacttttatttctggtgtgatcagtactcacatctaaatagcaaacagtttaaatagttttggggtgatatggtacaaaaagcagcatactgaattttaagctccgagatgctgttttcacaagatattgctgaaaactacagttacggctctgtgttttcatactagacactttagaaaatgactttaattacatagagaagagagtccagattacatggcgagcttttttacactttaaattacaaaaatatatttgtgcatctactgcagtttttcatgaaggatttacatcagaacagcaacaccagcttcgtgtttagcaacaaaggaccccttcgagttaacttttccaaataatattttttttccaccagtggataaataccagatagctcctctcctctccttycacatactacatctgacattctggattttaacattgagatgttttgggtcatttcatttcattgagatatttttagatgggattaaaaacaaattgaaaagagtcaagcagtagtacagctaatgccaaaccagtgctttatgaattggtgctttatgaatgaaaagcagctgtaatagggaggccatgatgaaggctgaaaactaccaccactactaccaccaccctttgccccaggtcaggaagcgtgcaggggactttgattaaagttatagaatgggaagtttggcaacagagacatcatcattaactcagagacagagaatggtcctgtgaaaagggagagccttcgttaaatagtagttaaagtcatttagtaaagactaaaaagattgccagtgtaatagagagtaagcggtgtgtgtgtgtgtgtgtgtgtgtgtgtatgtgtgtgctgaagctcaagaattgaygtaaaacaatttaagctgaattcagtgatgagctttgtgctggcaaagtatctaagaatctttatatcccccatggcttagaacaaggaagttatgctatacgtttttgttggatgaacaaatgcatgaatgttcctaattaaacaaattttaattgatgctgacccagagaatatggttcacctatttctggatattaagcccctccaaacagaaagggggatctcagagttaggcagtctttcagatacagctctcagcatcctgtctgtggggatttcacctgtgcctgctgcagtgtctcatagaccagatggaggccaactgcatccaactgcagaaaacgaggctagagttaagtatagatggcaaaacaggtctgtagttctcatctcctagtttcaaacgcaactcctgtctcctaactgtggctgaacagaaaagtgcaaaagagaggagacagaggtctaacccttgtatgcttattgtttacctcatacatctttccctccccaaggaaaccccatcacaatttcaagattaggggcagggccacttttagccccatttggcgcttttatgcaaattgttaaaatgtatctctccctcctggtggatgcagctcatatcagggtgatggatggcaagcaaaacgcatgtttgattcgagctgctgaaaaatcatcctctccactaggtaccctggtacatgagcaggcctgtttctatgccttttgctaactgaaaattaatgataacagaatccaaatcaaggaggatatttttatgtgtataatgagattaaacaactttgcaaattgaagtcactcaagaaagtgtaaaagctcacaaatttgaagtttatagttgaaagcttgcctgtgagttttaaaaataatcttaatttaatctctgattaccttcagcatttctttatgtccaatatacggartgcttagaaaagtatgatctgtctttggagagctctcaagcctaacagtggagaaagtaaaaaatatttagaaacagaaatgcacaagggataattactaatttgaaactgacaacaaacctagattttatatattattcagccaaacagtggtacagaggagcactggcagagcatggagttgaaaaacaacattatgtagaataacctattaatatggtggcgggggctgtggggaacaaacttggwcctctctcttttcttcagggtacaggtctataatattcaaccttgtctattatccatctcgcaaaatgagtagttggtgacatctcaggatatttagtcagaaaatgcaaagtattagaccagccctctcccaatgattcctttacactttcttaaaccttctttcttctattacatattgggtacaatgtttactattcaggtgatgggtatactagaagcccacaccctaccattatgcaatatatccatgtagcaaatctgtacgtgtacatcctgaaactataacaaaaaaaaatctttttaaagacacacaaaaaatatttttttcctattcttctttttaacttatcacatactggtaaagtgatcctctagccaagtaagcaaactatgccacagccaatcttctacactgatgctctttcctttggccaaaccaccagaagttctgctgggctgagtttgtgtggtccatagagacactattgagcaatttctggacctttctgtagaaaagcaagagccaccaactgtttcctaggaaagctcttttccaataattcgatagacataggtctacatttactcatgggagagttttagtcatctaataaataatcatcaagcagcgtcttcagtaaaataaatctttgtctcctttaagcagactaagtctcaacatttctgtagcagtgaactttgtgttcccactatcatgattatctttttgtattttgtatgtttaaagtagatgaatttttaaaagcttaggattctaaattgctatgtgtaaataagcacctaataacattgtaattaaatattgatgagaagatacaaaattgcttttagaaagtgtatattctgacagtgcttatattttatttctctgcttctctttcctctaccaatcttctttattaatactttatctaatttgcacaaaaggtatcgtggttttcattaaaaatatagacctgacttacgtagaaaactactattagattctaaatgagaatccagattaatgaacaaactttgcctgtttctgtgtgtgtctgttaaggaacttttcccagaaattccagaatcatacactcttaggcactgaaggtgcttggaggacatgtattcagtgactctcagctcaggttccatattaaaatcacatggggaacttcggaggctcagtttctccaccccagaccagtggaaccagaatctgtgaggatggggactgggcattggtatttctttacacccaggtatagtctaaagtgcagccaaactttaaaaacctctggtttaatccaaccgctttttatatgaatagacaaaataaaaattgaggaggaagaaataacttatctcaggccatagtagagcctagattagaagccacatcacctagccccagttaagagctattttcattaaaaaaaaaaaaagtactcgtatcttgttttatttttgacttatttgaactttcccttggtattaacattaacagaagaattctgtttcttaacttttctgtgaaatggatatttttgtcaactagagaaatgatgctgtacaatagcataaattaacacatggatgttctacatttcccagtattgtttacctccttgcctttcatcaaaaatacattagtctttgattgttgtaaagagtttcaaaacatatttttaactttcattttatgtaagtcaagaagatgtcgcaaatcattttagcatatgtagactcatttttaaagtcatcataaaaagtatgggtagctcactttcagtgtaacattctgagaaagtggaactgataacatgggcccggcgtcggcagtactgaagatgtagatagttcaacattttccagttctttgacatctatcttttctgtatgtttatatctattgagcctatcaaagtctaaaatatttcaatagagtatacaattgcagtaccgattgttacatggcataggttttatcttgtggagagatggaaaagtgtatctaaatgcatcatgcctatgctcagaagtaatgcaaatcttctgtcatgctggtaccagaaataaatgaaaacgatagtagataaagactagaagtatttttctcttttgcgcacacacaaaatattgtgtatagtgatcatcatcatgctttaagcatccactataagccaaacattctattatcagcagagaaatgtacctgcaacagactcctccccaccaaaaacagcacagaaaaattcacctgttattaatcaaaaacaaaataaacaagtgtactttaaaggagttgggagtaaagaagaaacatttaaatgagaaaaaacatataagtatgaggatattctgtgaattatgagtaaagctatatccattcactcaatttttcagcctattacaattattcaataacgatatatttacctaattggatagttgacctgagtgtacctatgtataagttgatgttatcttatgtgagttgcatatgatttgtactaattatcactatagtacaaaacatagagaaattcataaatggcagatgtcttaatgagcacttttttagaagacctgaaaaaaatgcccatagtaggaccacagagtgaggaagatcagggtgttgaacaaagtagaccaggtggctctctataatgaaccccataataaatctgcccttgtggaaggtaccacagtttagggtacagatgtctgaattaccaacctgagagtctggctcaaggaggcactctcattctggtcagactcattaggagctgaagtttctgaactgcaaggttgattcatgaatggggaccactcctgaccactactgttgccaaaacattgatrttctttgtgtcccctacctggaccaccttttctgtcctgtgaactgatcagtaaacatggatgattgcaagggatacaccatccagacaaagggaaatttgtggaatcatctgaataagtgacttctgccattacctggaaggtgtaggatcctgatcaacatggtccacttctgacttctggattttctcttccttctcaaagctggtggtgttcaaaccacgttccaaagactctaggattccatgtaagaattgttttgttggaggtgcatcctcttaagaagaaaaaaaatccaaaattttaagtgctactctcatctagccctccccttcctgtattaacaattttagcttctctaatcatattctagttctgtatccttgtaatgacattctttttagatctctttaatggagtattgggagttctcagactcttctgtcactcatttgttgagaaaatcacagaaagctgatcatctaggggttacaatgtacgtgtattttttttttttacttgtttagttcttatcatacaatattatttcttttgtttccttgggaaattttttaaattatgaggaataattttactttgtattaataggagctatcatagcgtattctaaatctttgaactagagattaatttaaaaagctttttaccattttatgcagtattggaggaatacctgtgtaaagtatatataaatgagcaatctcatactcttagaagaatttttgtttcttttgggggcttttgttgtttgttttgttttgttgagacagagctttgctctgtcgcccaggctggagtgcagtggcacagtctcagctcactgcaacctccgtctcccaggttcaagcgattctcctgcctcagcctctggagtagctgggactacaggtgcgtgccaccacacccggctaatttttatatttttagtagagacagggtttcaccatgttgaccaggctagtcttgaattcctgacctcaggtgatctgcccacctcagtttagccaccccacctggccccagaaaaagaattttaaaagaaatataaaaggtttgtgctataattttagaacatatatcaattttcatgcatggaataaacacaattttgtcaaaagatccagaaattattaaataaaacaaaaaaagtttagcaaataaaatatcctacacatgaaaatttgctttttcccccaagtacagaaaagaagcatgtcagaaaaggcacagcataagaagttattcttccatcattccgttaatcttattttttatttatatacagaagagcaaaataaacagtgcagcttcaacctacccgttggagtttatgtttcaggaaaaatgaaatcatgactgacactttggtggaatttcttattttgcttgaaaagcaattgaatattaaatcatgattcactagtttcctaaaatatcttttagtactctaggggaaaagtgtaaaatagctcactctcagatttttaagagaactatgtgtagtcattctcaaaatgcatttcatgcaagagggctctttttcttttctttttcatatatatatatattatatatattaattttactaatatcctaacagatttaataccctgtgaaaactagaaagtatttataactgaataacaggtatatagaaacccaaaggcaattacttcttgtataactatgccttaggcaagcttcaagttgttttttagagcccgaagattaagcctactcaggaattttattcaggcacaaaatttgcatcgtctacccttacatttcctgcctctcttccttttgtatctcttcaatcccaattctgcctaccgttctccaacttggaaaacattatctggctacagctaacactgttagaagccctggagaagcaggtatccctgtgtcttcctgtttaacaaaatacattcccagcccaactgttttcattgcttttatgttccctatgcatgttttcaatttaggctactctgggaaatatttctcttatttggaatgatattagtatataaaataggctagaatttcatacctacttttgaatctctgaagatccttttgttcttttcaggtaaatgtccactaactaggaattaatttgaacttggggtaactgttttccaaaataatcagtctctaactcaaaagacttcagctctyagttattaaatgtatttttttctatttttcaaggataaatgatgtctaaagagaaatataaaatatttgaaaatatgaccatgaaaatagcaaacatgcttgagtgtttgtccacagaactcaaggtttagctgagggtttttcttgtcatgtagaaaagcagcttctttatagttaatctgtgtaaattctgtagaattctgatcagacacaaatgttctattttttactacctttttttggcagagtaataatatatttcttctgggtcatttctaatcttatagaaaagtggtaaactagccattgtgagagagagagaatcaacttcaagcttttgaaaaatattcagagttgaattattartattgataaaatcaaataccttctgaacccatactatttgcatggcattctattatagggtatgaagtaatgtaagacatatccttatcttcaatatacttataagtaattcagacaataatatataaaggaaacatttttaacacaaggtgcttcatgatttaagagttactgcaaagtaattgttcattcattcaacaaatatttgttgagtgcctactatgtattaaagactctgctgaatgttgggtatctaaaaatgaaaaaaaaaaaaagagtgtctgtcatctagggagatgaggctagagagttagacagggatcagatgatatgaggtcacagtaaagtgttatctttctttagcctgagaactgtggaaaggtattaaaagtttttacacaagggattggcacaattaattgtgtttttttaaaagatcactctagatagatgccatgtggaaaatatactggagggaaacagacaaggttatgatggtggtagaggaggagaaaaagaagaggaggatacacagagaaaagtagtgaagtaggtttgaaaattatttaggaagtaaaatcaaaaggatctgatgattagataatgaacctaaagaagaaaagaaggaacaaatctgctctgattcctttttaaagggttgaagacttgggattttggctcattcaactgatgactgatggggctgtttacaaaaagagaacactggatgaaggctgatttaagaggaaggtttttatggatttagttataaacacattcagtttggagagtcttcaaaaygttgaagttcacatgtcaactattcaattagaaataaaatatgggtcaagcatggtggcttatgtctgtaatccyggcactgtgagaggctgaggtgggtggattgcttttgtccaggagtttgagaccagcctgggcaasatagagaaacctcatctctgctaaaactgcaataaataaataaatatggaaataagggaaaaartgttaagctaaagataaaatttgagaatcatcaccaaatgattggtcatagaccttcatgagctttcttattagtatatacagtggataataaagtggtttcgatttaggattctctcattatgaattagaagaatctggaaaggtttaatgggggaggtgagctgaatcatgaaaaactatagaatatggataatrcgagagatgagtaaaatgaatgaaattggtaggcacacgataaaaatagaaataaatagaaaagatatttttaattgaaagtaatgwaaatactaagccaaagtggcttaatcaaaaaaggaatccctagattcacatataactgaaatgtttagggtattcctactgcaagcaaatctctctccaggagtgaaacaataacagaacccagttcttctttttctgtttctcagctctgtttccttgttgttcacctaatttcatgcaggttttcctctcatgatcccaagatggctgccagtagttccagaggctgcattttacatgcttatgtccagtaagaaaaacagagcttttttttttttttttttaaatagaatagggcaaccaaagcctcagagtggagaccaattgacctaataaggttatgtgctcattcctatcattgcaggaagaggttgagatacactgattatcttaagaaaattagagtgcaactttggagtggggataaatccacccagcaaaccacctagagggttcagaaagggataggaaatctggaagctttcatattatggggagaattaaatgccaggttaaggaccttggactttgtattagaccattcttgcattgctataaagaaatgcctgagactgggtaacttataaagaagagaggcttaactggttcatagttcttcaggcttttccataagcatggtgctggcatctgctgggcttctagggaggcctcaggaagcttacagtcatggcagaaggcaaaggggagcaggcacatcacatggtgaaagcaggagcaacctttttcaaagctcgaagatcttggtttttggcttattcagctgatgactgatagtgctatttacaaaatgagagcactggaagaaggctgtgtttaagaggaaggtttttatgggtttagttatgaacccataaaagatgccacacacttttaaatgaccatacctcatgagaactatcacaagaacagtaccaaggggatggtgctaaaaccatttatgagaaacccacccccatgatccagtcacctcccaccaggccccacctccaacattggggattacagttcaccataggatttgggcaggaacaaatatacaaactacatcaaacttaattcaatagacaaagagagctctttgttttgaaaagaatagggatccaatgagatcagtgctttaagaagtacgtcttaggggccgggcgcggtggctcgagcctgtaatcccagcactttgggaggctgaggcgggcggatcatgaggtcaggagtttgaaaccagcctggccaacatggtgaaaccctgtctctattaaaaatacaaaaaaaaatagcagggtgtggtggtgtatgcctgtaatcccagctacttgggaggatgaggcaggagaacacttgaacccagaagatgggggrttgcagtgagccgagatcatgccattgcactccagcctggggtgggactctgtctcaaaaaaaaaaaaaaagagtcttaaggcaattacagaacatactatagcatctaagaaaaaagaaatagagaaatctattaaagagtctctgccaatactttaggaaaaagatggtgaaagcctgaactgtagttaaggaagaaatatttatgaagggaagatagtagtgaagtgctaaatgtgaaaaatagttcagtaaaaaagaatccacaagactttgtgagataagaataatgaactttgaggtgaaacttaagtctcttactgagattttgagtaatgtcatacatagctttgtcaccgaggcaaagatgagagtcttcctttttcctgctataatactggaccgtctccttccaaaccaagccctgcgctaggctttccattccattccattctgttttaattcattaccgtcatctcctgtcccattattctccacatgcccaaatctcctaggagtcaaaaaaaaaaaaaaaaaaaaaaaaggcaagttccaacctctgtcagaatgaaggctgtttttgactctgcatcatgaaaccttctccttattggagttaaacagtagctatcattgcaaccgtttcagtggcacttactttttaacacattttttgtacattttgtcaaccagaaatgcctctatcagcaagaaacgacaactgaatggtttacacaggtagaatttcagggaaagccattagtgctatttgttaagttgctcatccttcacaggccctatatctttgtgtttctctggacttccattgtcttttacatcatggggacaagacagctgctctatcccgaaagcatcatgtcgtcattcaaggcaagcaaatgtgtgaaagagagaagagaagcaggaatctgtttatcaataaagcaatattctggcaggatttcttacccagcatacttcttatagcttatgagcccaaatggggagccaaagtggggtcacatgaccactcttagcagtaaggaagaatcagaaagtgaacacttgattttctgttctctatttgtgagaggtgtagcaagaaagaagagagctgggcgcggtggttggccaagcaatagaaccttctctgagaactattgttatgcagtgtactctgggtttgcatgtgtgtatgctcttgtcrtcttagttttgaccatgtatttatctgtacatttcatttcctctgttctttaggagagtacttgcatggttgattaccaattttaaaaatagatgttttcttctctttttctatcagccactaccaacttctgcttaactcatccaacaaagattctagaattttggttttcccgaataggcaacacattttgactaaaaagaatattttcttgtttatacctaattatcttggcaagtactacccatgtgaaaggaaatatagcaaaattaccagatgattccatggggatttaaagtatcccattttatcttttacgggggtgatagagcctcatgtaaagaaatatttccaagagacctcatcaacctgacttagaaattcagctgcaaaatgtagcacctgcatatcaaaaataaaattagtaatgatatcacctgatgcaatgtgtagaaaaaaatagtcaattaaagcaataggaattcaaccagaatgccctgcaggcagcatcatgtaattctgacttcacaatgacatgaaattttaaatgacaactctgctaaatcagggagcagcaaaccctggccaagtttaaatttagtaacactgaaaataactttctccatagcagattctctatgaattacaggtgaccgaccacttctttttctgttctgtttagagataatcagatactcactgtcttcagcattggtgtcttctattctcaacggcatttctggtggccaccccaggagtctccctgacctgttttaaaacccttggaaattaaggagagaatccactacatatattcctttgaaagtttccaccatatatgttcaaaaattgctgaatgagcacaaggatttgaaggtaagcaaatttagggggtaccaccacacatatttgcataactcttaatggcatcaaaagtaattatatattttaataaaatataagaaaggaaaagaaactattaaatgtaagaaaactatccatgtatgtgtagttccacagcaaaaaggggaaataaataaaacataatgtttaaaaattgttatctgtcatgtaaatgtaaatacaagaagggcagagtagaaaccttgatatttgataatcagtatcacattacaaagcattaacatactgtggttctcaaagtttaatgtgcataggagtcacatgaaattgggaggagggatccttaaaatgctaatccctggggatatttcacagaaacgtagatccactaggaatgggatgtggcgtaagaatgtgtatttttacatttacccactcacaagttatcctgatgcctgtgagtctgaggcctttgagaaacactgaaagtgacattcaatacaatctagttcccattttcaaaccttatgctaaacctgagcttttatgttggttgtttcctatagtcataagaataaataaggaaggggtaattttgttacagaagtgctaaattgatgctccctttttgactcccctaatttgagttattcctttttaaagttcagtatgatgggctaattcccaggtgtcactatctctctttcagagtgatagccctgtcattgttctctgtagctattgctctgtttcgtgtaatgtttcaattatttagatatttagggttattgtatctaattataagaaatttctaaaagatgaaaataatgagttgttactaggtttggtgaagtatttctaaattttgaggattgtgtctttttctcttcattttgaaagctcagacttagattttaaaagaacaaatctgcttaatacctctttccattactttttttcttagcaaataagaacttataaatcatgtgatacatttacggaagtttacatgtacatttggtgaatatcactttattgtatttctgtttcctatatgtcatttagcaacttcatttttataatttgtaattttaagtttacaaaaggttttttttatttcagtgaaagtgtttagtaggggcatattcagatcttaaattgtgatgttaaaggttcaataagatattatttttatagtgaaggctgaagtttttaatcaaaatccttttattggatttcaggcttatagacattttttgtctctattagtctttgtgtacacttgttcacattatgtagaattttttatccataacgtatcaaaaggcaacaataaacctttcatcaaaaagaagtatatcttaatagtgccaattagcacatattagctattagttttacatgtagagaattgaatatagtcatttgcataaaataatagagtacttttttcaagtaatcaaaattaaaaatttgcagtattggattaactataataatgaagtttcacatgcacttgttattagaattgtgctcactagtaagattgtcatacctgaacatagcctaaaatttgtagttcacaagtttatcattggataaaatctccaaataaaatttcataaagcttttagtgtaaatcatctgcaatatttcaatttcagagaagcatacctttactcatctctctctttctttctttttttcttattacttattttttctggaaaaaggaacaggtagagaaagaatgaattgtgtcttgaagtgaatcatgttyattatcattggtgtatttatcagactatgtttttaagttgcagtttcttaaagaaaacttacaatgtagtttcagggaacctgagcaagacagtctcaatacgcaggaagcaaaacatgcaacagaagaataaattacagaaactttatagaatcatagaaacataaagttttagagcagaaatggaccattttgatcttctagtctgtcccctcatgtataatcacattttctcttcatataaaagtctcttcatataaaagtttctcatataaaagtctaacacaatgagtagtaaacaacaatctggttagggatgacatcaacaaggggaagttaagtgggtgtttttcaataatgatttcttcaataagaaaactaaggggaaatttttcctccaagatgaacattgaagatttatagatacctaagtacttaaaattgaatttaaaataatttgtgtccaattagatcgaaataatttttaggtataattcttcatttgtggaatattgtagtggtatgaaattctccatgttttcttcttcattaaacactgataatttcaaattatgacaattaattccttggaaagattctttatttcttgtatcaaataagacaatgtactttcaagaattctctaactataatagttccatttggaggataatgttayatgtttggttccattagtgttaatatgtcttaattctctggtgtaacatacgkttagtttcaccattattacaaccagctgcggttggcctacgattttgttcattctgtctgaatccaaagtaattagctctttagtttaatgacaatatttgttaatgggtttttagggccaaattctgctgttcgagagtggstggtatatttgaagataaaacctggcccttatgttgtaagcataagctgtgtaattttacttcaagatgatggtttacagagtttggggtaggaaaactaaatgtgcatttgtctgaagtttctcattttcaagaagcagaaaataaaagtgacagtttatgtagatgaacagcaaacccactgaaagttccctgatacagctatcctgcatgtgttattctatagctagaatatggaacacaatgacaattatcaaacaggctttagatacattcttttatgtgacaggacacacactgagtttttaaagtgcagtgcaacagttttgatcattgtatttttgaaggayttagtgaagtggaaagaatccttgcctgggagtcactagggttcaaagtctgactcagcttcctagtagcggcatgaccctaagaaaatattttcacctttgcctgaacctgtttcttcatcctaaaataagacttttacaccagatgatcccagagggtcttactggccctaaaatgataagtctaacttgctttaaaagagcactataaaaggatggtagggaagatgcaatgacttgagctgactgaacaaacaaaacagcaagtctactactagaaggtacatggggatattttggccttacaaactttccttcaaygccttgttacttttatcctrgagtagagaaatatttgaagggttttatgtagaagagactataagtcatgctattggaagtttcaaggagatgaattttggcaaaatttgaaaaaacttacaaaactagtaacagttgagatacccaacaatgaataggatgccatggtagataatgaattcaccatcccttatggtaccaaaggttttatgacctgcccaactgcccttcaaggtgtaaaggctagaggcaaattttctgaacatactggaacttaggaaatattgttatcaagagtccatcttgaaacaaccattagcaactattagagcccttcttgaagcaactattatctatccagccaataagtgactatagaaattactgcaaaaaaactgattgcaagcattgaatatttaactctagcwctaaatctaagataaatatagagattagggtgatgtaatagaacataaaagtataatgtcctgacaatgtaaaactaaaacaactaacaaaaattaggaaagacacaacagaaagaagtcggtgtgtgtgtgtgtgtgtgtgtgtgtgtatatatatatgtatatatatatgtataaaataagttatttgattactttattctcaatatcaaggaatcaatgaatatttttcaaactcacaatcaaactatagaagtataagcagatttaagagtacaaaaaaagatataaaggagctattgttattgcccagaaatagctggtaaaaaatggaaacagagagagaacttttcctctcacacataataggaaaatagtaaacattctaaagagataaattatcaaggttatgagattatagaaatgatataatttattatgtgagcctataaacattatgaattagaagaaaatttatattttgaagttacccaaaatagaccatatcatgaaagattttctcaaatcctttgtgacagtatgtttctgtcatatctttcacatcaataaatataaaaaatacacttatttctttaaaatattttcaaattgtatcgtagcataaaacccaattctaagttatacaagtatacaaccaatagaagctaattcaaaactttgaaaatgaaaggataggcaaaggtgtactgggaaaatgctatctaaagaaattaggaattaaaaatcttagtatcagaaaacataaaatttcagggcccaaaagcatttactaacacaaaagagggactctataataaatgctgatgggtataatacataatgaaggtatatgatcttgaataagtaatagctttaagagctaccataraagtttgttcagcaaataaacttctgaaaacatcccaagaaatagaaataacccattttttaggtggtagactaagtttaaaaattcagctcctgtattatgaagccaaatatttatattgaaatttattttcaagacaaaatatttctatatcaaagataattaaaactactcattaaccaaaaattaggtacttaaccagtcactaaatttttttcattatcaacaaaaagaggttccacgtagcttctctttttgaaaagaaagcaagcaagcttccaataaggctgtaaacgtatgcataaaacttttttgatttgaagaaaaatggaatgtttggactccccctaccctaaacagctattctaaacagcaggatataattccagagtttctgcagtcaagaggtttctgctgagcagaaatwmttcttcaatttaggaatgcagatgataataattttcctatccttctcgcagcaggtttcctgccttcattttgcagactcctaagctcagttaaaaacaaatagggaatttcagttccaggtaacacattcttcaaacatagtcccattaacccaacttagttatcatgcaaagccgcttagcttcactagtgaaatggaatacagttgaattgcctttctaatgtaatacccatttgtgataaatgcaaagtggtttatgatggcaaattttgtagagcatgaaaacttatgagaaaagaagcttatattttctaacctaaaattatgaagaaatgtcatatatgttggcatgggatactcctattaaaatgaaaaaaatattcaaaaatgaaaatttaacacttggcctttattatatatacctcagcaaaaaaaaaattaaatcgaactattatatttcacagtaacatttttcctaccttgcacattctttctaatttaaatgaagtttctctagtttaatttctttccttctactagatctcaaccacgtggcccaaaatttccttgtttaggaaagtaaagattgctcaaatacatcttttgtctgctgatacaagaataatcttttctgtataaatgcaacttaaactatctaaaccacacattactacagagtaggtcactaagacattggacttatccttcaaatgagtaaattctagatggtagtttcctcaggttagctaaaatcatatttgataagatgagtgtcttagctaacattttacagccacaaaccattctatcttcattccttgctcaggtaactcactttgttcttccattccttgctcttccttcacgagcagggtayatatacactgtgccatagcaaccacatttctatcrtgcgtcatcaacatagccaaatttaatgactgattttaataatagaaaaagtaagtttccagccaagctcaatatgaactttataaatgatagtggcttgatgtgagtgttctgatgcaggagagttgtgcattgtacagtgatttcagctgagaatcaagacccattcctatatacattgtaattcaatgcattcttcatttcttcattcattcaacaagcatttggttaataactactttgtggtaggctgttctaagacttgagatacatcattgaatgaagcagacgacaagctctattttcatggccttgttgaggcatggcaggcaataaaaaacaattataacaagtaaatgaattatgtggcattatggactacaataaggtataaaagaaagaaaacctaaataaaacataaaatggataagaaacaatatgacaagatatgagacgtgagatcggatcctatactttgttccagttcttctggctgatgtttttcaatgttcattcttgttgtcttaaaatcagaatatgtgaattagatttggagagtggagtctttattaaatgagtgttgcgcaaattttctttgtttaataatcagcttctctacatttgatattcatacttgagatacttacaagctctccccaagcaatactgtgggatttccaaaagggtcaaacaatgaagaatattaaatttaaatttattttctttttcccgatagtttasaacccatggagtaattttaaattattatagtatcactataactgtaattcttgtcagtgatgttaagcaaagcctaattagtttaaaaagatgcaaacatcagctaagagtatgttaacttttagaatctacccggattttaaaggtatgtcattatggaaccattagataaaattcttacttgattatcagaaaaatgaggactgaactttacatttgaatatatatttttaaatattttatgtatctttttaaaattatccattttataagtacttttcagtaaaatttagtaaatttagaacccatggaataattttaaactattatagtatcactataactgtaatcctggtcagtgatgttaagcaaagcctaattagttcaaaaagattcaaatgtcaggtaagagtatgttaacttttagaatttaccttgattttgaaggtatgtcatyatggaaccattagataaaattgttacttgattatcagaaaaatgaggactgaactttaaattcgaatacatatttttatgtactatatgtattttttaatcacctatagtaatttttataggtaattttattaaaaatgtaggtaattatagtaaaatgatgccacttttagacttatttttatgttaattaccatgtaaattcttacctaccagtcctgtagcatcacagactgattgagctggaagtaatttcagaatttctagtccaactgcctttgtttgacaggtgtgtgaaaactgagttccagagagggaaagtaatttgtccaggttagatggtgtgtgcaagtccctgtgccagttaataatagaactgagttggaaaggaaacctattcttttaaatcccaacctagtatgtttttttgtaattgactctacttgagatttttcattgcctattatcaaaataatgtttcccttaaaattaaggagaattgaccatatctttgcatttcttaaagttatctaattattgagtgtgcctaagctccctgaaatagcctcagttgtttaaaaacctcttcagcacaactggaattagacttttaaaaaaatgagaatgatcttatctacagccacaccaccctgaacgtgtccaatctcatcagatctcagaagctaagcagggtcggagctgtttagtatttggacagaagaatgatctctggagatttttttttctttgaaaaataaatgaaattatttatgaagccatgaaatgacttaccatatatttatcaatatatggcacaaataaaatacaactgtattatttttcaatgaattatgaaagaagaaaatactaagtagtaaagtgctgagcttggaaaataacttaagtaacgtctgtgccctgggttcctccgagtccttaggaagtgatacagagtcatttgaaaactctttgaaacctcatatgggaaaattacataactcactggaaaatttcagtagatttaatagagcagaaagttaatatattcaaaacacaaagaaaagtataaaagactgtctgctaagcctagggagtttcatatgcaaaaaattaaataattaaagcaacatcagttattttcaaagacagttctgagtttaagcattataatacatcataaaaaattatgcatttggtgcttataaayggattctaaatttccttgaaatgaaagataaaaccatggctttatataatggcaaaatgaggctttctcattgcacagaatagaattttcgtatgtatttccaggcataccatttattaaaccaatataatttaaattgtaagaaaatttaaaaatatgtataactttagagacagggctctaaatggtttgataaagaatgattatggaagaagctgtaaacaactaaagtcctgaagacttaataagtactttatgaacttttcaaggttttcatggtttttctggtagtgaatgaaatagaaaaataaataattcaaccagcttttactttgattgttgtacatttttgaatcatataaaattaagaagctaaaaactggatcttctacctgttccagtacacatggtaccattcaattaaagtcttctattgataagtaaagctcattgaaaatcacagtttaaaactacatctgattcttattaatgtgatgcccaattattagcattctcgcattaggcattttagactaattgtttattattttcaataataacaaaaaatgcttaaaaaatacaaagctaatatatttcaccttaccaatgaaagaaaaactgtgaaaataactaatttacgcttatttttgatggcctgaattcattttgtctgaagcccttagtgatgtccttggaaatgtttatccctctcctttccctctaccccttcccccatgaatatgtatgtgatttagaaggcaacattttttttgcatatgcttttcccaaaggaactttatttttcatttttaatcacttcatagttgaattgtcctctgatcaacaaggggattagtgggccacacgtcccctctacgtaaacctatatggtccaagagtgttgtattttgcctcttgggctgagtaaaatcgaacctacctttgcctttcgttgttttttcacacattatgtaaattggtaagaataaaaataatgtgattggaagtacagcttgacagacaatatagtgtaatayaatatccaaatacttatgaggtagcaatagtgccttggggcaccacatttattgtgaatgaggatttgcatttacacatttttctctatggtttagattgcatactaaattgctgtgggaaagtagaactgtttttaaaacattctgcttaaccactytacgggtaacaaagaaatgccaaatccagtttcaatctaatttgggaagtaaagtacagaggcacaagaagtcacattacacaagagttaataataaatagaaatttctgtatggattgacatgaccgttataaattatccttctatatttcatatctaaataaattcagtgtgtgcagaagtttaagcaaaaaaaaatagatttaaaaagttttattcatgatttaacagcaagagtatatttcctaatgatttagactttggacataaaaaagttacgtgtttgattctgaacagggaccaagtaatacaactctgattctaggcctactcagggaatggcatttttcatttctttaggctatgctgtttaaataccagctgtttaaataccagttcactcccagctcatcataaaaccacatcattccttcraaacctcgcacctactgatgagcttagtaacctttcaactaagtttttcagttttccaaaagaagcaaaatttttaacattgaggttttgagtgttgtttagtttctgaagagaattattcataccaatatatgtttgtgtaaatatcaaagacctttgtcattgaaaccggaactgcttagttgttcaggtaacaaaatgaaaacattcttttccattttgttttgcaccttagcactgagagtcatcacttacaggaaacaatatatttaaatttgtatgtagaccgggcacrgcggctcactcctgtaatcccagcactttgggaggccaaggtggacagatcatctgaggtcaggggtttgagaccagcctggccgacatgacgaaacgctgtctcttctaaaaatacaaaacttaactgggcatggtagcaggcacctgtaatcccagctactcaggaggctgaggcaggaaaatcacttgaacctgggaggyggaggttgcggtgagccgagatcatgccactgccctccagcctgggtgacagagcgacactctgtctcaaaaaaaagaagaaaagaaaagaagaaatacgtatgtagtttagtgtttgttagaatcatacaagatggtaacttaaatatttaggctaacactaaactcattttaatgcaaggagagtgagggaagtgagtcctactttttccaggttagtggtagagccatctgtggctgagttttctgataacatacaaggcartatagaatagtgattatgaatgtgagctctggaattggatggcctaaattcaagtccccacttctgctacttactagctgcgtgaccttggacaccttcagtttgctaagtctcaatttcctcatctgtaaaatgcagatgataacattgccaacatcttaggactattggaattaaaagagatgtactttacattgtaaactacattgtaaggctcagtagatatagactgttctcatttgtgctattccaaatggtctctcttgttgttccaaaacggaaatcttgccatgaacactttgaactccgattgctgcttcattttcattgttttcattgacttgaaaatgaagaaactgttaatatacaactttatataattatataactatatatgaatagtatatacatatgcatatgcatatattgagttgtgaaaatattcaagtgagattgtttaatagaatacttttattctcaggatagtggttgctttaaacctgcagctttggaaaaggatttaaatggcaacctaatgactttgtcatcataaccacataaaagatctggcaagatgtgtaaatttggccatatgggcatggttggcaagacctttgagttgaaattgaactcacccaacaagttgtttcatcaaaacattgcctggaaatgtttttatcttactacatggtggttggctttctagctaaatccgttagtaaatggagaatgtggccagttagaatagtatgaagcaggagattcggttcatccaaattgttgagcagctggagcaagtgagtcatgttcaactgacactggacagctgtccgtcagctcatmatcatgagaagagctttatgaaaaagcagctggcttcagcactgcagcatcatcagagaaatgcaactgcctgaaataacccaaactttcctcccatccttgcctaccctgagagagctttaacctactgtgggcagccatgaagtccttccccaactaaaaccatgcaaccttccatcaaggaaggtattctttaggtgtcctgcactttcagttttcttttccttttttttttttttttttttttaaggaggacgattctgttctctatctctgggtttttttcctgaaggttttctgagtcagaataagaagttcatcagaaaccattttgatggaataaactagcatgccttcacacattagctcattctctagttcacttttttcaacttcctgtagatagtaaagcaatgaatatgcaatgagaggatatgtgtgtctatatgtatgtctactgtagtgtaaacatgttgatgagtggaattgttcttttagcaaagattaaaagtatcactagaatgcctcctgattgccagcaatgaagctttgtttactattttgggaccacagagtataaaaaaattaacagcctgtatcataactgaagttgcatgcatttatgatatgctggttttatttgtgcattgttgcaatgggctttgccagattgctgagaagagactgctgcaagttaacaagtcacagggctgcctgaatgatttgatttactccagggtctagccagtgcattcagctttatttgttaacctagcagaacattatttattaatgagttcttcatgctttattaaacctaatgtcaaaacacctctctgggaccctactaggcatgtttcctctttgtggtaaggtcttccaaagaaaatgaaaaattatgcagcagagccgcagttaaaacccaatagataccagttcaattgtccttgatcctgtcagatggtatttctgaatctttgtgaaagatcagaatatgatgcagtatggaactgaaattaaagagtccgctcctttagatgtcagtaattagatcccaccaaaatgaaacaaagcttctgtggccccagaagatgagtggactcatcagcggtcacagctaacaaattcaacaggaggtgaaaagtacagatgcagtctgtacaacagtaatgaggaggtataggcttatgcagatatcatagtgatttgagattaataacaatgtgaaataactaaacacagctgtggcataggggcaatagactctattctgaatataccaccgagtctgctggcatatagcagcaggggcctgtgggaaaggagaggaagccttgatggccaggaggacaaccagtgggtatgacaacatacaaaaggcaaaaggcatggaactgtcagctgaggattctcctggcttcctgggggaggggtgggactcaataagggcagaagggtcatatccatggggaaatccaggcagcagggggatataaaagggtaggtgagtgttgacaccctggtttaaggcatcatgacacactcatcaatcacttgtagggagaaccagaaatggaaccagccagggttcggggtcccatgcaagaagactcgatttctctgtcctgagttttttgttgctgttgtttcttgtttgtttgtttgtttttgagacagagtctcgctctgtcacccaggctggagtgcagtggcgtgacctcggctcactggaagctccgcctcccggattcatgccattctcctgcctcagcctcccgagaagctgagactacaggggcccgccacgacgcctggctaattttttgtattttttagtagagacggggtttcaccatgttagccaggatggtctcgatctcctgacctcgtgatcygcccgcctcggcctcccaaactgctgggattacaggcatgagccaccgcgcctggccctgagtttttatcaggaaactacaggacagaaactaaggtttagaaataatagggagtaattactctatctcagcagtctgtgcaagtgtccaggacctatccctgtcacaggatacatgaggtctattggtagtgaggtccaacagcaagtcatgctagatgctgggactgaggctgtatctgccctttctattggccaccaggtttccktgtgccatgattagcttaagagttggaagcatcagtgattcttgttctggggcctagagaaattgggctcagaaatagtgtctgaaaagagagctgtctattttataatttctcagtcttgctctctaccttttgtaacagctaaaattctgygtggcatacaactcagtatttaattatgcagattttgttactgtcctttctaattgtttctgacgtgcagttaaggagtaattatgagctcctatcatgtgctggacacattgggaattaaaaacgtgtctcagttacaaatcttacgggaaacttacaacagagtgaggaaatatacatgtccaaatgtaaggctattataagttaaaaagttgtcaaggtcatgaaagagtaaaaaaggctggggaactgatacagtttgaaggagactaaggagatgtgacaattaaatgcaatgtgggatcctgaattggctcctggacgagaaaaagtacgttgctggaaaaactggggaaattcaaataaactggaatgtttagttaaaagttatgcaagatactaacattgggagaagctagttaaagggtataacaggaactctgcaacttgtctgtaagtctacatttatttcagattaaaagtttgaaaagtgataaatgctatagggaagatgcagatgactatctttggatgtttgagaaagaaagctttacttcagttggcgaaataaagcttcataaagaggcagttagatatccaaaggtaagataagagacatttcctgggacagaaaacagagtgaatgaaggcttaaaatcaggaaaagggagaacttctctaggaaagaaaaacagaataagtaaaatgaagagcattgtaggccttgaggaagaacttaagatacaatttataggtatagagagaggcgagaacatgtagaaagattagtaagcaatttgatttgctagagttcaccatatgtgaactgagactgagtggggatcaaagatggactggggatcgtagagataaaatagtgaaagattttgaataccaagttaggagtttttcatgcctctcctatgcagcaagatatccctgcacgtgttttaccttgtcctctaggagactatggatgagtatgataaaactgggattgtaccttatcttgagatacctggggacaggtatacaggaggaaatatcttaaattggaatgttacaaagaaaagggaggaagctgcagagaatgctttaatctgaaagccagaagacaatactgtacctgggagaaaggttaaaagtgataacagacaggaggaagggaaatactagaccgagaaaggcagagtccctggtgaagcccaccctcaagtctggacccacagcccagagtgagaacatgcattcctgttttcctgcccaatgttgccctttccaaaactagctttgcctgccctgcccacccccccacccccgccgccatcctgtacccataaaaaccccaggctctactggcagcagagcagcaaagaaggagagaagaggagaggaaaggagaggagaggagaggagaagagaagcagccggatgtcagaaagaagaaacagcttgacttcagaaggatggcttgacggcaggacttcgaagaagagttcaaccagggatggccgaactccaggggaaggccacattcccaatccatcccctttctagctctccatcccgctgagagccactttcatcggcaataaaatcctctgcatttaccatcttcaattcattcgtgtgacctgattcttcctgtatgctgaacgagagctcaggatacagaaggctgtcacaytgagctgttaaacacttaagccatttgsagacagcaaagctaaaagtcctgtcagcacccagaagcactcgacctagcccctgcatccactcacctgcattctccccctcccatgaggggttgagggttgcaggctgagtacacaaaccacccctttctcgagtcccttgaaggggtcaagggagctatcccatttcaaaagaacttactaactagagtgaaggctcttactaacctactgaaacaggcaagttaagagtgttgtaaacacaggcaatatatttagagttaactgctttaaatgttttcaagagataaaatggagagagctttctttgatagaattgcaaaagtaaatatgtctaagttaaaaagaggactattaaaatgctaaataatactgggaattatctaaatatataaaagcatttatggtctaattaatgctttttttagtagggaatagtaaactgcaactgatgttttgttttctccaccaggatctatagaatatgaatgttggcatcatggtgttagggttcaaaaggaggaatgataaattggaggagtgctcattactctggggcagcaagtgagaaaagagcaatgaaacatcaacatcaccatgtatccatacatctcccaactgaatggtagaagctctctgtagagaaaatatattaggaatttggaatatccatcatcactatgactacaactttgcagaaggccagcctgcccttgttgaagaaagctctgtgtatcctagagaggagactccctgtggtgataatgatcctattaactcccagtcagtgtctactaaggagcctggttataagtgaacagcattatctgttagcaagcagggactccattaacacaaacccctttaatcggggatccaggagaggccgttatagaccacacccacagccatgcttgaaatattggactctggttgccagttctcacaaaatcattccaaagtgtgacaatatgtctttctatcatatttcccacgctgttgcagaacaatgtggggcacataacatgtgcacatgttatgttacttgaggatatttttcccattcattatgttttaggcattagcaattaccttacatgatctttcaataattccaaagcttctgagtattcagagtctattttgaattctatttgattcttcttgcttagtctgttatgccaagtattttctgttccactatagtatcataagtggaaacaattttctggtccttctgtgtaattcaggaatatattaatgaaagctggttttaatacatttttccctgatatttataaagttaaatgcttgtcttagtaaatggagtctttatattaatagaatatggcataattttaggaaatatattcatgagtctcataaaaaattcctraagttactaaaaagaaaaatcatttatatagccatcatataaaatgtttgtataatttcatctttaattttattattttgaaatggcttttagaatgagtcataggaaccagtggctctctggaaataaaacttacagatgtcatgaaactgaggaataactcacacaatggaagttaggatcaagactgagaaagatctgtattgtctacaaaactgggctaaatccgaggaaataagatgaagtggaaataaatgtaaagtcccattctccaattaaaaatttaaaaagtaaattgggaggaacttagaaagaaaaacatatatgaaagattctgggcattcatttaataattaactcagtatgagttagagatgtgatgtaattgcctaaaagctcatatgatattagattatatttgtaataagaatgtgtccagcatgacaacctgtcttactctaggttggtcacatctgcagccatgcctaaaatagtacattatgttttgaaagctgcactttactaaagcagagacaaaatgtgttcagagtacgacacctaggattataaaagggttgaggagtaacctgaaggaatgggaacctttggcctggaggaggtaagatatagtgcgggactgaaaactgtcttcaatatttgaaggctgacttggagaatatggaatttagacataggataaaagagggaggaaagtgtggaatggtatgtaaatcttgtctcaatttacrtagaaattttataactatgaccaagatgtctggcaagtagcagttgtccctgaattgggcaaaggccaatcactgctcattgcaaatgctgagcgagctatatctaaatgcagttggtctgagggaacagagcgccttgtccttggtaccttctaaacctagatgtgaatgacacagaagtgtcccagacsttaactgggtatagtacatgctcttatggactataatgctgttatggtccatttgtctcttggaattgtaacaaaatatcagtttygcgttcatagtaagccatttaatgcagcccctgttaatccagttcatattagttgatgttcacattgccgctgcttaagctggagaattgctaacagttttcttgtccatttttttcagaaaccagagcagctgctacaatagctaaaataagctaaaatcccttaagacatgaattgtgatcacagattttttaatgcattttttgttcatataattgaggtgcaagtctacaagaggcttttgctttcaaattatgtaatgaaaatgtagaatatacctagaggggcacacagatgaatggagctacaaaatcactactgctcatatggaatttttatttcctaatttcagtttgtaattactactaataatgaatattttgtctaagtgtttttgcaacatttccattttatttcatctggttgatttacaatagagtatttacattttttgccttggatgacatatcaattttgttactttggcctttgacagaaaaatcaaaggctatgaacaacctggtatggtgtcaaaattctatttgagtaataattttaatagatttttttaaaaagcccaagatacattgaaagttcaccttatgctattgcctgagaattttctctttctatattaccctgaaaggagaacaaacttgaagtttatgctactgtgcagcaacatacacaagcattcatatgtgtgtgtttgtattttcactccctttcttccctctcctccttctcccatttcttttttcccccttctgacttccagtcattcacccaagatatttgaggttgtattctttaactgatatgggctatttatttctaaccaacttaaattaataattgcatgccagtttctactataagggatagcaaaataaaaattggaacagttacaagtaattttcatcttctgcttaatggctttctttttattaaaataagcatccagaatttgaataccaaatcatttattctaacactgcttaatgagttggtgagaagataagcaatactcaatagaaaagctgaaagaatacaggaagcaaaaatgtaggaagaagaaactttaaaaaaaagagaaaattgggtcagaggaaaataatcttgaaaattatgcacaggaacattgttaaaaaaagaaggtataaaaaatacacaagtttttttttcagtaataaaaaaggaattcaaaatgcacattttttaaaaatttaaaatatataattagtaatttccaaaacaaaaacagtgccaaaatttagcatatacttaatgaaactttgcttaattgaattgaattgactgtagagaatgtacagtctcactggcaatgcagaatgtaaaaaagaacattatacccattttagtttggcaatgatgaagtgattctgaaaacctgtacagcccagattccacagcccccacacctcataattccaatttaactaaactaaaatctgttctttacatgccagcaattgttatgatcccttgtggatttaattcctatccttcttgtttggctttggctacattcattgtattcattgtccaggagtatttagtgagcttatagtatagccctataagcactatatttgggaataaacacataacccaagacaaaccctaaactttaaaatagctgcatcatgatttacaatgaacaaaacaccttgcataaaattgtataaagactagttaaagcaggcattatcatcgccttctcaaaattgagagagctaaagcttagagacatcaaaagactcatccagggtcactgagtaagtaaaggagacaagaatgtttctttcctacaatgcaataccaacaaacgtatctatagcttttattagtctatggaccagtcagattcagagtcaacacggcaatttgaaaggatggggtctcctggtgggttgcacactcgcccctgcaatgatcctctcttcagttctcataagcaatatgattctttgtactattctcccccagctaggaagcatttggccttgatcttattggtggtcatgaagattaaatgataccattggcatttagtactcagggtcaagggacaataattgtctgggtgaatgaccagtgcccacaatgaagagttcttcaaccccaaatgtggacagtgcctatgttgaaagcatgttagaggtgaattacaaatagtgaattatgatgtgtttttaaaaattaggccctcataaactaaaattgatgattatcagaatttattgagaatgtgcctaagaatgggccaccaacactcagaagcycccrcacatccacacaaaacattggggtgtccccagtttttagaagaagcattatcagtgtctcaatgattaagttttcagttggctagggtttttaatygctactatttctagttttaattcatcattatctacttaggttattatgaattatttggttaaccgtgaagtatttagtgatccctacttttgtgagtgatatttttggcctaacttagagtaactatactgtagtaagacatgggatgtattgtggttcaaagagggatccctcatacttccatcactagagtagatatatgcacaaacttccctcagaattacacagcatagtatgatatagagtagtatagtacagcacagtataagacatatggtatagaatggtataattgtattacatagtagtaaggtatgttaatagtataatagtactatagatagtacaatataatacagcaacagtataatatagttagtaaggtattatgtatcaccaagattttttttcattggaaaggtgtaaaagacaaatgggtggtggaggcaggggagtcttttgtccaaccaaagtcagttaaaggagagagagtgagagagagagcctgagttatagagcaggataatctgagtttggacttctcgctgagaatgcttggcatgaaacagtagggatgagccttcttcaccatgactgtctttaggggaatccactaggctgctttaatgctgctctttatgcttctctatttataatgaagtgctgtgagaccctgtagcagagatagtattgttttttgtttcaatatcaactggtactttttctctacaatgaaaaatgttttgtccataatatatatcacctcgtctctggttttattgttgaaaaccacctgacttgcgctccttttcttttcaacattttttattaagaaaatatttggaaggaagcaataatactaaattgcagaattacaaaagggcagcttatacagctaaattttaagatactctgagggacaaagaaataaagccactgatgctgggtaagaaaaatgtgtgacaatggaagtatgcaatgtgatttacttggctggctaccatgtaggaggaataaattctataatcttgccaaaacctaagggaaatgtgaattgaatagcaataaataaccttattggaaacagttgaatgtgatatactgtatcctctagccttaatacatgaaaatttctcattgattgcagcatcagactcaagtagactgaagatggggcaatttttaatgtactccacaatgtcccttctgttccctgccacaaccttctcaaacttgatgagttagaaggtcaggttaatctatgtatgcaactccaggctttttggcctctttcaggattaaataaaacttatagaaaatgtttttctctgttcctttcattttgttgttcagaagccattctatgtttataaatactgtatgtttagtaacattttaatttctcttattcgactaatgttttaaaggtatgaccactttagaacattttcttattcaaccctcacagtattgctgtgagctaaaagagagtattatttttcttgcatgtttacagttgagaacattcaggcttagagtgttatgtgacttgctcaatcatatgtagcaagtaagtggccaatctggggccagatatctggtttctgcatcccaaaactgagttaataagaattttttcatgtgaatgattataatttatgatagttttatttctgctgaaatgtctagttataccatatttttattactgagcaatgttatagatgaataagatgcaatttgctagcttcattcagacagtttctcacttattttaaaaatgtgagtatctatctgttttgtgcatcaggaggaaaaaagaaaaagagatacaaaaactgccctcaaggagtttacagtctagaggggaagcaaataaataaatgtgttcactgcaataccataacaatttgtgtagtacaataaaaaatacatttggtctttgtccttcctccacccccaataaagctcctaaaaactgttcgaatttcctgagtgataagggtgtcttttcgtctgttaattagatgactcaagagtgaagagggagcaggaaggtctagaaaaatggaatagaaatagagaacccagaaataaatgcaggaattagagcaggggtccccaaccccctggtactggtccatagcctgttacaaaccaggccacacagcaggaggtgaatcgtagggttgggggtttggggtgggaaagtgaacattacctcctgagctccacctcctgtcagatcagtggcagcattagattcttatagaagcatgaacactattgtgaactgcacgtgtgagggatctaagttgcctgttctgtatgagaatctaatgcctgatgatctgaagtagaacagtttcatcccaaaaccatccccaaccactaccccgagtccataaaaaaattggtccttttcacaaaagaggtccctgctgccaaaaaggttgaggactaccaaactagagagttaaccctttcagccccaccagttgatgtccagggagcggggaagggctggtgattgagttaaatcatcaatgaccaatgatctcatcaatcatgcctatgaaatgtaacttcaattaaaaactttgagacttcaagactaagagtccttccagaatggtggacatgttgatacattgggagggcagagtaactggagagggaatggaagctctgtgctccctaactccctatatcttcccctatgcctctcttccatttggtgtctcctgagttgcatccttaataataggctggttattgtaagtacagtgtagtgttttcctgagttccatgagtcattctagcaaataattatacctaataggctggttattggaacctctaaatttgtaaccaagtcagacagaaatctaggtagccagaggacccaggacttgaaactgcatctgaagtgggacatccttgtggaactgagcccttaacgtgtgggatctgcacgaattctacgtagttagtatcaaaattgaattaaattgttggaaacctagtttgtgttagaaaactgtagaattgggtgttgtttggaaaaaacaaacggcagtgttcactatgccctcaagaaaaggccgtgagcatggttcaaggcatatggagtgtgcatggccagtatgatacccttttgattaccatgtattcatgtttctaccaggcatgttgtgtacttatcaagagctggtagaatttggtcccaaactatttgtgccaatagtattctcgggatagctgtatattttagttaaatgtttaacaggttttagaaatataagtacaaaatgaaagggtagtttctatgaaaatcaagtaaattctttggaaagactcaataaaggcaagttacaaaaaaattctatcaaagtggacaagacaactcaaatattaaagaaaaaataattctggaaagtttaaaaataaagtgtgtgttttatactataaaagtaaatcttatagtgtaaaattacccaaaaaaatactttaaaacatacttagagctttttaaaaatatatgtaaatatgaattaccagtacagaagttttagatttaaaaaatgcatcaaccctaaaaattcgtcagagatgtctatagtattattttgaagatatgaaactggaatttgtagatggtaaaatataggttgtgacttagtaaggaagaaaataaaagagtaccaatcaccagtcctacattcaaagaaaaggccttgattttcctttaaaagatgatttcataatgcatgttgggacctagaaactgatacctcaaagtgtggcattttgacatgctgaactgaagaagcctcaaggtcattctgaccttctatcccaccactgtctctcccaaagcccttatctgcctcagatccagacctatgaaaaggaacaattgttatttttcccttccctgtaagaccaagaatgtaaccacacctgaacaaagcttttcacaggaaaatgtacaagctaatctctgttccctgatgcattcattctccctagtaattccttccacagaattcctcttctctccatggccataacctattttgccaggatggtatacacgcttccgaaccctgttggagggtagggaatcactctgtggttctccctatgtayacattaataaatttgtatgccttttctttaattgtaactgcccaatgggttcctcttgcctgctgcacagaaaatccaatcacactaagacagtggtgttgtggtagagaaaacatttaattattgctaagccagccatgcaggacaggagacatttctcaaatctgcctcccaaaagctcggagcctaggatttgtaaggataatttggcagagagaggctagggaatgggtgcagttgatggttggggatgaaatcagaagagtgtttaaactgtctttgtgtgctgagtcagtttcagggkagggggagtagtcacaggaccagttgacttcattccttggtatgacttagttccttgctgtgcatttgggctgtcatcagaatgcaaaagtctgaaaaatatctcaaagaccaatcttagacactatttgacaataatgatgttatctataggagcgactggggaagttacaaatcttgtgacctcccgaagatggccatcatcatctaattatgcctacatcttagtagaattcagggttcccacataatcctaaccttgtggcctttcatcagtcttacaaaggcggttcagtctccaagcaaggagggagttaatttcaggaaggaactgttaccatctttgtgttamagctaaccaaggcagatagcttgtgaggttagaagccagatggagtcccttaggttagatttctgtcactgttataatttttaaaactacaaaggcagtttcacagttaatctgtcttttgtgagttcagcaagccttcagagggaaaaggggaggtttcccttggcccctacatcttttaagttaacgtgaaatgtacatsttttaagttaacgtgaaatgtacaaatgtacaaagtattaattgtcaatttcccactttagccactttcgcagttaactaaccaccagttctgattacaaaacaagagagttggccatgcctcaactattctgtttttggttaaaatttttgaagttatcgcctgaaagcctagaagataatgttcaaaatttaaattatttgcaacaccattttgtcagaagggaattatgacttcagttttcatttgaggagagttaatcaaattttagtgagtatattactctcatatttattttgaaataaaaagcatagccctcaaatttttctcttttcttctaaattatttatagaacaatagagctctctgaatctaccaaatgtctgcttcattactcttcctccaggctggcttcccctaactattctagactatgtaggaatgtgctctaggctcatgatttcctaagagaggattttgtgactttgctcatttacctgtaaatgaacctgacagccaacctattgagattttaattttccatgcatcaaaccctagtctcacctgctgctagtttcaaactccacttgtttaatttgttcaaatattcattgactatttctatgtaacaggaactctctgggcacttgagatacaaagattcctgccttcatggtacttatattttaraggggaggggagaagataatcagaaaatagcaataaatacaacaggaaaattaatgagtatattagaaaacagtacaatgggaggaaggcagcaggataagtggggtcaggaggaccaaggattggagaatggggttgcaggatttttaaaaattttttatagagacgaggtcttggctrtgttgcccaggctagtgtcaaacgcctggtctcaagcaaccctgctcctcaacctctyaaagtgctaggattacaggtgtgactcattttccccggccttttgaaatttttttttaaacttttttgtagaggttgcagttttaaatagggtggtcaagatagcctctgatgtgatttggctgtgtccccacccaaatctcatcttgaattgtagttctcatactccccatgtgtcatgggagagacccggtgggaggtaattgaatcatgggggcagctgcccccatgctgctattcttgtgatagtgagtgatttctcacagatctgatggttttataaggggcttttctcccttttgctcagcacctcttgctgccaccatgtaaagaaggacatgtttgcttccccttctgcctgattgtaagtttcctgaggtctccccagccatgctgaactgtgagtctttcctttataaattacctctttcctttataaattacctttataaataaacctctttcctttataaattatccagtctcaggtatgtctttattagcagcctgagaacggaccaatacagcctcattgagaagctgacgtttaggcaaagtcttgaagaacgtgaggaatgcagccatgtgggggaatatcacagagggagcagtgaccctaaggtgaaaggtgcctagcatatatgaacagcaaggaagagagtgtgcctggatgaggtcagagagagaactattaaaagaacagtttgactgcccttctaaagatggcaggacaagagagggaccaatggtaaaagcagggagactagtaaacgactattggaataacaagtaggagattatgatttcccactcctgagtgatagcagasgagatgargagtggccagttctagacatgtttagaagatagacccagcaagatttctttactataggtaaaaaagagaggtcaaggatgactccaaggtttttgtacctgacaactrgaagaattgagttgccgtcaagtgaaatagaggagatagtttgaggagcaggtttatggagaaagatcaaatttagtactggacatatcaagctgggatttttattagacatccaagtagaaatgtcaagtcagcaattgcacgtatgagtccaaagttcagaagaattgttatcagcttatagactgctctgttygtagaggagctgatgatcagccagtcttctcaactggagtttcacaatagagttaagcctgcttgccttaaaacatctcttgtatctaataaattaagttatatcttatatgtacaaaayagtactggttatggagcatccttgagagaattgatgaatcattttttgtgcgttctctgaggtgctgatgaggaagtgcaaatgagaaatgttgcttgcatgcctaaagaaacttgttattttgtctctttttcagtcaaattttcttaattctcattcttaagataattagaatcttaaaaatatttgaaaccatcttataaaaccttaaatagaatactataaatcattgtttctcaaaatgtgcacagttttaattggtgtttgcaaaaaggcatgtgtttgggggttgggggctgggggagctcaaacatgtatagtattttgaaagaaaaattaaaattaaatcttttcccaacccagaaatcccctccacaaaggtatagaacaagaaagtacttttattattgaatatgcattaaaccaaaatgtgatgctcgttacaggcaattcactgtgayatccactaagatttttcaaagacaaaaaggaatctcaccaccttgtataaccgagcatttacaaacccattatatacatgttttcaaaataaacaataactagttctcaaatgagaggacttgctaacaccttttgtcacacatagtgtgacactatggggtgatcatctgtgtttgcttattgtctttaaccagaggaaaaacaaacctcattttgtttttgtttttgtttttgtttttagttgaagtttcactcttgttttccaagctggagttcaatggtgcaatcttagctcactgcaacctccacctccagggttcaagggattctcctgcctcagcctcccaagtagctgggattacaggcacgtgctaccacgcccagctaattttgttttagtagagatggggtttcactatgttggtcaggctggtttcgaactcctgacctcaggtgatctgcccctccacccccttagcctcccaaagtgctgggaacacaggcgygagccaccgtgccctgcccaaacctcatatctttacaacaggaggtagctttgcaaattggagcaaggtgcccattgaagttaagctacttgccacaaaactggaagatagagrtgctatcttttttggtgtttgcatttcaaaaagatgactctcatgtccttaagaaaaacatttttgagacataaagctgacaaaaggcctatctagctctcaaaaggtttatagacattttttaaaaagaagtatttattatttattaatacaatggtaaattttctaaagtagatgttctttaaaaaataaaagaggggagaaaagtatctgttcccttattttcaacaggaggattctgactcttatttttaatttttatttgtccttacaatagttaactctggttgtaaaataagataaacatttttttactgtaggacttctcagagctcttaatgtgcttgtgtgcattatcaaataccaaaggagaaatatgttttgcaacatttctcaaacttatttgggcatagaatattttttttaatggagcatttcataggaacaatattccacaaattcacacactggaaaaagccacattgaccaaacagggacctaattccagaaagagcagagtatttattttgttccagtacattatcctgtgctggcatcctttacggccataaaaacttaagtcatttttgcagtcaaatttgtagtttcttattgttttccctgtttattttggtrcatggtatgctattttaatgtctctagttttatatttggttaaaacataaacattatatatttctattttatcactttcataataatggcatcaatattttatgactttcatatttttacccctaccactattccctcagttctacttctagacagttgccctatgtcttggaagtgccttggtatctatttgaaaatcatatgtgatattttaagtttgtaaaatgtttgtgattctaaaagtaaccttttataggccaattcactgctcgagggcactgagtctctaggtagctacacctgggaatagaggtgtgtgtgtgtatatgtcataaacagatgtttggtcatcakgagaattaggcatacaacctgtgattatctaatgcatttatwaaaaaaaaaacttgtactaagtagcagatatttccattaatctctcatttctacttataaccacatgatttacaaagtaaagtccacaatcagtatagaatgcttccaactatgcacaattatttctttagtttatttaattgtrcattgaattttgtgaatttacagagttttctcagaatttcttcatacaacctggtgaatcactttctgtgtcagctctgccgatgtgtagaacagaaggtgctaattgcaccttaaacctattccctatttttctgcattaactctgattgttcctttgggttgatcttggaaattctgatgactatgtgcctggggaatkatcgaattgtataatatcttgcaggggttctctgtttcttgtatttcyatgttgacctctctagcaaaattgggaacattttcattgattatattctcaaatatgttttccaagttgcttactctgtcttctctctccagaatgccagagtcatagatttggttactttgtataatcccatatatctcaaaggcttcgttcattttttaaagattcctttttctttatttttgtctgactgggttgatttgaaggatcagtctttgagctctgaaattttttcttctgcttggcctagtctgttggtaaggcttccaactgtattttgaaattcctctagtgaacttttcaattccaaaagttcaatttgcttctttcttaatatggctatgttatctttcaaatcttggatcacttttctggcttccttggattggatttcaactttctcttggatctccttgagcttccttgccatccagattctgaattccatgtccatcaactcagacatttcaatctggttaggatccattgctagggagctagtgtgatcctttggaggtaacaaaacactctgactttttgaattgctggagttcttgtgctgattttttctcatctaagggagctggcatttctacctttttgaaataatgtcctttgcagcaacatagatacagctggaggccattatcccaagcaaattagcacagaaacataaaaccaaatatgacatattctcatttataagtggaagctaaatcttgagtacacacaaacaaagatgggaacagtagatgctgaggactccaaaaggagggagggagggagtgggcaaaggctgaaaaacttcctgttgggtactatattcactgtctaagtgttgggatcaatagaagcccaaacctcagcattatacaatatacccttgtaacaaacctgcatatctaccccagaatctaaataaaaatggaaattaaaataaatatatatacaatgagattttttaaatttgacaaatgattataaaattcaactggaggataaatatgtaagaatagttggaaaacgttttagactacaatgaattattgtagagtatatgggaagtcatcaaaacctaagagatattaaaatgtttttaaggtgcagttattaaatttgtatgggactgacaacaaaacaaacaaatatcaataatacagaatatatagtcttgaacaggaccaaatatgtgcaagaacttggtaagtgattttgtggcagttcattcatttatttgtctattcaaaaaataaagtactcattaaaaacaacaaaaaaaaaaaaagaaagaaagaaagaaaaaacactgttccatggaatagagaggtctcttctcattttaacaaaaatggctggttcttgaccaactggttggagccctggggccttgggctgtctccatcctgaagctaaacctatcttgtcttttcaaggcaacagctaccaaaaagacagcactgcatctttacttctttacccttcaatagcattctttcctcaatcattgctcttttcacccaatgtttattttttttttccatttacaaacttgcctggactttagtttctccttcctaataacaccaaatcccctcctttaaaaacaaaatctttcaaaactacattaaacgaaacagtaacttcaaaaaataatcatatagcttattatcatcacacattgtaaattccatatcaagtgactcttacttcctaggctaagactctacttctatggaattttaggtcttttttttttttttgtggagctccagcctggctaagaggtgcttacaatgatgctaataattgagttttaggcaagtaatgaaggagacttcacgagggccgctccctgtttatttggttttgtcattagaatttgggcagtacattatctgtttgccctttcaaagagtaaacacaaagaaattaagtaagctaaaagaacctactataaggttgtaatatctcattcttttacaaaagccccactcagcggaaggacgggtatggaaagatctttttgcttttttgctcaactccgtctccctgcaccccaattcataggcaaaacagaaaatcctaagaacaaactggcaaagctacagaatatagacccccatactaatttccctratttaatgtagatcttactgttacagtctcgccaatgcatcacaatgtagcagtgtctcattgtgaagtaccacccggagttcttcatctcacaaccaagagaattaagaagtgtggacacaaagggtgaggttggagcgaaagtttaataagtgaaagaagaaagctctctgtcatggagagggggcccagaagagggttgctgtttttacagttgaacgcaaaggcttttataagaaactgaagagggctgggcrtctcatttgcataagccacgaatttctggtagctccactcctgttctcctagtgtgcatacaggcccttagcttgagttactccatattgctttgctccccttactgtgcatgtattagaggatggaattttccattgagggcatgtcttagacaaggccttctgtacaagttcccttatctgtgcctgcaggctgatttttcaggctattcttttgtttgaaagaattcaaccaaggacccaccctaactgcctgcttgaccactttccctctttctcctctctccaactgaagttcactcttatccttcctgaggacatacacctataaattctatttcttccatttatctacctaattgcatatttattaacaaatgatattatcagttctgccccacagtgtgatttctcccctctcagcataggccagaggccatgagcccacaggattataaaacagatagaatcctggtcctggacacaggtgtatttagtgtggcttgtgcaatgctttaacaatttttttttttaatttgcattcctttactgtggaaggcacactccaagcctgacctcaccactctttattggcttacaacagctgaatgcacacatttacctgcttagtgacatgggcagtgggtctggtctctctatagctcctcagtttgactcatattcatatatctcattttctccagcatacaggatttatttgcctctagctgcaacttcccttcaccaaaatgatcatttttccctttctcagatggcctgacctagaaaactagaaaagatctcttgactgtggaacttggtcatctctggggaactagctccctctaaatctgctgacatcatccaaacagcagttccttagtggctctctggatttaataatgacttgaaactctcgggtaaagtggtggaatgtgtaatctaaatatcaaggttatgtgtcctgcccactttctttgtatctttcagtggtatctattgaagcaggtcagctgaagaatgacaaggttcatacaagtggaaaggagagctttatttctcataaagagttgcagcctgcaaggtggctattctgataggctgggaggcacggcctctggccagatgccagaaacagactgctttgagggtgggacaaataggacagggttttatgctgaatgagatggccaaatatacatattcaataaactataggaggagtcataaatattcatgaaaggagagacctgcccatgtgcaactgagcttcatgcctctccatgggacccatgttctaaaattggcagcattagcatgatccaggggtagaattttccacactctgatgtcaaagggtaaagcaggggacacgaaaaccctcactgtgtatcctccacagactagcctgaaccactccatggtgagtgctcctttatcaagaagaaatgctggttggctgttgtgccaaaaccacaaaagggagggccagcaatcaggcagttggttgaaatagcagtggagtcttttgaaagggctggtttctgtttagcccttacataagaaagcctaaaggcagttaacaaagagactacaacgtgacaaagtgtgtccgacctcccatcctgtcatggccaggaactcagtttccagagtttctctgatgtccctttggccaacagttcgttcatccagttggaggggggcttagaattttatttttatttacgaagtgatcataattatttaatattattcagctaaagggagctagcttttaggaaattaatttcttcaggtctttcttgcatccaaatgcccagatttagtcaatgcaaaagatatctgtgttcaaatcagttgaaattagaggattgatttctgagttttccagcacgaatgataacttgtttctttcaatatgattctcttctcttcaaaagataaacttcatgtatcttgatgaatacatgtctcctcctaaagtatgtacataaggtacctagtgacagtatgttccttgcacttatttttataggcccatttatcaacttacttcataatttaggagacctgaatgcttagatgggctgtgaaacagctattcagacatcattcagaatatatgacttggaagctgcccccaggaatagatttctgatttgtagaagagagtacctgtccaaaggaatgtataaccataatctaatattgcttattgttagtgtgaagacacatgtggaggaaatttcactcataatagtaatattgattactcaagaagtagttgtctttgggggataataatactgatagttaacatttttaagtgtttattatgtgccaggcattacagtactatttcatttaacccttaaaaaccctacagtttaggtactgtttcttttcctattatatagataaggaaattaaggcacaaagaaattaataacgaatttgttcaaggtcagtgccagggttcataccagggagaatgatgccaaagtttagtgtcttaaccttcatgtgacactgctgcatatacatgcttctaccacagccattgtagtccccaaacacaccaaactctgtgttctgcgaggttttctctttatcaataataaactttactcaccaggtccatcttttggcttgctacatatccttcaaaatatggttcctatatcacctcatgtatgaggacttccctgacttttctaagcagaattatagctcttcttttcttcagctcccataacactgtgtgtgtgtctgtctgtctgtgtgtttgttcatatgtttgtcttccaccagtgctgcttatgaagcaggtagctttcatctccagggttccacccattagtgattaatagaagtttgctaattgaaagtgctccatgaatgagttaacaagatattaaccacttagtcctggtttgataaagactgctgtgatgatagcatgacagaacctgaagaagaagaaaaaaatcccacagatatacacccatgctctgattaagttaaacttttaaaaaggtgggggcaggtgggagaaatgaaaaaaacacttagattataataaccttctatgaaatgcatggatatagcagttggagaaaatagtaaaatcactttctgttgcatagaagctcgtaatatgacatctttcagagaaactgtggtagtctatatatattttgactgacgttacagtatcttatttctttttactttatacccctagggtagaagctatgactctgggaccaattttccccaaattgtatagttctgaggtctctagctgaataatctgtggcyctccctctgagtcttctaaattttccaaaatggagtgccaccctttttcctgggtcttgcctttttaattgacactttagaattacaggacagttggctcttgtcttgtaattttgacaagacaaagccttgttttgtaaagtttgaatgtatcattattcaaattccttcaaaaaawcctgggtggaagaggtgattaaaataaaatttaaaaaagctaggcaaaacaaagttgaatgcaccttaaatagacaggtttggccttgtactcttgcctcttaacagctttgtaatgttgagaaagatacctctctgtgagagagttctctaatctgtgaaatgggatgataggtatctatatcttatagttattaagaagattaaatgagttctgtttgcaaagtgcttagaacactcaaccatcatcaagttacttagaaatctatatgcatacattaaatctcaacaaaaatgctttcaaaaattattataattccatgccctccacttaatgaaagtgatagaaaaccctgtgaaaaacatttctccatgttttaaaaccctggttcaaaataacatccattttgttgcttaatttcattatgttgtttcttatataaggattgcatgacacattcaattttaaagttagtaacagaaaaatattttctctcttgaagaacagataactgtttctataaaatattaaaatttatatgttacctttggctttggggaataatttgccaacagaattcaaggtaacaacctttggaggaaactgaaatttaaatgccgtgttggggagatacatatgtcttcatgatcaattaaatgaaaatagggttaaattttgattgcagaaactaaggaatctaatcaagcggtctgcctcaaagatggtcaatagaatctagagtggaggtgggccaggaggaccacggtggacagggccaaacatttcctcagaaaatagttccctccacacacagcccagagtaactgtcaagccccagcttcggacactgcaaggcaccgatgatatggatatttgactttgcctgaggaytatcctcactcaacttaatgctgaaacaraaatgaagataaagtctctgccacttagccagcatccattgtttcgttttcaaagcctaggaattacctgcctcaccactgcttctcatagaatttgattctcatgtcatctttccctggccctaacgtgacatttatttcagaacaaataagtatagtttgtagttacctgttcaactatttctctaataaagcaagcggcctattttcatrtgttttttcttcaagctgagttaaaagtctacttgtatatattgtgttaatagccaataaggcagaattgagtgacaataattatacatttaagtatattttcattttatagtaattactctgtaattgaaaataaggagagagatcaaaagagagagagagagcacacacatacrtggaatacacattgtgaagaacttcccataagaggaaaaactgtcaggatatatgcagtgggatccttttgtgagtctatgtttttctttgtcccatattttctatgcttaatattattagaccaccattaagtctgtaccaaggacacatgtcaacagttgaagtcattttctctttggccacagctgcagtttcaggttattcatgatgaccctgtattcaaagggctgcaataaagtgaccttcaccccccaataatctattcaaataactaatatacatgttaagtggaaaccaggacagatggcaatatcagccagagaagctcttgtcattgttggagtctggtattctgtttcagtctacatggtgcattcatgccaaaaagttatcttcacaatagcgaagttctaaaagaccaagaactccatgcagagctttatgttaagatagcaaagaatatgtaatatcttaatattgggagaaatatacataggacccatacagagactttgcttaattgttgaaacttattcacataaggagaatgaaaagaattatatatggtgatgattctttcactcagttgacaaatacgtatcagggaccttctaaatccttggcactgcactctgttctgaggatgtcatcataagcaaggtagtcatggtgccttaactaccttccaacccccagtgaaatgacttttaaagggtttatttttttaaaaggcacacacatgtaaagccaaaatgcatgcactaggagacaataacaacaaatcatttaagctggaaagcagatgtaatcatggaaatgaatttttggaaaccccagaatgttgaattctaaaaccagaagtggagaaagtccaggtgcaatccagtttccaccaaaggacttccagaaagctcaggaaatggcctcactgtgtgtctctggaactgtgaagcaagggtaagcttagtaacaggaagattgattaagagcaactagacaccccccatctcccactcctccatgtagctgggaaactgaagttttgttccatgactagagaaaaacagagtcaatgaacttggaataattaggcagaagagtaaacaaagtaccaaactgaaaatagtgcatttaactaagagtttagctacagaatgttgagactcacagctttcttcctcactggacttagagaatcctggcaatcacatttcttgaggaaggatactcaatcagttttctttggggaatttggtcagttcaaaatgaaaaacctaaggatactaagatcagggattccctaaggaaacagcccagccagatcaccctggaatgagagcacaattgacccatttcttgcacactcacaagttctttattcaaaaatgaggagataacagtggatcaacacatgcttcaggaaggcatctaatttgacaaacaaaaccagaccgaaacaccttgcaggaaacagagactatgtgaagagataagatactgcctcagtggaaaaagagtatggtataaaagaggcacattcagaaaacaaaagaaaaatatgcatggaaattaaaattataatagaggaaatggaaaactaaatataagataaaagtaaagatatagttgaggcatttttccagcaaatatagcaaaataataaagagatggaaaatagcagagatttttaaaaattagtccaaggatcctatttctgaataataagaattctccagtatgagattttttttaatggaggagaaaaatcatcaaaggaatattctcagaattagagaacaagagcttcccaactgagaggaccatgaagtgcccagcacactgaataaaaatagaccacatttattaggaaattttacaacactgaggacaaagaaaaatcttaacgaattctagagcaaaaattcagatttcataaagtggataaagtatcaaatcatgtcagacttctcaatagcaatacaaggtaaattcagaagaaaaaatatttctaacctaaatctatactaaatggtattattgatcatttcagaaggtagacatatctcacaatatcatgtttttatatacataagattcagaaaattttgccttatatacaccctttctcaagaagcccttacaggatgtacttcaccaagcaggagagaaacagcaacaaaacaaatagaatatatatgatttaaggaatcaagaaacatgagatttaatccaagagaaagcatggagaatcctaggatgatgtctgtgcaccagctagttttgaatggaaacaggcagaaggctctaagagatttctccaaaagagggaaattaacagaaaacctaatgctatgtgactcagatgagaatggtactacatggcaataatactgtaataataatagttataataatcactactgacccaattatactgagagaataggatgacagaaagtgcttccgtggtaagtgtagggagagtgtgaaaaagaacgaaagccttttcctccaagagtgacaccaataatcaatgcctaaagccaaaatttcaagacctacttgaaagtaataaaagcatgatattaataaagataataaaaaaatgccacaatattcagctagaagaatttaagtagttgcttctggggagctgaaaatggtgttggaggagacagggagctcctgttttccataataagccctgtagctctgtctctttaagatacgttcatttgttaccttgaaaaaatagagaccaaatgtttttaaaaccttgcttagacttagttgtctgggagtttacaccccaacagtgagacagatatgatacagttatataaacatgtaactatcaattgtgctaaatgctatggcagaaattttttgttcaaaattgtatgatcccctataaaaagagatgtggcttagtgtagagggaggccaaaaaaattttccctgagagagtgacatcctggtaccttatgggataagtgtcgacttaccccatctgagccttcagcttctatggcatctgctatgctgtgttagttagctcgggctgccataacaaagtacaggcgtacctcggagatattgcaggttctgttgcagaccaccatgataaagtgagtcacatgaatttttttggctttccagtacatataaaagttaagtttacacaatgccatggtctattgaatgtgtaatagcagtatgtctaaaaaatgtacatactttaattaaaggtaatctattgctaacgatcatctgcaccttcagtgagtcctaatctttttgctggtggarggtcttgccttgaggttgatgatggctgactggtcaggtctgtggtcgctgaaggttgggtggctgtggcaatttcttaaaataagacaacagtaaacttggccacatcgatcgactcttcctttcatgaaagatttatctgtagcatgtgatgctatttgatacaccttttaaccagggtagaacttctttcaaaactcaagtcagtcttctcaacccctgctgctgctttgtcaactaggtttatgtaatgttctaaaacctttattgtcatctcaacaatgttcacagcatcttcagcaagagcaaatttcatctcaaaaatccactttctttgctcattcataagaagcaactcctcatccgttcaagtttgatcatgaaattgcatcaattaagtcacatcttcaggctccacttctgtttctagtgcttctgctaatttccaccataactgcagttacttcctctgctgaagtcttgaacccctcaaagtcatccatgagggttggaatcaacttcttgcaaactctcattaatgttgatattttgaactcctcccatgtatcatgaatgttctcaatggcatttgtaatggtgactactttccagaagatttctaatttattttgcccagattcatcagaggaatcactgtctatggcagctatagccttatgaaatgtatttcttagttaataagactggaaagtcaaaataacaccttgatctatggactgcagaatgaatgttgtgttagcaggcatgaaaacaagattaacctccttgtatatcaccatcagaactcttgggtgactaggtgtattatcaatgagcagtgatcttttggaaggaatctttttttctgagcagtaaatctcaacagtggtcttaaaacacttagtgaacaatgctataaacagatgtgctgtcatccaggctttgttgttccatttatagagctcaggcagagtagatttggcataattctcaagggctctaatatgttcagaatagtaaatggacattggcttcagtataaagtcatcagctactatggcttcaaaataaagtcattagcccctaatacgagaggcagtctagtctttgaagttttgaagccaggcattgttttctctctaactatgaaaatcctagatggcatctttttccaatagaaggttgtcttgtctacatttaaaatttattgtttagcatagctaccttcgttaattatcttagctaggtcttctggataatttgctgccgcctctatatcaacatttgctgcttcaccttgaattttatgttatggagagaccttctgtttttaaacctaatgaaccaacctctgctagctttaaactcctctcctgcagcttcttcacgtctctcagccttcatagaattaaacagttaggacctttctctagattagtctttaacttaggggaaggttgtggctggtttgatcttctctcctgactaaatcaaactttctccatattggcaataaggctgtttcactttcttattattcatgagttcaccagagtagcaatttttaatttccttgaagaactttttgctttgcttgcacaacttggctaattgtttggtggaagaggcctagttgttgacctctcttggcttttgacatgtctttctcgttaagtttaatcatttttagcttttgatttaaagtgaaagatatgactctttcacttgaatacttagaggccactgtagggttattaagtggtctaattttaatactaatgtgtctcgcagaatagggaggcccaaggagaggaagcgagatagggggaatggccagtgattggagcagtcagaatacccaacatttattgattaagttctctgccttatatcagtatggttcatggttccccaaaataattacagtagtaacatcaaagatcacagatcacagcttggggcaaaatagggagaccctgtctctactaataaaaattagtttggcaaagtaatgtgtgcctttagccccagctgctcaggaggctgaagcagaagaatctcttgagccttggagtttgaggctgcgtgagctgggattgcactactgcattccagcctcagtgacagatcaagaccctttctcaaaaaaaaaaaaaaaagaaagaaagaaaaagacactgattattataacagatatattaataatgaaaaagcttgaaatattatgagaattaccaaattatgacacagagacatgaagtgagcacctgctgttagaaaaatggcacagtaaacttgcttgatggagggttgccatgaaccttcaatttgtaaaaaatgcactatctgtggagtgcaataaagtgaagcagaataaagcaaggtatgactgtaccataaactgggtggcttagacaacaaacatttatttctcacatttctggaagctgaaagtccaagatcagggtgccagcagggtcaggttcttagtgaggtccgtcatcctggtttttggacttcttgctgtgtcttcacatggcagaaggagggagagaaagctctctgggggaatttttatgagggtactaattctattcatgagggctccactctcgtgacctaattattttccccaaagctcaacgcattttatcaggggctaggatttcaacatatgagtttgggggaggggcacattcagtccatgacattctacccttttcccctcaaaactcatgcctatttcatatacaaaatacattcatttcatcccagcagccccagaactcttaactttttccagcttcaactcctaagtctaaagtccaggacatcatctaaatatcatctaagtctgatttgggtgagtctcaaggaatgattcatcttgaggcaaaattcttctccagctatgaacccgtaaaaccaaatatgttatgtgcttccaaaatacaataatgggacaggcacaggatacacattcccatttcaaaagacagaaatggggaagaaagggatgatgagtcccaagcaagtccaaaacctattaaggcaaactccataagactttaaggctggagaataatcatctttagctctatactctgccctccagacccactgggtcagcagtcccacctttcggccccaccggggtagcaatcctgtccccatggttctacctggcagggagtgagcctccacagcttcggacagagatcttattgcctattgaaaacaaggcaatggcccctcattttgaaaccagggaagcagccctgataatttctaaatcgcttttggcctcattcttcccttgaaaaatagaccctgttcatagtgaaaaatctctatggtcacatcctgtgaaatcccagaagtctgatgccttccttcatttttttccatctctttctcttttagttcagattggcagttgctttgctggggtagttaattaagtccatggttcatacccatactaatctccttactgaacagtctcttggccatatctacagtactgtcttctgaacatggtttctcattttttgccatatggatgagctgagaattttccaaatcacttagttctagttcctttttgcttaataattctgtcttcaagtcatttttctctattacattttactataagcagtcaggagcaaccaaaccactgcttaaacactttgcttagaaatcttctcagctagatagaggcgggagaatggcatgaacccaggaggcggagcttgcagtgagccgagactgtgccccactgcactctagcctgggcgacagagcgagactccgtctcaaaaaaaaaaaaaaaaaaaaaaaaaagaaaggaaaaagaaaagaaatcttctcagctaaatatcctataaatatcctatttcattmcttgcaaattctaccttccacaaggcactagaacatgaacacaatttaggcaagttctttgctgctttacaacaaagctcacttattttccattgtttaataagatattccycattttcagttgagacctcatcagaatggccatttttactatctgtgtttctactaacactctgtacatgattatctgtgtattctctaataagatggaaacttcctctacatctctcctttttccttcctgagcactcatcagaatctcctttaaaaatccctttatgatcatctcagtttcttagagcaagcacttcagaattcttcctacctctacttattacccaatgcccacttcacttccacatttgtaggtgtttgttacaatagcacttcacttcttggtaccagtttctgtgttagtcaggactctccagagacacagaaccaataggagattatatatgtatataaaatgaggaattggctgtattagtccattttcatgctgctaataaagacatacctgagactgggcaatttacaaaagaaagaggtttaatagattcctagttccacatggctggagaggcctcacaatcatggtagaaggcaaaggcacatctcacatggcagcagacaagagaagaaaatgagagccaggcaaaaggggtttccctttatacaactattagatctcatgagacttattcactaccataagaatagtgtgatggagactgcccctgtggttcaattagctcccactgtgtccctttcacaactcgagagaattatgggagctacaattcaagatgagatttaggtgggaacacagctaaagcatatcattggcttatgagattatggaggttgagaagtcccatgatctgccatttgcaaccacagacccaggaaagccagtgatgtaatcccagtttgagtccaaaggcctgagaactagaggagccaatggtgtaaatctcagtccaagggtagaagatgaacaatatcctagctcaagcaggcaggcaagaaggggacaaatcctctcctactcaatttttgttctattcagacccttaactaattggataatgttaacccacactgagtagggccatccgttttactgagttcaccaattcaaatgtgagtctcatctgggaagaccctcacacacatacctagaaattatatttcacctgggtatcatttggcttagtcaaggtgacagtaaatcacaggctggtataactggaggatgccacctggaatgtgctgtttaataataatgacaagcttagcccctgtaaccacatgtaggataatattcacctgggataacctttactgtctttgttcatggagactaattccactgattctactgcaggaataaccacctagaattacagactgggagaacctaaaggtcttcagtgctctaatcttcctatacgctccttttgcagacaggaaaacttagcctccaggaggtttagtaatctgcttaacgtatcagagctatttaattctagggccaaagcaagaactcgaatcttcaggtttattttctatgactattctctagaattttttcctcttaacctgaccttttaaagaaagtaattatctcagcattgcccaacaacagaaaactttaaatttcttttttcaatgatgaaagaaaacattgcaaaaaatgattactttttctacttgagtattccgttattgtctaaatgtggaacctgatagcagcttagggatgatcaatctcttctttacaaaataagtagtttatattttatattcataaataattatgtgaaacactaacagtaataacttgttacaatatttccaagaattcctataaatatggcaatatatatgacttgcatacattctcaatctgttttaaatagtggctttgcatttactatgaatgcttatattttaatagttttaatcttatgttaaaaaacacattatcatatcttaaaatataaagctaaggaaacatataaggaaatatctctccttcagaaaactttgcaattcaagatagtctacgtgtgtgtgcgtgcgtacacacacacacacacacacatactcacatacacacacttccctaagttccctgaaaaaagaatattcatgagtcaggaagtctatttttgccagaaaacaaagcactcttttaaaaggttcatactgctgcagcagaactccttgacattttagtaatgtctaaaatggccaaatctacaacattttgaaatcttggcatargtcatgataccatgtactctggtgttcttcaggatttcctaccacaccaatagcagctyaatacaaggttagagaacaaggctgttgttactaacaagagcatgtaacaggcgttatttttttctttgtgataaggaagctttataataactaggtcagactatatttctgattttgagattcaatttggaaaattccaagaaatacttataatatcccaaagaataatttagagttgtgtaaacttagtggttcattgtctcttcagaacaggaattctcagttatatgtaagaaaataacatatagatgtaatgaccattggaaaatatattaagccacattgtatctatgaaatttcattatgggcaacatcagatatccatggtttgggtgattcaggaaaacaataacttaaaaatatatattttgtgattgtcacaatgttccccgggtcacacagatagaaagagggatcggattcaagtttgtcaccttgagtctgtgttctcctctgcaatgctaactctgataatgtgatggccaggatgaagatctggaaagatcaagaaatccctgaggaactacttttggaaaagtgyatcagaagaataacttgactacagggagagttttaacagttcttcaaatccaatacacatttaacctagatatgcacattgaatctctaaattactgaggtcaaaatattgcaagaaccctgctaaggtggcaaaagttactgcagcaagtgtgacagtgaatcatgcaattaaagcacagaaactgaacgtgtttggttgttattgtccttgataggttagctctgagggatacctgctatgaactgaattgtgtaccccaaaattcatatgttaaaaccatacctcagcaatgtatttggagatagagcttttasgaagtaattaaggttmaatgaagtcatgaggatgtggtcctaatctgatagattggcagctgtattggaataaagatagaaatgtctccacaatcatacaccaaggtaaggccatggaagcacacagtgaaaaagcacacaagttcaagtcccacgataggccgtctgcaggctgagaagccgggaagccagcagtggctcagtccaagtcccaaaacctcaaaagcagggaagctgacagtgcagccttcagtctgtggctgaaggcctgagagcccctagctaccactggtgtaagcccaagaacttgtgggtattaggaagagggccctcatcagaaccaaaccatgctggcaccttgatcttggactttcaagcctccagaatgatgagaaaataaatgcctattgtttaagccacccaatctatggcattttgttatggcagcccaagcagmgaaagacctcaccagcgtgacatacattgggagataggagtgttgaagcaatatttgccttatgtgcagtataggatccccatgtccagagttagagagcagtattgtgatggttaatattaagtgtcaacttgattggattgaaggatgcaaagtattgtttctggatatatctgggtgtttctgggtgttgccagaggagattaatatttgagtcagtggactgagagaggaagacccaccttcaggaagccccatcctcaatgtgggtgggcaccatccgatcggctgccagcacaactagaaaaagcaggcagaagaaggtggaagaagatgacttgctgagtcttctggccttcatctttctcttctgctggatgcttcctgccctcaaacatcagactccacgttcttcagcttttggactcttggacttacaccagtggtatgctaggggctctccggccttcagccacagactgaaggctgcactgtcagtttccctgcttttgaggttttgggacttggactgagccactrctggcttcctggcttctcagcctgcagatggtctatcgtgggacttgaacttgtgtttgtgtgagtcaattctccttaataaactccctttcctattagttccattcctctaaaaaaaaaaaaaaaaaaaaaccctgactaatacaagggtttacaagagaccaaggttcaaaatccaaggaaattttgaggctgtggaacagagtcattgactaagcagtattgaaccagtatttagcatagtaagtaaatttggaattaaactaggttaacttccttctacaagttgcaagattttaattaagctgcttaactccctcattgtaacttgggtactttatgaatcctaccacagagataataatgcctttgtcacatagttgttgtgaggattaaatgattaaatattaaatgattagtatttagcacagtgtctggcatatgctcacatctcagtgaattggtaactacatacakctgccaaagttagagaatgtgaggtctgaattgcatttgtttattcataccccaaataattattgcttgcttactatctgccaggcaagattttaggtgctaaagatacagcagtgagcaaaacagaaaaacaaaactgtttaaaaacctaccttcatggagcttacattctggagttctgagggtaatgacaaaatcaggagttggcaggctcccagctatgtaccatatcctaaaaggtcttgctctgggcaactcatacagtccttgactgggagtggctacctatatggaaaaagagacaaagaaaatgtatgctgtcaaatagcttgtcacatatatggtattactgttttccttttttttcaaaaatgcatgaaggactcttgacatggcattttgttaaaagctacttgtcacccttcttttttttttaaccccctcaagccaacttttcccaactccaggaagaaccaggaagagaagctatcacccttattttctaaaggcttccttctccctcatctctcccctttgaaaagaaagctttatataaagccagcttccttagcctaaacagaagtataccttgatctgttcattgtcstgcaatgttttgcttgctctcttgaaccttgtctctgaaagatttcagcctaacacaaaagaaaacaggtgttaaaacactttggggaattaaaacttcacaatgacacatttctgagagggcccctgcccagttgcacactcgttttcttaactttcatggaagcctgtctagggcagctctgggaaccttttagtgttcctatgtgtgtattctcccttgtcaccattcatctttcctttggattaagaaggcaagttaaagtagtgaacttttgctgcataaataattagagactagattttgctttgttttgtggccatttactatgtactttgtgatgtttgtcattcttttctaacccatgtgcagggctgataggtaaatggatttggttgtgaataataaaccagttttcacatctaaaacccattcaccaagagatgtctctgtggtgagagtgtggcaaaacaggttgttcttttgttgctttagaaatatgcctgattttcctgtattattttggggtaacctttgttcatgtatatagaatccaatcagagcagctaagggaagmattggtatcagttgcctatccttgtatgcttaaagaaaagaaagccaaaaactgttaagagcaagtcttttagcaaaatatcaatgaataagcaattttgataaataaataatcagtagaaacaatgctgaatgctgaaagcaaactgcacttattccaaaaaattttcatgtttaaacacagttttgaattccttttcctcttctcatataaatgcataaacatactactttttctcagctatgaaaaaacattcttatttcagtaaatttccttctcttaggtttactatatggatcatggaaaaggtataattttacagagtttgttgcttttcatgtacatttataagtttatagtaccaaataaatatagcctttcaaataacaaacaaactcttacaaaaggaaattcttccttcataactagaacacctctcacaggactaagtcttttgttagtaagataaattccagaaatggatttcagaataaagacctcagtgtttgtttttattcttgtgaaaccaataaagtgctgacaaagagtgctataatatgccatcatactttagaaataaggcacatttaagarggttctttattgccttctgagagttggatattgctaaccttagccacastaccacagaagatgctttgctttgcattagcaaaagcagggtgsttgatccatttgagcgccacttgattacatacacacttaaaaaatgtcaagactttaggaacactagagtgattatcattctgtggcattatgttcccataggtttaagtctgaaatatactgaatttaaaggaggaaaaggtatggctatcgtaatgtatgtttccattgttcttcatatcatttatttcctaacaaattgcaacccatctcaaaaggcctaactatttcaagggttattcttgtggataaaaaaaatgcaagattattttgatacatacttgccttcttgaatctggatgtcaaaatgtatgatactacccattcaaactacggtagaactgcattgcaattctgaggacaggagagggaaatgggatagggaaatacaaactaattttcaagccctggtgaaaggactaagaatgtgaaggaaatgcaggttgcacagatgactgaaaacaggaaatgggtagggagtttgttgctaaaatgctctgcttaagagctcttagggcttaagagcaggattcccaactctggctgcagaatcacctggggaacagaccagtcttgggagtgactctcatctaagctaaggccacataaaagaacgggtatataggacataaaaatagatttataccccagagcctttctctatgctttttagaacacctatactgtatgtgttcaacaattataccttgccttgtttttgggggatagcgtggggtgaagaggtagttttttttagaatcatttaccctgagtaggcattcagtaaatgctttgttgycaatctgactccayttccagccgcaaccccatggagttgagttgaatgacatctaaacctgtaggtaagcatgcatgtatacataacccttgttgtgaatgaaaagcaaaattagttctttcaaaaatgttagcttggctctgattagagataaaaataaaaactataggtttctgccaatgatacaagtggctttttcctacaaggtacccatttttattttcgacagcatttgtctttcttgagaaagtccttcattcaaggaccacattgcaaccgtggatcatttatgtataacttagtagatgatagacattggaaattaccgtgacaggtgttttcacattgtttctgmtgatctgagaaaaagcacattgccagaaaagagtgtggagaactcaaattcctcagaatcaatttgaaacagtcttttgaaataagaactgctttaaagaagcattttggaaaggggtgggggtggggagaacagttcttgagatgaaaatacagttcagtaaaacaaatttatttattgatggagactatacactgtgctttaatttattcatcattattattgccttgaaattgttttttgttaccattcatataatggcctcaggaggcccagaagagagccaatgaaaacaattctgtgggtgttactagtgaaatatttcattatacttcaagataagacataagaatatactaaagagacaaaggaataccaaaagctgaagactaaaaaatacagagaaagaatgtcttttttatacaatggcccatcagtgctagcactaatctgtaaaaccagtagcagttgtattaagtaatttatgtgggaataacaattgtttttatattacttttgctgtggacgataacattctgtaagctcgtcatatttttaatcttgacttaagaaaaatactgctgtggcaattattaaaataagagttccatttatctttgtgcaagtagcttcttctcttcctcctgtgtcctcctccctcacgtgccctcccctacctgactccattcctcctccccyttagccaaaggcatttgtgaaatatagaagcagttatgtcatgctgttattttgggtattcttaataaatgcttactgtatttcagaggtggtctgaggaggtcagctaatgcaatttcactttgattacttatttgaattttggatgcaaagaaccctgaaccaattccctgaatctgtcataatcataatttagttatctacagctgcttcattagatttaagtctctttcaagaggatattgattattccagttctttattatataataacaatattcataagatgccctgttctccatcttcatttgcttgacccactaatgggtactggtttcaaattttcttttccagtcacaacatcccctttaaagttcggtgattatagtgacacagccatatcaagtaacacctttagctacttcaggtgttatacattggattttataaattctgcccctttcaatacatcaatacacctttgctgttaccattagaagtctgtatcttaaactcaaatcttagcatggcattccagagcttaacatccttcaatgctcctattatctaccttgcacttttcttttttctttttttgacagtctcgctctgtcaccaggctggagtgcagtggcatgatcttggatcactgcaacctccacctcccgggttcaagcaatcctcctgcctctgcctcttgagtagctgggactacagatgcaagccaccatgcccagctaatttttgtatttttagtagagatggggtttcaccatgttaggcaggatggtctcsatctcttgacctcgtgatctgcctgcctcggcctcccaaagtgctgsgattacaggagtgagccaccgtgcccggcctgcattttkctttatagagataggtggtatgagaaaagtcttaaaccaaaacgagaaacttgttccagctaaatgaaataaccaaatgggaacattagtgttaacccatatcgactttggtaagtaattttttaaaatgtggttatatttgacagtttgtattattgccaaaaagaaaaaagaaacacattcatcatgtatgaacttctcacttaaatgattcattaatctttttaaaggagtttttttgagagcatctagaatattccaagcagtggtctaagctgtggagattaacagtaaaaaaaatagacattgtcttagcccttatgctgcttacactctggtgggggtacaggccagtaaagagataattgcatcaytctgtgatagggactttgattggagagaacagggttgtaaggatctagagaaagggcacctggaaaaagaactgccagaaaaatcttcctgaggaaagtgacatccaagctgagactgaagaggagaaattagccaggctgattaggatagtgatctaggcagaggagcaaagcccagagtattcaaggcattgaaagcagctctggatgaatgaatgggccaggcagggtrgagtgggaacagatgaagctggggagcaattaggaccccagtcacgcaaggtcacaatcagggggaggggcagtttgggggagccagagaggtctttgaagtgttgacttgaggtgcctataggtatccaagcaagatttccaataggcagagtctgcattgccaataaacaaagcatttgattttgtttttgggttttttgttggtttgcttgtttttgtttttgttttgttttgtttgagatggagtcttgctctgttgcccaggctggaatgcagtggtgtgatcttggctcactgccacctctgcctcccgggttcaagtgattctcctgcctcagcctcctaaagagctgggactacaggtacccgcgactacgtccaagtaatttttatatttttagtagagacagggtttcaccatgttggccaggctggtcttgaactcctgacctcagatgatccacctgcctcagcctcccaaagtgctgggattacaggcatgagccaccgtgcccagccagcacttgattttgaaatttacaatttagtagctaaatttaattaagaagtagctcaatttcttgagattccttggcgagttcattagaaatttctttgacttatctcttattactaatttataattcacttagttctatatctgtagctccctttctcaacaaatttcagaattatgtgcttaaaaatattttattgatgagttaagtaattactcatttttaatttctttgtacttttttcaactataagttgacataatttaaaatgttgtggcctgccataagaagtgcaaaatcgagaatataaaatagattgtagcattacattaaaagagtggattctgtggaagtttaattccccatgcttgtcaaaagttgttaaaacattgctagccctttttgaatgtaaaatgtgggcagacatgtactaatatatcaaaaaatgacactttgtcaaagaaggctttcatggaagaatgttctgaataaaatgttttcttttaaaaagaacccgacctgtttaacattccaaagcaaacacaaaagaacacaaaatacctgaactcactgccagtcacaacagttagtttcatttaccctttaatacttttttttatattccaaaaattgttccccaaaagaattatcagttttatttcatgataaccctggcttgaagtaaaataaaagtagctctgaccctcctcaaaatggattcttttcagacttactagcacttctaatagtatgatgatgatataggtggctatgtctactgttagactcaatgtaattatatgtgaagcaacaattcccttatctattaggaacacttgctgcagttaactgcatttcactgtctgacagatgaaatgcagaattaaaatctcaaactagtttctcaaagttttcttttccccccagtcatttaaaaatcytttagcctaggggaagatggtagctggaaaagaatgggaaaccagatggcatttaaaggccttagcaagatttacaaagcagatgtgcctgtatttttacctattctagctcctcaaacgggtcttctctgctataattgctttgcaatggttccaatcctttgaaccttctgaggatgtccagagttacgataatgtttgatagttgaaatgttaaactgaaaatcaatagataattggctttgattactacctaatactgtctaatctaaataggaggaatatttrtatgtgttactcatattctttgcagaaaacacactgaagcctagctcttgagcggggatatcgttcattggaagaaacagaaacagatggcagttgtggtaattgagatacagtgtagcttaaaggcatcctggaatgccacctaataatggtagtgtgaaaaggaaagaaatattctgcacaacttacttgatgtgtaagctgagtctgattttacagctttatagcctgctcacaattaaaatgccccaagggttattggtggtgttgggggtagagattgtgcaaagttttgagctaatgttagagaatgatgggaacaaatctccccaaccatagaggtttgttggagaatagaaagccctggttttaataaaatattagagaattctgcatatattaatatttgtataaaaggacactaagattgggggcaacaggttttaattactaatagtcaagccaaatgtgttacctttaccttttctttaatttacactattactgcaagggagaactattttgttgttgtttgtggtggtggtggaagtgggggttacaagcatctcacagttgagaatgccttcctagccctctgagatgggagctgaagacagtaaggggcagcactgtggatttaggctttgagtcttgcctccgtaacttacgaattataagtatgaattacgtattccttagtctttccaagcctcacttcattcatctgtaaaatgggctgaatacaactttattaagcatttagttcagtgccgaacacatattcagtacctaataaattatagcaatcatcatcaatagacaaatgtgcacagcttagaagtttttcccaccaagcacactaagrattgtaggacattcatggatatagttttttactgcaccaggaaaccccrtccaaatggatgcaggagtgtttcagaatatcctcagaatctatagaccaggaaacattgttgtacatcactacccactatttaaactgtttgtttaaatacaagttaaaagcagaacttttgcttgaaaacaccttctggccacatttattggactgactcataagaaattttatcacactgattgttacacacttataaatcatttgctaaaagcagtggtttctcctaaatgtattaaggccaaaattaatttcttaaacttacatcgctttaaagtttaaacaatcatatccttagctatgaactattatttcctggaaggttaaagtatatatcctatgtgcaaaggaaatgtcaaggacatatcaatatttgatttcattacacattagctatgccagagaccctgcagtcctacctaatgtaaacagctcactagragtccacaatagaaaccaacaaaagatgcaaatcgatcctgctayattttaatattaaaattttacagcactttttgaactattttataaattaattaatttcaaaatggatgaggcagtaacattgaactttagctaattatgtttaaattaaatataagcatttaaaataaccattttaattaaatacaaggtgcaggcagctaatcattaaaagtggaattggtaacttgagatttatcatcctgaaaccacttgtaccacatttctaatgagttctttcctctacttaaatgaaggactaaatttatttccccaacgtggcagctagtaaaagataactctttctcaggtcatggttgtcagtttgatgttgaatcagagtaaagaaatctgttttggtatactcgctttgatccgaaacagtatttactatttgctaatccatttccaactgacagtactgtagttctacagacacctaaraaaagccctagtaactgaaacagcatttactactgcaacagaaaatagttacattttgtaaaggaaattgatcctttttatagaggagactccaaggaataaaatctaaataattttgtgattaaatttttaaaaaattacattacaacttcaagattgaggaataacactcaaaaaatcattttataaattatggatatatatactctatatttacatttgtaacaatatacatatgtacatacatayataaatttgtattttttwaaaaaaatcatcagctagtttttctagtgcaatgtaattatcatttagcataaactctgacacttaataaatgtttgtaaagtaagtgaataaataastgataaattttataaaatgtcttttaaagggctctctcttaaaatcattttttgttagctcttaccttctactttaaccttctccattgaaagagctgataaagctgaagtgtatctactcacagctttgaagattgtgtgtttttcccttatctgttgctttcctgtattctagaattagtacaaatgttaagaatctaaaagagagcataacctctggtgactgaaagggcaatttaaaggcaagtttgcatgttttgttccttgaactaaatacctgcaattactgattgtcacatttttcttctgttgtaaaaactgaactaattgaaggtattacccttaggggacaagctctacagtataatgaatgttgagtgccctcttgagtttagcattttaattatttataattataatgatttctgtttatttgagaactttggaaataattctagtttatcaaacaaattgagaaacagagtagttgaggctttattttgttatgtttcatactgaggtcagcaggcttatggatatgccaagaagttctcacaagcaaaggagccagttttytgggcatgactgatatgtgccatgttctaaaatagctggatgtgtttttttctactctctctctgatttctctagaacgatgtgggcaatattggggttgtgaggtgaagagttgacaagaactcaactggaagaaattggaaataatttatgaaagtatgttaatcagagasgagacacagtagactcagtagctggctattagccaagtgtatacatttttaacacctttttctttacttgaaagagattgtctgtgtgtgtgtgtgtgttgtaccctaaatatatttgcatataatagatccaagtaaaagatgggtttctaggccattatggaccaaaataatctttttgtcaactgcaattgaatatatattagtgaaatgatgtattagggtcctacaatctgtttagatgtcatatacactcttaacagcagcctgaaagwgtaattaaatattacttttaaaaaagagcttggcattgcagtctgtttcatttttctcatctctttcttttttttcatcccactaatacaacactttagttttagagccaaacatgtactctgcagctagagaattagaattactggtagcttacattcaatttaggaagaagcagcaactgcataatayatccaaatagtagcaaaggtaagaatgattgatataaataatcatatagctatcaacaggtctggagatacacaatacataacattttaaaggagaataactttaaccattctcacctaaaattctcagcagccagatcagaaacaaggttctgctatacaaatgttatttaaaagtctatgtgggtagctccccatttcctagcccatctctgatcaagggaaattaacaattacatattccagggttaagctcaaatgtgatttctgctcttcccctgcaaattgttcaataaaggactggaagtactgtgaaaaaagaaagagagaaagaaatgttcttatcatccacaatatacttctccttccaacagcaaatctaaccacagctgggaaaaagcagcaaaaacaaacaaacaaaaagacttaattggaaaatcactttgcctccttgtccacccccaggtgctaaagcaagggataaaccaaaaggacagccagtaggtgaggagaggccatggaatacccgccaacaagataatcatcgctggaataatagggacctgtctgaatgtaggtatgtgtgccgaagacttctacgtgctctcgcagtccattatctggcattccctactttcatccgtgttatatacctgccatctcatcactcacagccactcggaatcccctggtggycctccagcaggaggtctttctcctctcttgagcttctaaaacactgtacaaaatcactttaaactgcttcctgcctcagtattgcccacatagaaaccttccccgtcaatgaaatggattcttttttaaaaattttttttattgattttcttttgcgtgtgttgttttttgtttgtgtgtgtgtttgtttttgtcaagctgaagttatcatgaaactgattcttatttcctaaacacagagatcctttgtctttgctgttcctattatctgaaatatctttcccaactactctttgatagttttaggtctgtttactctcgaacgccaaacaaactcaaaggtcacccacatcacaacaatcttgccgatttcctcatccccattatttcctttcttccagacttctgtagaacttgttgtatacctcctctgacatttgtttgacaagttctatcgtgctttttatccatatgtgcatatatcctgtgtccttgctataacaactgtttctttctggaaaagacaggatctgttgtgtttttgtataccagaacccaagaagaggggaaaccagcatgtcaccagctgctgtgatggagtcaggtagcacagggaagtggctcagagcagggactctggagctagactgcctgcgtttgagatcctgctcagccaattactagctgggtgatcttggcaaggttttttgttaaaactgttatgccttaatatctttaaaatagggataataatactatgcatctcattgagttgttgtgattaaatgagttgattagaacagtatctgacacacattaaacactcaaaattattgcctacttactactgtgtctacagtaatatcccatcttaattttctccataatgctataaaacatatgcattgttcccatcctcaaaacaggaacactgtgtccctggataaaaatactaaaggaagcagaatcagaactaaagtttctggtcttaaaccctaggctgtatcattctgaatattgtctcacacacatgtgcgcagtgaccagttgctattgataacaataacatttattcctctccagccacacacagtggcatgtgcctgtagtcccagctgctcaggagactgaggcaggagaatggcttgagcccaggaatttaaggccgcaatgagctatgatcgcaccactgcacttcagtgtgggtgacaaagtgagaccctgtctcaagaagaaaacaaattattcttttctgttcttatagttttaaactaaagtatgctgagatttcactgttttatattaaaaaataatcagaagatgaaatgtttccacttaactgtaaatacctttttttagtgagctaattcaaattggatggagtcaaactactttttttcagtctgactcagaggctaaaatgcaactcaacaagtattttatgttctggggcactgaaggaaaaggagggagaaaaacaaaatggttattcctaccctagggtattttaaatctaggtgactcagtaatggaaacacagcagaaacatcgaacacaatttaacctctcattcctaggttcactgtgagattggtccttttacggtccctccctcaccctgtgtaatagtgcaggttggatacagtatcattatctataaaaaaataacattttaggatttggtggaatatgccatttaaaagtaagctatacaatttatatgaagtagttttaaaattattttattctatttgaaattgttttggagaatttacaaagaccttggctaaatggagcatgccagccactcttggaatctctttattgtctagaaaatcattaagtcttgttcttgtcacttgcaaagttccttggctgctgctatttctttgtgcatgtgaagtactgagcactgtgctgggatgtggcagatgactgataaatccttagattattggtaaatattttaccaccctactgatgatacattaagtttactgtgcctcccagcccaacaccgaagtccagagtagcttcatagactctcagtagacctaaggaaactacctttaggtgaagatgaccaagagtagggattagaaggatgaaagatgaccaagagtagggattagaaggatgagcagttttgaacacttaaccttattctaggtatttttactttattatttttatttatttattttttaaagttttttagagatggggtcttgctgtgttacccaggatggtcttgaactcctgtcctcaagggatcctcccgcgtcagcctcccaagtagctggattataggcaggagccagcgtgcctggcttaggtttttaactttacatacatcatttcatgtaatcctcaaataactctatgaagtaggcattgttgtccccatttaccaacaaggaagctaaaatccagagagtttaactaatatgtttaaaaatcacagagctggtgagaaagaatttccggcgcaagtctaatccaaagaccaaaccaatgatgtagcagtcatgggggtgaagtgagcgcgaggttcagtgtcctgaggtaggtactctgacactgacgtcaagttgcctcaggcatattatagaayttcttcatgcttcaattttctcatctcacatgacattactatgaagatcaagatattttatttgtgaaatagctttgaaatgattagaggtgctataaatattaattatagttgtgagtttggtaaatataaacattgaaaccaaacatccccaaaggatttgaaaaccctggcaggcgatggggaagaagtggaagtaataaaatgaaacaaagaccaaagatgtagaaagcccatgctcatgcagggattctgggagcaaatctagacaagattgcccctagtgacctagcgctgatgctgacccgatgctgtgcagttctcagttactaagtggcagttacccttacatgttagatcatgttttaaaatgtaggtataatggccataatcactaaaccaaggattggacataggacaaaacattaaatatcagaactgttgcatatggagccctgtaccttgtataaggaacagttgtatggcaagctcttcatctggagcattaagaataatactatccatccatacatcattttaaaagtacatcccagcatccctgaaacaccccaggaacctcaatgggatacagcccagtgcttcttggaacaatctctttaacagtttttcagaggaattaatggtactttaagttatggctgatgactggttttgaccttgtagatgttgaagggaagtaaatgtatttgatgagttattaagcacatgcttcagttattatgatagtaaaaatggctcagtcttataaaactgtgaggtgctttctgtttcttagcacttaattgcattcctaccgagtttagataatgtcattaatctcagcatgtgacatagtatatttatttaaatttaagaaaattacccaaatttctttctattcttttgtttagacttatatacgtttatttcagaattacttactccagatgttttaagaattgtattttaacccaaatgagaacaggcaacttaaccaatactttagacggtattttagaagtcaaaaagaagttaagaaaccagttttagatgtcctttgtcaaagcctgcctagaggaggcctctgcttccaagatatactgctgagatggagaatctatgatcaattgctgaatttcatctggccaatttcaactgtcaagtatttctaaaaatataggcctgtgacaataacacattggactttgttcatagcctccttagtatttgcagtttatcattattgttaattattaagcattttgatggcagaatgggttgcaagaataatgatcacagtcacacagcaacaaatggctaatttgggggtatagtcctcagtttcaaaggtattttgtaaactgtaaggtattttgtaaaggtattttctaaactatacaaatattatttataggaataatttttataataccaaattatgtttttatgcaagatagtgaaatattatagcaaaaaaaatcctacatattttactttaaaagtattcatcagcatgtgttctttgacatataacaggatgtctgtgagaagactcatgagaattataataatatctgctcttaataaagtaccagctgtatgccagacactttaaaatggatcattcttagtcttcagaacattagttcaaggagattttgttgtcttcttatacagctgagaaaactgcagctaagataggttcataagtagattagtaaactaataaatggtagaaccacaattcaaacccagatcttttagacccctctgcccatgctctttaactataagagaggctaggagtgaaaaagaaaaactctcaaatagaaacaatgatcgacagatacattaattaattagttaagtaatagtagctaccatttattaacaggccaggtactgggttagctgccttagagaccttaagttcattatcctagtaaacagctcaaaagagttcattcatctcagatttttcaaataaattagaaattaatattctcatttgccttatgagaggtttaacgttcaaagacattgagtaactgacacaaaatggcacacctagagaagagcagatctaagttaccaattcaggtcttgtcaagttctaaaaatccatattctttccactaaataatattatatgctaaaacatatgtcttatttatacaataaagactctggactactgcgtacttacctttttttcttttaacttattcttgggacgatttcagttttatttaaaacttaccgagctttatgatattcaggaactttcagatagttagtattagcccgacgaatatggactagtttgtgtttattctaatgctgcccatgatttctgagtcagatttttacattataaatctcatgtgctcaatttgtatttcatagtctacaatttcactaagaactttaaaaacgaaagagaatttattaaactcaggaaaactgcctcacatatgtaaattgctgctctgaaataccacaagtcacaaatacaactgaatagctttcatcctaatcatataagaagcctagaacagcattttgcattcattcattaaacaagtgtccattgatggccaactatttttatagcgttgtgctggggacattggcagataataattcaaaaccccccgccctcaaagaactttacaaattaattaaggagaaaaggcagggtaaccattaagtaacaaaagccaaagttacrtaatattgcaactgtgaaataaatcatgcttaaaaaaaagagtgctccaacttcatggctggaggtgctgactatgggttgaagtggtcagaaggactccagaaaggaaggtaactgggtcagcagagaggatggacagcactggtcaggcaggtgcatgtggtgcaagtggccaggaagcagattcatttattgttctgaaggtttgtgcaagggaactggaaaagactggaaaaggaggtgaggccagacagccaaaggctttgattttagctaaagactctggcctgtggcctccaagtgatagggagtcattgtacacttttgagcaggggagtgacatcattaaagtagtcctttaaaaaagattaatctggcaggactaggcaggatggattggtggaaaaagaacaggagcaaagaaactactgcaataattcaggtataaggtgatgaggttctgggcagaagtgataacaggaacagaaggaaagaaattaatgtaagagatagttcaaaggaagacgtgacagaaggtgatgactagatgtgggaggagaacagacaaaatacactaattttaaatcctatttggaaacttttatagtttataaaatgtatggagttcacgagacattatatataatattcctggcctgagatgccactggatccaaggaagatgttgcttttactcgacgtagcacttcttttagcaaaatctaaaggacactgctgcattttaagagataataaattctattataaaaattactgagagaataattttatctttatgtcacaataataataactgcagatacagaatggcagcacaattagatgaaaattcaactaaaaaatgatgtttcatttacctccaaaattctattttattaatttagatttctaaattaattttctaccaaattggctttttaaaatgtgaattgattaagtctagatttgattattttcacaaatatgttaatatgattttccagtaacttgggggtttttgtgtcttcattttaggaataattccattgtcttcaaaatatatttgtataataattacgttactttccaagtggaaaaatgcagcatagagaaagtgattttatgatttatccaaagtagggtgagaggtcaagaatctcttcctatgggtccagtggactgtatattaatagataaaaaagattagaaaacaagtaatatcatttttgattgcttatacttagtgaaaatattgagtgccaggcaaatgcaaccttcttccctaacacatacacacatacackccattgcwttttatatatatatatatatatatatatatatatatatatatatatataaaacttcaggaagcaactgtcgttttagaattacttagatgctgtttttaatgcatcaggtaaaacatatcatggcttctaatattaattcattctccacttagcattgttaaaaatatttatgatctagtatagagcaaaacatattgttatccattttccccagctttgatataaaagcattcttcagttgtttcctaaggaggaatgttgtcaaagtttgatggtaatttatgttgtcagtccattaagttgattttatggcagccaacacaactattgtccatttatgagaaacccgaggaccaatctaggtctccacgaaggccgtttgatatctgccctctcatatcgctgaccttgaggggagttgggtttggtaatttatggcaaacaccatctaggaagacccatttgcaagattcactgtcatttagttctaaatgatcattgctgagtccagagacaatctgagctcctgacagagcaatcccataaaaaatattgcctacccacccaggtgtcctttccaattatctggagtagaaattaatacttttaaaagctgctagtttttgaaaggttattacaatttattccagtggtttcttttgcacattatgatgaattagtttattacaccattattttccatgtcagctttttagaagattgaaccataatgttgaaacattagtgtgaatggcaaacatactattttatagctgagtaacatatttctttgagaaaaatgtgttcagtttttaataacaggtaattttatgtttatgttccctaatgctgttgtcagatattatttatttctttttggtaagaactagagaactttcttttaaaatgttaatggtgcattagacagattttagagtcatagtaaggatatattactgaaaaatagaaaatataaattgtaagtgtttttccctgaaagctaatactttctaaggttttcttgacactgatttaatatatagttacttccagggagaatcatacttctgtctcaatattttctctaaatgtagttgggggagggggaatttctaattcatttttctgagatctcaagtttttctttaatgaaacttccttatcttaaatgactggcttcatatgtcatttggaagtattttgtaaaataatatgaattagcactttgatagagatttttttttagtcgttctccattcaatgtctactaggatactgagaaagtattagtaatttcctatttaaccaggtattaaaaataatcatggtgtcaacaaagattgataagaagtattctaaagagtaccctgtatactatcttcattcatacagcaaatgcacgcctattgctgccaggcatcatacaactatgtggagttgagacacatccataacaacattctagaaatgcaatctttttattcctgtcacaattatttttattcctacagtttttaaaaatgcaatgcagctttacaaaattctgaatcttgtgtaaattgagcatgtaaacaaatgcagtcacactttacaagttttacatttgctacctccaatacagcaagtacttgccaaaggaaatactgatttttgttttctcatcaaacatatttgtttctttagcaaatgtttgcaatactgaagtatttgtttttattgatctatgactggaacaaatgttagttttagcagaattaagattcaaggcatttcacaaatttttcccattgtgccagaaaattttttgataatgtcttaggcttaaatgagttccaaggtttcttttcaaatttatattgaaatctaacatacacacagaaaaatgtatacattgtaagtgtatagctcactggattttcacaaggtgagcccgcctgtgtaactagcacttggatcaagaaacagaaatcaccagcatccaacaaacacttctgtgtccccttccagttgtcacctcccagcccttaataaccattctcctgactcatgacactgtagattagattttcctgtttttatgaacacagtataaacatagtcataacttggcataatgtttttgacatttattttcttggctgtttgtagttatactttgttctcattgtcgcacagtacattccattgtttaaatatattttacttacccagcctactattgatgatcactgctttgattctagtttggggttattgaaaaaaatgctactatgagcattattatacatggcctttggcaaaatatgaaagcacctctgttgggtctattccaaggagtggaatggctgggccacagaataaatagaagttcagctttcatagatayggccaacmagttttcatgagttactggtagtctcacagttactagttatgttctttggacttcaggattagacataactgggaagaattgggtaaataatttctaggtttctctcaggcctaaaattctgtaattcagcmcttctttacaatggagagcattggcatagatttcaacaaaaggcagataatgagaatctgctatttggttttctactatatttctctatttgcatttgcatctggatttgactgttaataaacctgtgaagtcacattttatgataaataaatgaaattacagcattgaatgcagaaaagctgaaaagatttttggtttgcccaattatatgcttccctgtaatacagaacattttttgccaggctgatggtaataactagcttaatgcaatgccttctcttcagggttcctggttattctcactggagcagagcaggaattgtgtgtatgcatggtattttgcaaagaacaagtcctcaatacattttggttgaacatatttatccattttgtcaaatggttttttatgagctttggggattgcatagaatcctagctctgccaactgacttttgccaaatgcttcatctccctcagcytcattttctttgtctgctatgtggaaaaaataatagtccctgcctcccagatcactgtgagaacaaaatgacataacacacatgaagcacttcacacatgttaataataataaataaagtctacccgtgataaatactcagtaactattgggtggtgttatagatgttttttcaattttaagatgagtattcttccaacctctgcctmagatactaaagattctgctgctcataatttatgcatagacagacatgttatataatcaactagaatctgacaattagattttattctttcttttattaatatttccacaaatatttattgagtaccttctacatgctatgcactatgtaagacacagggattccaccagaaatagttcagacactgtccacaggcatacaaagctgtcgaggcttgcaagtccacagacagttacagtgccatgggaccaggcatgaagggaggatccagacacaatgagtttgcacagtggaggcgctgcttcacttcaggaaggtttcctgaaagaagtgacagctccattgacagctgatggatgcaaaggagttaatcaggttagggaggagtggggttgtacaggaacaagaatgcaataggcagaggaggcagcattagagaacagaaagatttcaagaaagcctgaagcttagaagcctaagtatgggaggtgaggggagaaggaaaagtgtcagaaaggaaggggtaatgctaaaaaagcaagcattaaggttgtatagactggactcttggactttggactttatcctgagggtaattagaagccactgatggtttcattactttttaatttataaattaaagtatgattggcaaataaaaattttatatatttgtggtctgtgtaatattttgatatatgtatacattgtgaaatgattaaatcaagctaattaacttatcacctcacatacttatcatttattgttataagaacatttaaggtctactttcttagcaatttttgagtgtacagtacactattattaaccatagtcaccacactgtgtaataaatctcccaaacttatttctcctatctaactgaaactttgtaccatttgaccaacatctttccatccccctgcaactcccagcccctggcaacaatgattatactctcagaataagccattaaatggatttaaatgtgaatgtcttgatcagatttgtatattaggaacaaagtaaagaatgaattggatgggaatgagacaggaggcaggaagaccagttaagaggctggggcagtaaacagagtagaaggttacactggtctgaattcaggtctcagcagtgggaacagggagaagaggatgggtagaaagtagaaagtatcacactcggaaatctaggatggtacctgtaattccatcctggacaatggggtggatagtcatggaaggaaaagatgcagaaggaagagaaggtgaggggtggaagacagtgcatttcactgggcatgttaaggttgaagtgcctgttattatctaactgcagaagacatgtaagtgttgaataaatagcgttgagttcaggtgagaaaccttttatgaagatgtaaataacatggtaattacagcatccttggacacaggacaggttgcttaagcagagcttggagtgagaggagaaaggcctagaacagagccctgaggaaaagccatatttaagataataagtggaagaagagaaacctcaaagaacaccgagaaggaatagctacagagatggtagggaaatgtgaagagggggttatcatgatgaccactgagatgaaatgtttctagaagaagggaatgaaaggtcaatagtgccagaggctgccaagatgtgaaataaactggatatcgagaagtgttaacaccagatttgtcaaaaaggagatctgtggcaactctgcttagaagaggctggctttgagcaaaccagggtacaaataataagtggaaccacaactaaaagttgatgaaattccaggtaaatgtgattcttcaatagcacactacataactgtatatttaagagagttacactatccgttgtctgttaaatacatatttttaaacttaagcacaactacaaaatacataccagttttgatcacaacaggttttccatcactgttttgacatttacctttgaatcatgcaaacgttctttagaagaatatgaattttatgccctaatccaattgttagaaatttgcctcatggtgaacctcagctgaggagtctgaagaaccaggaatgggatgagggagaaaatcctctttggagaaattccttttggagattttttgttaatttgggaaagaataggatgtggaagcttagtgtagagggattccacatggaaggaaaggtcctgtccttgcgtgtacagagtcaaactcagagaatagactccttggaagaaaagtcggtgattcattattgtgagttaagagaagacatgctataaatcacaagcaggagaaacaccggttctggtttctctgccctgtttcactgttgaaaattaattttcctcaggatttgtttttttcctggtggctgttacttacagtatggtccacccagactagcttattcatttctacaggcagttcctgttggtgcactaaggtagaagcctagcaaattagtttagggggttgtaggaactctatgtgaaagcactgcttccatttcaatctataaatacagggtgtgtttattaccacatttcacaccaagcccaagccaggtcagtacgtgacgtttgtgtttagaagagattcgaagggatagtgtttgggtaattttccattaaaaaatatacattatgtcacttaggtgtatgatataatgggttccttcttgaactctgcatcttcacagagtggttttgttgcttaaagggtagatgaggycgacactctaattatatctgttttatagaaaggtaaagtcagaatctgagaaattaagtcatttgcctaagtaggcatctggtaagtaacaagacctggattcaaaaccagatttttttcacagcagcctggtggaactagagtagcatgcttgtctttttttctttttttctcttttttccaagttttgaatagaatccattggcttgattaacagaagactaatattttgttttctaattctaccacggacttcactttactctctattctttttcttctttcttctttatatttattcgtgtcctattatttatatctctacaggccacttaaaactggcatggggatgaataagaggacactttattaagtcacaagataatattgtcattaacaaaatttgtatcataataaaatacaatatgtaagaagtagagttaaacacattagcattaagcctgagagatattgttctacaagataattagcataaatttgttcaacaaatacgtctcaagcacctcctactctwagggtgcctctccgtgctgggtcaatggcagtgcacagaatgcatggcctgccctcccagagcggacattccagctgggggtggggtggtggaggggagacaggcagtaaatgcatatgtaaccagagcaatcgggaaagataaggcaaagtcaaatggatagaagatgcccagatgatgggaggagagaggctgccttcttatgtatggcagtcagggaagacttatcagtgagatgacatttgacaaaggccacaggaagcaaaccctgcccacatctgcgtgaagcacatcccaggaaggagcaacatgaccagaaaatgccagaggcaggaacttgctacatgtttatgtgcccctcctcctgccttcccccaagcaaagtaagcagatgaagtgggtgaggggaagggagaatggcaagagactaaataagatgtgatggggtgcagtagtctgacttgtacaggctggtacaagcccctcaaggatttattcaaatatgtcacagttacaatgaatattgttttgatacatctaatctaagtcttttttttaaactgatttcaaaaacaacagacatggagtcttgctatgttgcccaggttggtttcaaacccctgggctaaagcaacttgcctgcctcagccttccaaagtgctgggattacaggtgtgagccaccacactcagtctcaatccaaattttaccaccttgcttctcttttgggttcccttttcagctctaaatagtgccagctggaatattgagcaggatcagaaaataagcatgctttcactcacctcgccttcccactgaggcaggcagcaataattgatcacagacttctctagtcacactgcaaaaagtcagagctggccaagaaatgaaccattccagacataaccttgaatactcagacatctcctttcccttcttacctctccttcgttaatagactgcagtcccaagagccaaaccttcagcatctggatttgcctttgcttctgcccacttgtctgagacccaggaactaaaacttcctgtgatcctctctgctccccacraaaccctctcctgctcctgtgcacattcagtccccctgagcccccttgataacccttccctgctcaccactgtgcagttgaagggacgtgaacagcgaagagctaaaagcaarataatcttgacctttctgcatcttagtttcctcatctgcaaaatgggcctcaccatgcccagcckgcaggattgttgtgagtactaagatagtagttattaataaggtgactatagctgacaccactgagtccttgatctcatcagaggaaaagagaggagaaaagagggccccaggaacttgaaacagaaaaaaccaaggtgaaaattacttacgttttttactggcctcctagtttcaccacactgccacttctatcatacctcactgagcacagaagagcaaatgaatgagataagacagaatatgataatccaggacagaaatttcatctctccaccaatatggtgcaacgggagtctgccccattgagaaaatgaatacgaagatgagcatgaagcaaatattgccatggagagaggatatgatttttcagcaggtaggtgggaaaaaggagtggatcagtgcaaatatagaaacaggccacttataaaattaggaaatataacgaaatcccaatagaacatgtaaatatttccacctatacctattgttatttaatggggattactggacattattcaattagctatcctggagcagggctgacctgggtttaggacctggcactcccrcaccagcatggaacatacaaaaggagatatcccagctgttggtactgtgaggaagtctaaaccaggagacagagcccaggatccaaacggcagctctgcccccattaacagtaccgtgggcatcaggcagtaaaagggtgtttcagtgaacaagttaaatactgcaactgggaatattcaagctgataggtaaagtctcaaccattgggtggggatcagtggcaagacttcaactccttgtagagtcaagaggggtgtgagggctgagagaaagactaggactagcccwaagcaaaataaagagcatgaaaattattaggcagatccccaggcagattcagttaacaaaactgggagccaatcattcaagataaggaagatttggaatcacagctcaaagcacaggccaaagcctctagcagcaaaggcttcatgggtgctgaacttttacatccctcgcagtagagacagggcctgactgctcaaggggcaggccacttgggatcgcacttacactgggaggttggaccacaggaagagaaaatgtgtccaggcggagaactgagccagcgctggcccctctaacttgacaaactctcagcaaaatccactttagcctcgactttcctgagctgtaagatgaaattctgagaagaaagatgagaaaagcaaatctgtagagttgccgggagctttcacactcctccttctttataaaaaccagtttctgcttagctcaggtagtaacagaattatttctaattacctaaaatttctcctctaactggatttcagcaggaaatgatatcctcaaaagcttaaatttctggagtgaaaaatgtaaaaagttaagaaggtaggagtgttaacagttaatggattatcagagtggtatgtgcagcatagatgtgtacactgaaacaaagaagtgtgaatttgcaaggaataattctttttctttaaaaatagaaaatgcatgctaatattgagaatagaaactgaaatttattttgcataagaaacataaatttatggcctggcacggtggctcatggctttaatcccagcactttgggaggccgaagtgcgtcgatcacgaggtcaggagttcgagaccatcctggctaacaagatgaaaccccgtctctactaaaaaattcrccgggcatggtggcacgcgcctgtagtcccagctacccaggaggctgaggcaaaagaatcgcttgaagccgggaggcagagtttgcagtgaaccgagatcacgccaccgtactccagcctaggcgacagaccctccgtctcaaaaattaaaaaaaataaaataaaataaacataattttgaaattgtcaccatataattaacctagccacaaagaataggcaataagagcatagctgaatgtattgaattgaaaaataatgaccttgaaaacactggcacaggaatttatatttttctattttaatttatagcttgtgaagtgttgatataattttctacattttacataatttgggagtgtcttctttcaaaggagctttaaatatattggaatttattgggcaactgctaactcagaagcaagtggttgtccatctattggcttccagagagaggttgcactgsttcatttaggcaactggaatcccatttaccagaaagctaatcaacaagatggctagttacatttatgagtatttcttttagaggcatttagtttcaatcccacagatggtagctgcagaccattagtttctgagccaagcttttcagtgtcctattgtacttagcaagattgctatgcagcaacacaattattccaaattcagcaagagtcagcgggcctaaaacaaagctatgccataacaatttaatcccagctcaccttcccctttgctggataaataatcaaacacctgctgaattctgttccatataatgagaacatcttagcaacaaagatcaaagaacactgacatttgatctctaagtagaaccccattataaaaaaggatttttattacgtggtgtcggatagctattttgtgggtcagataatgctgggacaaataaacaataccaaaaaatcctaactcaacatgattaatttgtaaggcatgggtcattcctttgcctcagcatcaacatttttgagtgcttcattctatcagagtcagccatcttttgaatgacttgtaaaacagtcatttaaaatgtacaggggcaagcgaatatgtgctttctggttttttattcatgctttaaaaaaagcagtaaaaatgcaaggtgaaaggatattaaggatgtttatctttctagttgcactagaattcccactttcaagaacaagcaaaatagtttgagctttgaaaatgtccaaaacacacgttttccaatgtaattcacataagacaatttgacgattccttctggggtttcttttcatgcttgcagtgaataaataaatatgagtacaaatgataaggctttctttcaggattttattataattgctgaatacatctcctacactcaggcattaactccttctctgaatcttttttaaaaaatattgcatgtatgctatagaatgcaaatcctcctttccttctcccatcacacccagacagcttgtgaaaccccatattcttcataaaacctctcttgaatgaaaatgacatagggctttcacctccagtccttcatataaaggtctaattgaagcagctttccccagattctcttctctgtaaagggcacttgtactatttctcatatatgaagtaaatacttattttgatgtatttagtcaaaagggcagctgggcctctatacgtttgcttatgagattgcctgtcttaggaaactttaataagtcaaacattgaacaacaatcctttggcactgtgtgccactggaacttaatagagctcaatggtgttttttatattagcggttgtgtgaacgtaggctatgtgacatctagatctgtgtgaataccacagtgtgcacaaataacagtacagattaaaaacaaacttaacaggacatccaaagccattaattgtattgaaagtattcttaaattaaaaccatttatgtgacaatattgagcagaagactagttttcagtaagaatatttaatggtcatcaagaaaaacatagkcatttcctactccctatagaatacaaattcttgtatttaaaattaacactagccaaaagtaccagagcatcctcctaacatgaatagcctcacttatcttttggctaaatgttaatctaaccaacaaagggaaactcttttaagcctgtctcttcttgatatgacaggatgcagaattaccacaattttggacagtattttaaatcattcaggactacttttgaatagttgataaaaactaaacttttgtatatgtgtattacacttttttccatgtaatatcaaagtggtgatatacctcagatttaaaatttgtgctgacctaagaaatttttttttaatttttaaaattttacttgaagttccaggacacatgtgcagaatgtgcaggcttgttacatgtgccatggtggtttgctgcacctatcaacccaccatctaagttttaagccccacatgcattaggtawttgtcctaatgctctccctcccctgccccccacctgccaacaggccccagtgtgtgatgttcccctccctgtgtctatgtgttctcattgttcaactcccacttatgagtgagaacatgtggtgtttggttttctgttcctgtgttagtttgctgaaaatgatggcttccagcttcatccatgtccctgcaaaggacatgaactcatccttttttatggctgcatagtattccatggtgtacatttgccacattttctttatccagtctatcattgatgggcatttgggttggtttcaagtctttgctattgtaaatagtgcttcaataaacatgtgtgtgcatgtgtctttatagtagaatgatttgtaaccctttgggtrtatacccagtaatgggattgctgagtcaaatggtatttctggttctagatccttgaggaatcgccacactgtcttccacaatggwtgaactaatttacactcccaccaacagtgtaaaaatgtttctatttctccacagcctcaccagcatctgttgtttcctgactttttaataatcaccattttaactggtgtgagatggtatctcactgtggttttgatttgcatttctctaatgatcagtgatgatgagctttctttcatgtttgtttgccacataaatgtcttcttttgagaaatgtctgttcatatcctttgcccactttttgatggggttgtttttcttgtaaattttttaagttccttgtagattctggatattacgactgtcagatgggtagattgcaaaaattttctcccattctataggttgccttttcactctaatgctagtttcttttgccatgcagaagctctttagtttaattagatcttatttgtcaattatggcttttgtttcaattgcttttggtgttttagtcatgaagtcggcatccctatgtcctgaatggtattgcctacgttttcttctagggttttattatttattttttgagacagagtttcactctcattgcccaggatggagtacagtggcgcgatcttggctctctgcaacctccacctcctgggttcaagcgattctcctgccccagcctcctgagtagctgggattacaggtgtccgccaccacacccagttaatttttttgtatttttaatagagacagggtttcaccatgttggccaggctggtctcgaactcctgacctcaggtgatccacccgccttggcttcccaaagtgctgggattacaggyataagccacygtgcctggcctcttctagggtttttatggtttggggttttacattaagtmtttaatccatgttgagttaatttttgtataaggtgtaaggaaggggtccagtttcacttttctgcatatggctagccagttttcccagtaccatttattaaatagggaattcttttcccattgcttgtttttgtcaggtttgtcaaagatcagatggttgtagatgtgtggtgttatttctgaggtctctgttctgttccattggctgcagacctaagaatttataatgtctagaaaaatgatcttatggtacctagaaatgaaatttccaattcaaattattctagaagtaatgattttcttatatcaaatcattctgaaattataattttatgcattcggatgaaggaggatatatatgctgcaacagagatcaaaagtgacagaagcttacctctaagagaagtttatttctctgccaggtgyggtggctcatgsctgtaatcccagcactttgggaggccaaggtgggagaatcacttgaggtcaggagttcaagaccagcctggccaacatggtaaaaccctgtctctactaaaaatacaaaaattagcgaagtgtggtggtgcctgcttgtagtccyagctactcgggaggctgaggcaggaggatcacttgagcctaggaggcagaggttgcagtgagctgagattgtgccactgtactccagcctgggtgacagagcgagactccaaaacatctccgccacccctcaaaaaaggaagtttatttctcatgacctaacaattcagaatgagtagtccagattggtaggttggttctgctgcactaggttattccaagaccctattcttctgtgtttcaatcaacttcatcttcatggttgaagtgaggtcactgccatgccagtgtccctatgcatggaggagcagaaatgaagggcaaacaaccctcttaagtgatgtggaagttgcacacatcacttcagctcacgttctatcagtgagaattcagtcacatggccacatttagctgcaagggaggctggaaaatagtctgtggcatcctcatctgagttcgtaccccaaatagccaaataactatgtgttttcaaaatcccactcagtctttgcatccagcacaaagtcatgtgctggcttttccaacaagagctgagatagctcttttgtgctggtaatgtgtaaacagttaagattcttgactttgcccacagagtccccctatatagtgttagtgtagtaataggataatgcagtataatctcccattcagaaaagaaagaaagggaaacacatagtagtccctgatccataccagtgatgaaagcctgctgctcagtgtattcagctgttcttgcatgccataaagaaatacctgcaactgggtaatttataaagaaaagaggtttaatggctcatagttctgcaggcacaagcatggcagcttcccaggaggcctcggagctgttactcatggcagagggtaaagcgggagcaggaatatcacatggcagaagcaggagtgagggaatgggggaaggtgccatacacttttaaatgaccaaatcacatgagacctcatcaaatattgcaaagacgcaccaagccatgagggatccmcccccatgatgcaaacatatcccaccagtccccacttccactgttgggaatttcagttcaacatgagatttgggcaggagtgaatatacaaaccgtatcacttaggaacagcctccctgcccttctaggggttgatgccctctgcttagaccctggtggacattcttggccattggcctccatggcttctaactttcctctctggaggttcttccttgcccatattctccttagccacatgtgaggtgagacagagagaaacactcctttggggacctcgtttagggattgaacaatcacaggactttatgggccagacttctactttctttaacgatatgattctctcagaacttagtcaatttaggtcagccaactgtatcttctgtaagggaggaacaaagttgactacctttaaaaaacaaaaagtactctttcacagtgctcrcagatttctatttcaaatattctatttagctgtctttatggttggccgttaggataaagctctctactctcaaagattgcttcttgtagaactgtggtttacagagaagagacatatctagargcaactggactctgtaattttttttaattttagtagaaatgctaaaggtgattttatttctaaatcagactatttttttctattgaaaattatgagagtttggacccatttagttagccagtctccagtagcaatccattccatcacaacattaggaaaatgtactttcctttcagatgtccattggtttaaaggtgatgcgacatctcaagggtatcagttcaattaagatcacttaccacaaattctttaaattcagctatgatagatacagcactgctgtgagaaattatcctcccaaagctgagggctgtggcttaggggcagacagctgtgttcctgatgagtgaggaaggcccctgcttcccacagcacccccacacgagccctgcctcccactgcagttcgcagcagctcaagactcaactctcacttctgcatctgctgtctttgtttgctttggtgtccttgaccctgcctgctccacgtacctggccactctcattgaacctttatggttttgacatctgtcattttctgcccatgtaaactaccctggccactctctccagactccctccttctaatcaggcaggctttgtgtccccatgtgaacattcctgtcattcctctggtttggggacctgtctctcccaaacccgacattctcatttcatttcaggcttgccataaaccagggctcagataagccaggcttactgctgggaccactgcaaataatacctgagatgaaactcgaagcacactaaaccattttgagaaagaatctttcacaataaagaaactctattcctggagagatgrtgaaatttcagtgtgaggtgttttgttttttgttttgttttagcaaggcagtctttgagctgtgtgagataggactggaatgtgctatcaggaccaacctagaagtacaaagctaagccctgcctccggggcttgtaggaatgtggacagaataccagaacctagttggtatacagggtatgaagtcaggttcaaatgccaagaagtaagggtcaggtcagcagcaaaaatcaacagagagtggaggaactggagtgaagttggagcacaagtgagagtaatttccgtgagcatcagctgagatgtttgaatggcccaggctctgcagacacaggtatgtcactacctggccaaggctcccactgttcaggtcccaactaacagcagagcaacaagttaggcagacataaacgtttactgaatagctgttatatatcaggcactgccacaggagctatacaaacgttactcatttaattctaacaactgtactttgaagtaggtatcaactcagccttttacagatgaggaaactgtaacatggttcagatgacctagctagtaagtgtcagagctaagattagtgcccagttctacctaatgccaatggctttgcctttcctgtccagcaggggttaaaatatgtttaaaacaatctatggatttttgggacctgctacctccagtttccatgtttctgcttatgtcctgtagatgcatttatttgagaactaacttctggatagaagtttcaagattaaatgctcatgtttggtcatatggtaggaacttttggagagtttaattttaggctgtgtgggaccattatgcaacttatcaaagaccgtcccaaagctgaaagagttttctttctttgtgatgtaactaaaaatgtctttatcgggctctgattttatttgtgaaatttcaatctttgaacaatgactggtgggaaatccagttaataatgtgaactcttcgctaaatgtatcggtcataggtcatccaaaggtgatgagaagtctgccaatgtttgggaatgctgcatgcttgtctctgtacagtccaaaacagagtgaagtttttcagcctaaaaacacaggaaagcagctctcctatattcatcaatctggtcaggggcagttctgtgacagtctgctcaggctacagagtagagtggtgaacacagttgccactgggaactctgggactgcatttacactgcctgctggtttcccactcacttaaaacctcaacataaaaaatagagatgagtctcttaagtaaaaattgttttatttgagaataatatacaagaagtaggactgcaatctgggacatatatacagaccagattggcctctggagtgtccacagaataaaggaaaaggttagagtttattgggaaaggcggaggctatgcgttggttttggaagaaagcttattggtgctggcagcaacaaaagagctggtgagttctgactggcgagtgycaatagttattaggtaggacttgtaatcctggagttacagttaggcccttgtagttttggactgggcttgtgagactgtgtcaggcacatgttcttgtataagcagctagctgtccttatgctgcaaactgtccttgtgtgacccatgtaataagctgcagtttggaaaaatttcttctgatggctcctgttatcaagaaaatcatgtgtgagatccctccgttcatgatcctccttggcgccatttgcccgggtttgacacaagtgactctattttgaatcttacaactttcacaccccaaatgctagtattggaatagtaatgatactacatatctaatcacctcctattctgcaatggacatgcacaacttcctaaaaagaacacaaatccagaagaggaattagacaatggttatatatagtgatctcccactgaacacgacatatgtgttattaacaatgataatcattattatgctagacattttgcagtacttattatgtgccaggcattattctcatactttatggatattaactcatttaacctttacaacagtctcatgaagtagatattattattcttccaatattacatcttccaagatgagaaaaccaaggcatagaacagttaagtaatttgcccaaggccacatgtccagtgaaaagcaaccactgaaattatgcttcctgtttgaaagaactgacgataaggcagatttaatgagtgacaagtactttggagtcagtaaagggaaaagagagagcgtgataaacttacctatagtgtttagtctaagttaccccactcttcactgtggccaccgtccaccacttgtagctcttctccaaaagcctgaacatttttccccgttaatgtgtttaggcaaagataattgctgtggtactaaggcaggaattggtgagtgaggtgagaagataacttttacttagtagcagtccagaagaaatgacaacattcttcacagcactcctcccttaagcttccctatcccctataaatggatagacatacaggaaaaccttggtatgggactatttgtgtagagctcatgaagactagattgattaagggaagttatgttagcttctcttatgagactttgaaatcgttttattatgcagaatgctttctgtaaatggcatttacctgtaagaggaaaaagatgattatatctattgattatataattattcatctttacaaacattttgcaaagattatcacatttaaattctgtctggctcacaaggcttgtgttatcctcacccaccctcgcagtaactgctccctcctttctcccagccacgcttacctcccatgactcactcgtgagcctgccacgtgaccgtattcagagcttccacatggaacaggttaaaatgaaaaggaagattgttgacatcactttctgatgttactttattttactcgttcctttcattggtttaccaatcccaaactgtaaacsttatttgacccaggactttttccatgttttaaacgttcattacaattgcacagctcctataaatgcatgctcctcatatccctgtctaaagaattctatacagagatgggaagttgttatccttgaaataatcagacagtgatgctccaagcaggaaagcttaagaaatagggatgataaaggagacagtacacaaatggaaaaatttaaaggcagggcattattttgtgagagagagaagagagacaaactggaaaccaagaaatatcatgaatattacaaacaaccagctgtaggaaatgaggaaaaaaaaatgagatggaacatgaagcagggaagcatttgttttattcaaatagataaggatctgagagccattcgcatggcaggcttgtatgcaaaatacacacacacacacacacacacacacacacacacacacacacaaactatcatcttagatagagcagaaagctgacaaagtggcaagatgctgagaacactggcagtcccaagcccatgtctgtaggacaggagccaatgggcaggaagggcacrctcaccttctcagcctcgccttccaaacagcccctactgccttgtcacattccaactgagtttcatgcatttggtattgtacatattgttaaaatgaaaattaaaactgtcatacttgggtgactcaggcacatttataatttatcacctttctttatagttaaaaagaacaaccagggaaatgcagcttagctctcactcacaaactctcagcactacataaagcatgcttgagcctcataagacagatatactgcacacatttagcatatttctttctccccttatggaackttttcttacccctcgtatgcttagctttaaatatattcagaagctataaatattacatggaattttgagatctgaaaaatgacttcttcattgctgatatactgatatgctgaagaacaaatttagtatccatatttacatgataaaagttttcagttaatacactggactgtttttagccatccatggcaatgctgtgattacatttcaatcgttgagtgaaggagagaaaaggatccaatttagaatgaacccaggtttctgggtaagtggagatttgctgaatttgtaggggcaggaagagacacaggtctccagtggtaaagttaagtatattttaatgaggcactgtagccagaggtgtcctcttgatatttaaagtatgtataatgcactcatttggaaaatgccattttatttccctctgaataaaaataatagttactacttattgagtacttgatttgttacaggcattgtttctcactctatcttatttaatccttataacaaccttgtgggtatatttcttcaatttacagatgaggaaactgaagcagaaagaaataaaataacttgctaaaaaaaaattacataactagtaaatgcaaagaactgccaggctccaagatcttgcctttgcctctgccctgtactgcttccaacttgaaaaataacaaactagccatttttgacagaacagtcacrtttctcccttgtggctcaatctcagagcagccctctctgcattcctcgtgctcctctgcccagcgtgctcttctgtgtaccgttggagcagatctgaacatgacactaatgccctgtgttggattcacagccaaggtgagggtagaaaagagtcagcaaggtccagtgctttctaagcctttatttattatacaaatgatcttagaacactataacaagcaaggaaggggtggaccttagagaacttctgattcatctcaaacatgtaatgcatctcaaatttcagccagtcacacaacatcttcgtgattttggccagatctaccaaccacttttacaattatttaatacaccgtttaaataaactttttaacactttttaaatgcatttatgttaaaaaaaatttatatcactattataaatggcaagccagtatcacttttcataaattaaagataaccataaaaatgtacaaaaataacattatgaaattctagtctaatattgccaaactctttgaaattgatagccagtatagattagacattatttaagaggtgtgaaagatactgtagcatcaaactgagacttttccccttgaataaatagaaggattgaaaaagaagtagaagaaaatcactctttcctcaggtagttcagtgttatttaatgccatgtctgtgcattactgatagtcatctctagtgtagccagtggtttgtatccatcactcaggaaagtctagggaatagctatttccctcattgaaaagaacaaagactaagggccagaaaggtgaaatgtttacatgtctgatacccgacatctagcatttagtagatgcattaacatcttaaatgagtgaataaatgaggtatttggaaatatttgcactttaaaatcaaatatggcttctaattttgtaactgccatttcctgccagtatgaccagaacccaggtggtctcttgactcccaacaatgttcttgttcatgccacatactgctccacaagttgaagatgatgcataaatggtagttgagagctagatgcagattctatgacaggtccaagttctacaaggcaaaacctagcacagagttgggaatctagcatgtattaaataagtaataggggataaatctttaaatagatagacaggaatcttgttgtctccttccttctgaatttagcaattaagttcaacttctgtttactgagaatacctatgtttccagcgctattcatatagagtagaatcagataaatgggtctactcatgctgaattacccggatgaagtgatcaacaaacgcacactctgcctcctccctcatcttttttttttttgaacttttgtccctaatgtcatttgcgagagtgtaaaattctgagttcttcagacttttccaaccgctcttcccacctacttcaatctcttcaaccacagtagcccaagagtggccaccattaggctatgatgttaatcatcccagatggcctgactgttcaacaccaaagatcagggttagctggaaaccaaacactccttcagtcactgcagtgagaacaatataagcacatctgaaaggagagtggggagaagatcaaggcaacagggcaaagatattcctgtgggactgaatggtgctgctgttggcaaagtgcactcctgctatagattgaatatttttgtcccttcagcatttttatgttgaaatcctaactccaaggtgaggacattagggggtggggcattctgaagccctaatgaatgggatctgtagctttacaaaaagagatctgggagagctcccttgccccttccaagtgaggatgaagcaagaagatgccttctgtgaactaggaagcaagcgctcaccagacactgaatctaccaagcctccaaaactaagaaatacatttctgttgtttataagctacccagtccacattattttgttatagcagcttgcagggactaagacaactcaccattactatctttggtggaattcacattcatgtattccattccaagagcaggagcttgaagaaatgtttgccataaattacaactcaggattttttaccaggggagccacgtagatgggtccggtacaaaggactgtcaagtgtcatattttcagccattccgagagatgctaggaaggaaactaaagtgtatatataagatattcctgcatggttacctgctcattccaactcagcttctcctaacgctgggttctgtttttatgtggcctcttcagacatcaagaccttttgcccacatttccaccattccatcatttaagtagcaactgctctaacagtaataacaggaaaaatcttactaacccaaatatattttgcttttaattatgctagtaccatagtagacatcttttttagagaacaaaattaatccaaaagccgttttgtgaagataatgattttttcaagtcaacagatgaaggcaatatccatcactttatgagatcagtgactgtccttttcccagcacctagaactatcatggcatatagatgttcaataagtacttgttcaatgaatgaatgtaaatttggacatataatggactaaggaatcagaaatgggtgctaatttaattactactacttctccatctgaccaatrtgacttcagacaaggtacccaactctcagagcctccttttttttttaatctataaaatgctagtgytatttttaagattaggattaagtatttagagtacctagctcataacagggatttaataagtggtagctctttttattatacttataagtggatctatttggggatattgaagaagtctgaaaactcctttaatttcaaagacctaacaatcagtgccaccaattagtcatcagtgccaccaacaaggcacagcgttggatgccagaggagacatcagaagcaggaaatgggaagagtggaagagatgaagtaggaataaatgaatggataggaaaggcaggcaaagaaggggagctcagtggaggagcagtgacttgccatgaatccctgccttgttagcacttggcacagtgggacctatccacataagaaatcgcatttcctttcctcaagagtccactgagacttcaggagagacacaacttgacaacttttgaatggacacctgaaaaaggtcctcttattttctgccactgttttgtgtttcattcttttgtttggccaacttaatattaactatttcaatttagcagatatttcaggagcaacaccaagttcaaaacccagttcttggcacccaagcaatgatatactaaatatttttcacctgagactacagaagatcttacatccctgtgatgtctataggtgtgtatttctcttaccaccttgacaaaattaagtggctttctcatatgcaaggagaattatgctttctagtatccaagtgttaaagccagcatactgttacttttgtactttgaaactataaatgggatatggtttgcgggggggagaagaaattggaattggtctcattaagggagaaaaatcttttcctgataacctattcaagaagagataattctcaggtttccactttggatactgccattatccagaaagtcatcgaaacaagattgctatgatacattatattgtcatatccacatatccatttaggaaaaaaacacattggcaatagttcttcagcagaattcattatattctctgaatgaatcagattgggagggcaaaatatcaaaaaatgatattctctccaaaagtaatttttcataaaaacaccaggacttttggcactctgtaaatattgtttttgtaacaattataattaaaagagccaaaaggaggtcagaaaaatgtagagcccagtgaaaaatgtcccaatgccttactccatgaaaatgtctagaatgatttaaagtattgggaatatgcaaatgaatgaatattccacaacagcctccacttgaacaaaacaaggcttttgaattggcataagttccttgaatagtattctgaagtgagtctatgccaaaaatataaaataagagcagcacattaaagtagccaacagtcaaacagacaaactggcccttcgggggagactgaaggatttcaagttaatgcccaattcacttcaatacaacaaaaacatgttaacttctaaggtgctatgagagatacagggtgtattagtctgttctcatgctgctaataaagatatatccgagactgggtaatttataaaggaaagaggtttaatkgactcacagctccacatggctggggaggcctcacaatcatggctgaagacaaatgaagagcaaagtcacatcctacatggcagcagccaacagagtgtgtgcaggggaactgctctttataaaaccattagatctcatgagacttattcactatcacaagaacagcatgggaaagacctgcccccatgatttaattactcccactgggtccgtcccatgacacgtgggacttactgaagctacaattcaagatgagatttaggtggggacacagccaaaccatatcaaagggggatgtagcctgattcctgttttgtgaggtttgtaatctaatgagttagacagctacccttgcaattacaacacaaggcaggatttattcattcattcaaccagtatgcactgagcacccactgtgtgtccgtctgtgttctgagtgctagacataaagcagaacacaaggatctctgccttcctggtatgggattctaacatgtggattgttgaaatgaccatgagtgatatggaggaaaacaaagcagacaagggggatgcaacctgggctccagtgataaagcccaggggagtaggagtcctcactgagaaggtggcatttgaataaagacctgaaggaggtgagtgagtcattagggtggctggggaagagccttccaggcagagttgaaagagcaaggacagaataaacactatgcctggcatgtgcaagaaacagcaataaataaacgtcacgggaagaagaaattaatcttgactgtggaataggagaaaacatcacagaaaaagatgacatctgacctaaatcttgaaaccgtgccctgggtggagagggaggatggtgacatgcagagtgagcagatgagccaggagcagagtgagaacaagacacaggtcagctgtgctggcacccgcctgtctgttccagctccggttctgtgggttactggtgttcattacttcatcaacagctccctgctgtttctttttgccattcacatcctcatctacctcttggttttttccctgcctggggagtgctaaggtcatcaccccttcttcctcctgtctctgggcatagtccctgcccccagaaaaccctgttttctcacctgacttaacgtatatatcagttacccccaggtcagtatctcagtcacaatctaatcaatagtgctgtgaattatggaaggaatgatcagggtgtaggaaacatttgcaaccacctataggaagagcaactgtcaacagtgggacctctgcarcctgcaggtatctgcagtggctctgaagaaagagctcatggtgtcctctccacattatctatttgccagtttaggcctctgtatgtctcatgccccttccaccctggttcaccartctagaagtcatttatagagaaaaccagcgtcaccaagttcacccatgtctctctccacctgctcccctggtgtttctgagcctccttaccctgtgcaacccttgtgccgtggcacccgcatggtaagcatggatggcagacttggaagctgtggcagtaacgtgggcttaagatcactttagaggattccacactgaaatgcacacaaaatttcaggacactggaggaaaagagagaaattcacagaggctggggtcaaagaggaatgcatacagggtaggggctaaggcatctcccctcagccctggcagtcccagcatagaaggagctagataggaatgatgctttccagcagcccttgttgcacactagaatcacctgaggagcttttaaaaaamtgattctccatccctaattaaatgggaatctctggggtaaggcccgagcaggtatttccttgacaattccacgtgcggcttaggctgagaacaactgagctagaatcaaagctgccttcttctcactgcaggtcctgcttcctgtgcagctctatgcaaaaaattctgcctacctgggaaggactccccctttagcctctctgccactcctgtatctccaaaatggggtttcaaccagacagttctttagaggagaggaaaatagatggctaagtgttagaaccttgggtcagaccttggatccaagccagcagtgcaaccttgggcaaattatttaacctcccctgacctcattttcttcacctgtaaccagatggcaataatcatacgctcctcatggggttgtgatgactccatgatatcataagtgcagagcccctcacatagtgcctggcacacagtaggaggctgctatttgctgtcagtgttgtgtgtcttaacctggcttatgcaagtccttaccctgccctccagacacaaggcttgccagtttcttgactcaatgtactctcaaacttgaattgttttaaatttctctctcctcctcctcctcctttttctctccagccaccgcctcccactaccgctccccgccgccctctctttctgtctctctctctctctcatgctcccacatacactctgtggtgtctatcacatcccagtcttgctccctctgcctggcctggcctctctctgtccttccaggcatggacccctatgcatgctcaagattcatcttataatcacctccctggaaactgtcctgaacaagcccctgcaccctatctcaaccagaatcctctcctctgtgctactgaaatgtcctgcacatatttctaactctgcatttaccacattatattctatctgtgcatgtagctcttgcccccactacaaatgagcatcttaaaatgcattatttttcttatatttttggtgcttaaaacaatgtctggtacacaataagcactcaataaatgctgactgactgaataaatgctctaaaatatctttcccagtggcatattaagacatctagtcccctcctcttagcctaaaatttataccattggcatcatttccatgggttaaacaaggaaaacaccaccactgtatagattctctatgcaaatctagctaaagtgcaactgtgtatatacgtgcacacacaaacacatgatactacagaggagcaaggactatctactgcagccattctcatcacctccctatccattggtgtcctctgaggaacagtggggtcatgggctagagaaactctcaggttctctccaatcctggaacttcgtggaggcaggctcaggtctttgggaagttcaaagaagctgactctgagggaggaaaacggagaactggacagggcagtgaggaaccaggcccattgtcatcccttgatgggcagaagacaagatgggaatgatgagatctgtgcaagaacatcattcaggaagggcagatctagatgcaggatctagaggaaatggagagggaggtgacaaatagggggtaagaggaggatgagatcttctcacagcaagcaccatggaagggtttggagtgggggaaagatgaaatcagagggttggttggggatcaagttgacaaaaatagaatgcggataagagaacaaggaggacagaacaatgaaaatgttgtgtaagacacattaacattagccctgaaaatctcccggaagaaagtcaaaactcaagtcctctgaattcagaccggcttgaaagagcctgggcttctggtggtgaatgggacaggagcctcaaggtccagccgttagcctccccttcagacctactaaaacccagccttcgttcacagtaggtacatgcacgttgtttggtgaagaccttattcaatactcacagagatggtaactatttataagcctgccctttccccccttatatctggccaaaacctttgtttcacttggaccaggcaatctccatcacttcaggccataacgctgttctgtttgctgttgctcttagattataggtaaacagtacggaaaatgctatttgtgaccaggagcacatttctggaaaatgcctgccctgctggtatttggctgaattttgaatagctctctttctgactaccttggccagccaaatggtatgcaaacaagagggtgagctttactcattcccaacatttatatggcgtgataagacatgacaaactttataggaaattatgcataaatttatatcaaaaattgatgcattggttgtctgaaaacaaaatcgcatttgctgataagctctaatttattgtgggaacaagcaataaaatgaaggtttcctttggcaaagttttactggaaattcataaaatcatgcaagtgtactgattacaaatcagctgtctataccataccatgcacagatatgatcattgcacaatacttatctttctcattttgtcacttttggcaccagtttgtgtttgagaacctctyaactatgatataagctatgagaatattgaaaaagggaatcattaatatgcaaaaaacaaattaaaatttagggtgcaaataagataacaattcaaaagatttataaggtaaaatattgaaaaattaaattgaaggaaaaacatattaaatgataatgagagaggaatttccaaatggaagcatataccacaatcactcccttggcaccagtgaaagggcacattggaatattaaacgcccacatggttacaagcaaggcttattgtgaccactgataatgaatgttactaatcagacagagaggtrcagaaacaatagtaaataatgatttcacagaagtaaaatttgtggattttttatttttacataaaaagaaacgtaatcagataaagataccaagtaggtctctgacttcttaggcccaagagcaaagtctacaatagatagtttcaaaattcagtttcctgaaagaagtattttaagaaatttttttaaatttcaaattgtcccccttctccaactttttaatcatgatrtaacaccatgttccctaagaagtttaaggacacttttttctctatatggcatattcttttacaagacatcttttaagatctaatattctatgtatttttacactgtgaaaaactattgtcaaaaggaggaaatactttgcagttttttacttcctaaatttataggaaaagtcactttttaaaagtttacttttataacattttaagaaagcaataaaacccacatttcctcccttgtattctactttatgaattctctcctgaaatatgatctacttaaatttcacttacctcctttttttttccttttgataatctgtagtagatatttgcattagattgctcctgaaatgtatgacaattggaacattaaaatggttccacctccatttccaaaaattactcatgcaactttgatgcatctgcaaagttaggcattcagtgatgatgcttgcctgacttttaatgtgaaacatttgagtgcaaagttagatttttctatttatttattttttagagacaggatcttgctttgttgcccaggctggagtgcagtggcatgatcatagttcactgcagccttgagttcctggatttaagcaaacctccctgcctcaacctcctgagtagctaggactacaagggtgcaccaccatgctcagctaattttaaaattttttttgtaatatggctgggcacggtggctcacacctgtaatcccagcactttgggaggccaaggtgggcggatcacatggtcaggagatcgagactatcctggctaacacggtgaaaccccgtctctactaagaatacaaaaaattagccaggtgtggtggcaggcgcctgtagtcccagctactcaggaggctgaggcaggagaatggtgtgaacccaggaggcggagcttgcagtgagccgagattgcgccactgtactccagcctgggcaacagagcaagactccgtctcaaaaagaaaaaaaaattgtaacaacagggtctgtatttcccaggctgatctcaaactcctggcctcaagcaatactcctgccttggcctcccaaagcactgggattacaggcatgagccaccatctcccaccccagatttttctataaactagcaattgcataggtaactttagaagtacatttgaaaaattcgataacaacattaaacaagctttttattcattgtgaaatgctttcagtagtgactgaaagttacttttctctctcattgtgtaaaactaacacagtgcaactcaatagaatgttttaggatgatgaaaatgtgctatatatgtggtgcttgataagggaggtgctggtcacattgaacagttgaaggttgttagtttaaccacggaattaattttaaaattcttatttaattgtgattactttaaatttaaatagccaaatatggctagtggctaccatactggacaacacagaaccaatagatgtggcttgttatctatatacttcrtttcattgagatggaacctttgtttgtattttcatttaccccatgtgcgcctcaattttcttacctagatgaaggtgtagactacgtgatttctaatattgtttacagctgaaacttgtctgactctcctctttatcccaaaatatcacattctttaaaaccagctttatcacagatctaaacatcaaatctaataatatgaacctttaatatctgtaagaattatcctatatgtttgagttttatacaaaatctttgaagtcaacattatcatactacttttcacaaaggtggcagaaaacattttctctgaaggtatctttgcacgattgcaattacataaaaaatactagcaaaaccttctacttaatagctcacctaaccttcctttctctcttctctccaccccagagaattttcggtgatgttactgagctctcctaacaatagcaagcataatgcttcatttgtttggcatcccaccctctgctagatgttatattaagattcttggctgggcgcggtggctcacacctgtaatcccagcactttgggaggccaaggcaggcggatcacgaggtcaggagatcgagaccatcctggctaacacgatgaaaccctgtctctactaaaaatacaaaaaattagctgggtgtggtggtgggcacctgtagtcccagctactctggaggcccaggcaggagaatggtgtgaacccaggaggcggagcttgcagtgagccaagattgtgccactgcactgcagcctgggcaacagagcaagactccgtctcaaaaaaaaaaaaaaaaaaaaaaggttcttgttgcaggtgtgtgtctcaattgtctttgcatctccagctcctgggaaggaagatgcctggccagtgatgagaccaatataccaatgatgttaattaacatttactaagagctcattatgtaccaagcattgtgctaaaggatttatattctcacttctcactcacaacatctatgaggtagatactattacagtctctgtttaataaaygtatgataaatggacaaataaacaatccagaaacttggctttttcttttcctggagtttgacttgtgcattacagaaagatgaagagaatttatcagcagctttttctacaatgacaagccttagcagcagtttttcttcactgcaaaatatgtgtgtctacctaatatttttaacaactaagggttcaaagagcaacactgagagctataaggaaccagatttattcattgacattcacactggactggagctcattgcttactctctttttctgtaccttttactctcagcagttgtcttaatcacttggcatgctcctaagctggttcagtactctcaattaaattacaagatgaaaatacaagttgtaaaatctacaggtttattttgttttgatttgttttacttttttaaatctcttagactaatgtgtgcctattgagtagtgtttattttttaatgaaaacctgcttacacatcattaatttttctctgagatcgtttctactagtgtgtaagattcgtgaaggcaggaactttggcttgctcatccctgcgtatatccccaggccttggaaaagtgcctgacatgtagacaggcaatcaacattagttacataaataatgaccgaagttctaaatatttacrtggctgcactatgttcctctgcctcacttttttttggtgcaattttgccacctttaaaaaaggttattatttacacaaagtaattgtatttacataaaataatcagaacatggaacaaaaacgcagcatacaaaattgaaagttaaaaattcttaaaatgtcarttatttaagtagattcagatgtgatcacagaaacttttcagtggttaaccagaggtgtatatcagaattatctggaggagttctttaaaactatagaggctcaggtctttgttcaagagatgctgatttagtgagttcagggtatagtctgaaaatccacgttttcatagagaatctcaagtgattgtcttttactttttcctttttcaggcagctgtatggttgtattagaggaagcaggctataaatatgcacacatatatatttattttatatatatataaatttctccatatatatgaataagtttctctatacatatgtctctctctctctatatataagtctctctctctctctctmtmtmtatatatatatatttgtcctttttgactgaatgatttcacttagcataatgtattcaagattcatccatgttgtagcatgtgtcagaatttccttcttttttaaggctgagtgaatatttcatttgtatgtatagattacattttgttkattaattcatctcttgatggacacttgtatgcctggcttctttcagtaggcatagtgctttaagattcaccccttttatggcttgtatctgtggttatttgcccaggtaattttgatagttctcaaactctgctagccatatgaatgctgaaatgcccaaacttggaatcaaaattgttttgggttaaatatgtgtgtattctttccttctctggttgattcttgaccagttaggttactatttgtttctcagtggtaagaaatttgtatcactcttgaggcatgttccatgacaagggcaaggaatggatcatggtaataacttacagttgtatagcactgaccattgacagtactcaagtactcattttcatgcctatttccagcatcatctacatcaaaggcaattcctaagaaattggtaattaagtagaattttcttccaataacggaggaatttgttttttgtttttgtttttaatagagatggggtttcaccatgttggccaggctagtctcgaactcctgacctcaaatgatcagcccacctcggcttcccaaaatgctggggttacaggcatgagggtatttctattttaaagaggtttctagaggattggagaactcgcaggactaaaagatgtcattttatgctttgtgtcatataaccctcttatcaacatcttataatgacctcttatatatcattatccccaccttacctatgagaaagcctagaccatgaaggattaagtagtaatgtgcttaagggtcgcacagttggcaagtggtaaaaccatcatttgaacctaattcttctgatccagtttcactgctcatggcttcctgtgcatctgtttgaaaggtacaaggatggctcccatgacagaaattaactcacccaccagcccagcagggtgcctgaaatgcctgaagtaaattgacatcttttggtcctgagagttctccaatcctctagaaacccctttaaaatggaaatactctacagatgagttgcagtgacagcaaattcacccagggggaatcagtttatagcaataaaaacaacagccacttattgaacctgctcttacatacattagatacctcacttcattctcaaaataatcttttgaggtcagcattattatccccatgtaacaaatgaataaacagtcccaagaatrcttaagtaatttcttcaaaattacactgcacatagctggaggatcctgtttcttaatctcaaatctgcatatgtgtatagatagtgcttttcataccacctcttaccagacttttttccaataagatgctgaacaggggagatgaaaggttgggacaccttgaggcaaatggctgggaaaaggagtcaagttggacttcgtgtataagtgtgtctggagctggcttgaattactatttatgaatgactagctataaaaaaaagttataaagtcctctctgtttttttattttcactctttttaaaaacatctccctctacaatgaattctttgcttgcgtagaatgtgtatttggcacttttttcttggtctatccagggagtatttttgaaatgttgtttcttactgagcgccctaaggaactgatgatattaatcgtggtgaagaaagaacaagaatataagattcacgctgctctttgattaaagcttcttaratagaattttacctcaagagctttgttgtctcaatggcctcctataggtatttttctgagcrgtctctgagggttttgtttcctagttccctgtaatactgcctgtcagcttccatgctgcatgtatttcacttcaaaagagagcctggataatttgcctatttctgcattttagagcagagtcaaacaatgccaaatgggctatcacgtgttgacaagaagtcagcaggaaaggctagtcaggtaatcatcaagttgatatatttgagacactgtgcgatgatttcagctttgcatcaactaagtactctccctgcacagtgggtatctattaatcaggtggagttcaactcagggtcccagttatgctgtttgttgtcttagtgccttaaataggaatatgtgatataaggctccattataggagtaaaactctacctaactaccaatttcttaagaattgcttttgatgtagatgatgccggaaatagagtgccttttgatccttctgaatatttaagaaccttcataaaaaagataaaaatttagaaaactagtttactagaattcaatgactcttttgctgaaccaaaatagttttatatatttacaactatttttgatatattgccctacattttgcaaataattttctcagaatattcaaacatttttaagtgacctttactatgtaccttttgaattttaagccttggtaaggaaatttctactgaaaaacataaaagtttttaagttgtatatgcttttcctaattgaaaggcatatgttagattgctcttgatatgtgatgctagaaagctcaaattgtaattctttctaaaaatatttctacttcagaagtgttttgtatttaaaaaaaatcatttaatttattgaacatattttattttacatatttcagtggaaaatcacatcttccagagaaaaaatcaatgatattttatttgctttccccagactgagtttaatgacaacccaagatatataaacttatatcctggctgcttttcttaagagatttccagcaaaagtagccacctaggcaaattgcttatgccacacaactagactcaccccatggatcaagctttgaaacattgcatcttactgctcattttatagaatattttctttattaccatcaagcagttttctggagagaaatataacaaatgacccaaaacaatgtaaacctgaaaatcgatagctgattgttaataatacgatctaaaagagagatttcagttactttgtctcatggaccaagaaagcaggataataatgttaaatcctttgtgtattttttttccwctggttatcaaggtttattttcattagctggtcccatttgattaaaaaaaaaaaaaaagagctaatcctggacagagctgcttaccaaaaaactgaaccatagtaatggaaaagtattaatataaactaggatatttccaaaatgtattcacctaaatgtctgtttgatataggcaaaaatamaaacaaaacacaaaaacctcacgtattattttagtcacatatgtggttgggcgccagggaatgggtgtggttagttgaagcccctgtagaataagaagctatagactgagagaaatgaaagaaattgataagctgccttgggagtttcagtctggccaaaatgcatccttggcacaccctgcattccagggttccatattccctctgaggtccagggcaggtctgacctgggttgggactcaggagctgggattgtatggggttgtcagcccagtcatttagtgcwacatcaggaagaacaggggtctaaggtatcaggtccatggtggttgtcagtcacagcaagagctggacagaaaggcagggactgcaatgggaaaaatcaaagctagggagttcagaagcattccagaggcaacttgaaaccacgggaggaagatctttatggcaagatacctcttggtggaagggagatgttaagggcactgccagctttgacctcagccttagaaagtggatgtgataatgatcatggtaaagatcagtgaaagagctggtatccttatataattcttgaaaaaagaaatacatggagcaacagtgaattctcctccgtagtacatcctgagaagttcacagggttgtaaaatcttggaagaaaaaaaaattatcttggagttaccaaataccccaacatatgcaaagaattattaaatttccaaagtaacatttatacttgcaagtgagtatgtgttccatacagagtacatgttagccaaagattcatagctataggacccacttgtctggaaggcaggctgaatttctgaactaggcatgaagcaggtcaagtcatggattagcatgctgaatgggattgtggatctatatgcttgcattcaaaaagtgacttgattggaaaggagaccttatgttaggaaagacaaaaaatggaccttgaatgtgtggcttaaaagttgggattttatttaattggacaattattcatttttattttcattttcttgatactttttaaagaattatcctcttgggtatatactttgttcagtttttagtcagacatctcttaattgcttttggacattcaaattctgaagtgggaaaacctcaagcgatttagtgttggcttagttttctcatttctacaatgaatgtcttgggctagaagatatttgaggtctcttccaactttgagtgttgagcctgggcagtgtaaaaacaatctgtatggctgggcgcgatggctcacgcctgtaatcccagcactttgggaggtcaaggtgggcagatcacctgaggttgggagttttagaccagcctgaccaacatggagaaaccccgtctctactaaaaatacaaaattagcccggtgcggtggcgcatgcctgtaatcccagctactcggaaaggctgaggcaggagaatcgcttgaacccaggaggtggagtttgcggtgagctgagattgcaccattgcactccagcctaggcaacaagagtgaaactccgtctcaaacaaacaaacaaacaaacaaacaaaaactatctgtatatacacttgacattgaaataagagaaaagttttcactggcttaatgattcagtatccaacaataaatatcactgcagattggaagttcagagtatcaaatgttacaatcttgtttaaaacaataatgttatgacctacaagtcatccctgtgttccttgcttctgtcctcacactttacctataacacacacactcctccaaggtagggaaggtggacgtggtggaggcatagttggttcttcacactgcagtgtatttgtaacatatgttaacagaagggtaggtttcacatcctaggtgaattattctcttccaatcttgaattaacaaggattgctatgaatgtaagagggaaaatcattgaaataaaaatacctaatgccacaattgttccaaactaaatgtaatctaccaccctgttgaaaatttagaattccagagattttctaactggatgccataaataccttctctcttggctcagaattccctgggagttctgaaacttagccccaccccatgagggtagagtttatgttattcacacttgtgtctccagacccagacaaaatctactgaaaagtaggatctcactaaattgtgtgataggtgaattaatgaatgcttatgtgaatgatgaaatgtttacgcacagcccccaaaggtcagcctcaaaggatgatatgggtatcctgcagagtggctcctgagggctccaggtaccaaagcatgactctaagggctcatcacacattctggaaactgtcagcttagcaaggctggctaagcagagtgacagacaatcccagctggaccttcccttcaagtattatgcaagacaggttcatccccagggacagggggtgatgtctggactgggtcagggaagagccccagtctcgacaaggagcgaagcaagggcatagaaggtagcagcgcctggcatctagcacccaggtggggcctgggacaggacttccagcaggaagaaggtaggacacgctgtcagaactaagatctaatattcattaactccttatcacccaaaattgtattcccacctccaaaatgttatttttaacttttgctaaaaataaacaaatatacagataaataaataaaaataaacattcaatttgttttatggcagatatgctaaggaatgatgtgataataacaaaatattggagacaacttaaatattcaaatacagtggttgtttttttaaaaatatgggaagccatgcactaatactatacaactatgttaaattatttgtaaatattcttttaacatgtgattaagtgaaaaaataaggtaataaatactagtattgtattttttataaaaagaaaattttatttatctacaaagaaaagggtttggaaagtcacaaaccaagatattaccaatttttttgttaggtaattagattatacatttttcctttttttgcttattaagaaatttaaatttttctttaatgcaaaaaatatgtaaaagaattaacaggcagtaaatttgtccttgatgcactgcattacagaaagaactctgagtggaataaatatcacctgtcttttggacgtcctaggagttgagttgacactgtggtggttgcttgtgttaggtggagtgagcaatatcacagaaacctcccacgtggagatttctattgtatttgaaaagcttagaacactgttatgtgatgtataaactgtgggtcagaacagtgatacaaaaataataagagtacttttgcttcaagaaatccaacttaatttaaagtgactggattccgatttataagcctgaggtacattagagtttgaaagttttttgtttcctttcaaatgtacattaatatttggctcaatgctcatagggaagcaattcagcaccaaaggtgcaattattcttccagaatgctaaaatcaatttagctgtttggcttataataaatgctgagttatattctcagatgccaaaattcctccaattataggtgtacattactgggacttctgaaaaaagaaatatgtaagacctccctttttaattcgtggaattcaagccctaaagaaaaagaacaaaatcctcttaaaaataagaaatttctaccctcacctatacatttgtaaaaccaatttgatcgctgcttgtatttttagagaggattttgttatttttctctaagagtatcctttttttctctgttaagtatttttagactctgctgaaaagcaactttatatcttccatgtgacttactagaaaggttctcaaatcatagcctataaatcattaatgtcccctgattttctataactattttccaattgaactgaaaaaaatgaccaaaataatcacataaagaagtattttttgtgtgtgagataaatctgttgttcattttacacacacacacacaaacatttttaaaatgtaaaaacagtatatgtaatctcaaagttagatatgaaaggcatcaaagtatggttgaaagaatacagacattgaaatcatagaagattgactttctgtcatagtttggacaattactgtataaatgtagggctaaattacttcatttctctgtacctcagtttctcctgtttactcctatctagaggcttatagttaggggaaaaaaatcaggtaaaggtacagtcataatcactaatgaatactaaatatttaataaatgctactgggkgcttgtctgttcattgtttatttggggttttttttgttgttttttgttttgttttgttttgttttgtttgagacagcatctcgctctatcacccaggctagagtgcaatggcacgatctcggctcactacaacctctgcctcccaggttcaagtgattctyctgcctcagcctcctgagtagctgggattacaggcacatgtcaccacacctgggtaatttttgtatttttggtagagacggggtttcaycacgttggccaggcyggtctcgaactcctgaccttgagatccacccaccttggcctcccaaagtgctgggattacttctttattgtttatctctcttgctttactgtaaatttcctgagggcaggaccgatgtcctctttgaaccccaacattttgacataatttctaactcccagtagttactcgataaacatttgttgaatgaattggtgaagcatgtagtatccagcaaagattgagggctcctaatcaggattatttgtgacattattgtaattgaatatgctaaatcttcccatcctgccagagttccaaacccttttaaaatttataattaggatatcacaaatatctcttctctaaatctttcatattcgcttctctaaaagctagagtgcaattctgtgtgcagtgctctccctatgttggttgctacttaatctcctaggtttttcatgttgtccttaacattacacagttcttccttattgaggcagtttaatttcaatttgcagttcccctcactgcctccccaacttttgaaagaccacattgttggttttaaaagaaaggtcacattattttctggaagtcaagaatttatcagattctgccattttatcagaacaaaagttctgtcatctatcaaatggatgagtctcccaatggtggtccaaccaccatgccagtgttgccatctgtgtaaggaaagactttggctgactcacccctatgaaataacttctctactgtcttgtttatcgtccctcaggcactttgcattctacttttccctttaggtttgtgggcatccattcactgtgtgcctcttcttatgctttgctattcttactcctttagtgccttcgttctttttgaatcaggtgaattgtctcatagggacagtacatgttatgctttgattacaaacaaccctscaatctaagtggtttataatatatgtttttctctttctcatgctacatatccatcatggcttgggtactcctgtgttcctcttggtcttagtccaggaccagacaaacagaacagccactatctggagcattcccagacaccagacatggtggcagagagaaagagacccacatttcacaccaactgttaaagctctcacctagaggtaacatgtgccatttctgctcatgttttattggtcagaatagtcctattctactcctgtcttctaaaggggatggagaaatactctcctaccacctgtcagaaagaagaactgtaaayatcttgtgaagagattaatgactgagacatatacctttctatcaattcattttggtcatgaggcctgtcccacctgtgggagctcatatttacttccatgttttaaactttcaaatttactttatttgttcactayatattcttgagtagagaaatgagaataggtagtcaagataatggtaaataatggtaataaccccatataattgctttcttatatatagattgtttataatgcagttaactcccatccttaagaaatacataaagtgtttgagaatcactggtctccaagaaagaacatcagactcttaaagacaaaacacagatttgcccttgtgtctcttctttgtattacctgcctgactatatatagatcagtggctcctttctatatgccattttttttccgctgaaaattatacctagctgtgacttatgtggaagtggctaagctggcaataattgtatagatgtccatacatgccccctcagaatctcaatggtacctcaaggtcatctgccttgaggactggtaaatctggtcataatgtggataatttacaactggagaaataaaggagttctccttgctatgcaaagaaggcctctttgaatgttggtgtcggcattaattccctttatgatgtgaggcaaatcacttaattgctaggtgtcttctttttctgatccaaggataatattaacatacctctctaggtccttgtgaagcataatatatagaattgattgcaaaggcattttcagaatatgagacactatagagacatttgttgcactctgaattccctacgttgcccacagtgccactcctagaggtagatgtctggatagggagtgaatatttgagggaaggggtagttatacagggcagagatgtctatttctgaattcccaattagcctaagtcagtaatctacgttgtggattatatctggcctgcttgatgcactgatcttcctcctttaggcatttttctggtttctttttacttggcagaggagataaaattcaaattggtcttttttgcctggtatagtatctctaggaagaagttagattggatggccaatttataaacaatactgacagtttgggtttagggttagagtaatagcatacttgtttagcatttaactcttttgaagtgctttcacatcatggatcattttacctgagacttgccataactttgtaagctgggtattaccctaatttacagaagagaagactgaggttcaaaagattccatatgttgcccaatgtcaccacactaagaaatgacaaattcaaacccatattttctgattttgcgtggagaaatattttgttccattattccaggctacctctgtgttttctagcagagataagtgatgcccagatataaaccatgatcacatggagccaagacagggttgaatgaaaaattagcccaaaggaacttattatttgcagtcaaattcaagatattttgcctagaaagtaaaaggaatgagctatttcttcaacattaattttagtattctaatgaattaaaattaattcagttaattaattagttattttccaccagaggattcagccggaatggggagggggaggaattttgaattcctggtaaaaatgatgacttgatttcttgatgatgatattagccaatgactcaacttccatctccccttcccctataataataggaataaggagagttgattttcatgcattcattattcagttactaccctttgccaagaagcgttagtctaatggatgaagggagggggagaacaaataagtaaacagattattataatacagtaagtgctaaaatgtaacaaaggatggcaccaaacccaaaaggaagggcagcaattaagrtgaagtaagccattacttaaactcattaagtaagagttaggtcagtggtgggggaaaatggagatctagctgttagggcagaagttccattagttctggatggcaagaggatggggaaggaggtgggaagtggaaggcgaagggcaaagtaaaaggtaagcaagggttaaaccttgaaagatatctatggcctgctaagaaatttaactttattcttaaygctcttggagatactgctgaaacttataaaaatagaaaggtctgtggggtaaatggatttggagacctagtaagtttgtcagctgactcaaaaacacttcaggctgttagtaaaatccaagcaagaaaagaccaggtaaagagaggttatggtctttgctgcacatcatttagcccataacctaggcaaactagaactggggtctcctaattcttaggctggcatttctttctcccatcccacattgccttcccatctctttggcatttttttcctttagagaattgtattccttttggaatatatgctgagatgctagaatatctttaaaggtaatctcattctccattaaaaacagatatttatcatggtgatgttaacatttagacagttcttaccagcagtctcattcgtgtgatctcatttggttttcttctgagaacgccaaagtctttttactcctgtgrgtaaaaataaagataccctaaatttctctggtggaatactttaaacttcaagcagtgccttttctttatattgtagtttggagaatagagcaaaaaaaattgttttattttatgctttagtatcaaaaaataactgctcattgttaatgagaattatagggccagttcaacygcagtgataagttcagggcataaaagatcatatatcaacatgacctcactaaccttctctgtactaaatgacaaactgctaggaatagcctttggatcaggccacagagacactaaaatacttacccttcaccacagaactgtattgaactctatctgtcatttaccaccgtcaatcatagaagcctgcttggatgctaaacaggatttcaaacaaaaaataaaaagaaagagaacttccttcaaatagttcaacttctgattttatttagtgtctttctggacatttgaaataatgtggggaaggatcacagcaagttagccatgttttttgcatttgtggagggattgtgtataagggaaagagcaagattttcgggccagtgggattcaatctggcatctatgcttctttccccttccataagaggttaacactatgtcattgttataatgataggacagatatgtgacattattcttttctttatagcaggactagaccaagctaacagagacttggttagctttttaagagaaagagactcatgtaatttagccaaaaggttctgagactgctaacttcatgctagacatacttgctgcaaaaacttattccccaaaattcaactaaatgccattgtttcttgtttgtaaatgtgtctatgagagacttttatagttttcttagaaaatcagaattaaaaaaaattatcttcaggaaaatgaacatacccttcaaccaccatcaaccactctaaaattcatgtgttactttcatgcctttttcatgtgagacagaaatatatgggatggcataaaaaataaaatatatcctcatataggttttattattatcctcataatttgccaactgggaattactgagattccacattgtacatagcatttatgcacttgatttcgggaccaggactctggtcgctgcagaaaaaatactgaaccatatgaacactgtccttgcatttataaagcttatgaagataatatcaaaggtgatttgctgagtgaattaatgaaatcacataacctttgtgttcacataaccttttaacacaaaaagagtgcattttcctatgactgagtctaaattacagcaaagcaactgatcaatacgatttttttaaaaagtaacttgcagtttcaactgcagcattttctttaaatatttttgtcctctmagtaatatatattgcttcatttagatattatactatgattaatttagtcaagaaaggaaaaatcaaaacataaatattgtgccaatcataaaaacatatgtgtaataataacaaaatagacctaatatctgcacataatcagattttaaagagcagttttgtaagtaggaaaaatgtgtgactctatattgccaatgactgaggcctcccagcattcctgtttttgcaaatcatgctgtaagagatcacataattatatgatcctattggatcttcagtagctaagactctgttgaaaagttctgagagttcttatgtcattaccatcaagaaaactttagtaacatcctattctgtaaatcagaaatgggagggattattcctccacttactgctaacacttaaaagtaacagcacaatggataaagtagaaggtgagtgcattgctaggcatggaggaaaggaaggcctcagtgaggcaagaaatatttgtgactccatagaaaatacatcagtgagtcaaactagtcatagagaacctgctacatgtttggcactatagtggtttaaagaactataaattgtttccaccacccaggttattccattttagtctcagaaaccaaagcaatgcatgtgtaacaaatgcagagaaagcccacaacttgtcattgtaatggcagaacaaaaattaaaatataagcactctcagttaggtataaactattcatttgaggtaattatcactgtcactaatcctgtcacagaatcaaagtagaaacaaagaaagatgggtaggtactgcagctggccagcctgatttctaatgataacaatgtaatgatacacaggcatcctactttcatactacttccaaggacaagtaaatgatcacataaaaaaaaaagactttgacagttatcttgcccaaatctttcttcaaccaagttaactctggagtgttaacttatagactagcgtaagagtagtcattaaaaaaattattgaaacactatatgccaggcattctggtgggggcaggcagataataaatggatggtgttttagctaatggatcagtgagagtttggatactgatatacgctatgagtaatttaatagatcaactttaggcttgcttggctagcattaatgaagtcttcttagaagaggtgacactcgaattgaaacatcaatggaaagaaggcagccatccattgaaggagaggaagatcattccaagcagaaggaatagcaaatacaactctcctgggtggaaacaagcctgtttaatgtgagggagagaaagggggccagtgtgactggagtaaatgaagggaaaagttgtaataaggctggagtaaacaggtgtccagttacatatattttcgtagcgcatgctagagtttagattttttactggttgcagtggagataattttgaagattatgggtgaagaaatagtttaatctacactttagaaaaaattactaaggccatagaacagtggagagtgaagatagaaaggttattgcatccatccaggtgagagatgaagaagaactggaccaagctgtagcagtctcatctctagatgacagaagtaactggactcagggcatctatggtgtagagacaacaggaattaccagtgcctttggatatggcatttgagggggaaagtggaattaagacttcagcatattttgcctgagctactaagtgttactgccattagggaggcccctgagatgtcaagaggggtgggatccaggactcaatggaagagatgggctttcaattggctcatggacagttcatctactactataacatgtggaagacagaacacctgtgcaccaatagaaacattaggaaaatggcaggaacatgtggtattttccaattatttatcattgttttttcggtaaagtaagaagcataagctaagagttaattgaggaaaggcagtgatggagatttgaggaaagaaaagttgtaaaataattatcttggaggagaaggagaagtgtggtaagatagtctggaaaagtcaagaggccaattttgacatgtagccatatttaaagtgaggtcaactagcatggtggtatgctttttgcaataatcaactctgtagatgctggcagagagtaagtagatagttgaatttaaccgtgggcattagttttctattgcttttataacatactcagacttagtggcttagggaacacaaattgattaccttgctacaggtcagaagtccaaactggatattactgggctaaattcaagaagtcagcagggctgcattccttctggaggcactaaggaagaatccatttctttgccttttccagcttctggagctcatctcttggctttgttgatcccttgcatcttcaatgccagcaatggctgccatacctctgcttctccctcctctgcctcccatgagattacactgggcccacctggataatgcaggacaatctctccatctcaatgccagctattaccaaccttcattccatctgcaactttaattccccttcgccatataatctgacatattcacacatccagggattagctcgtggcatctttaggtagccattattctgcccagctcaccatggttgaggttttgccaaatgaagagaatggaaaagagtgacagtgtttatragggataattatacagcggaaccatggactccaagccaaggagaaagtgaggttatgagaaggacggcaaggaggaaacacactagtcatgtaaaggagtgatgggtctcaaggaggtcagaaaatttctggagtggagtactggaatcagtgaactggatgaataggacgtgacggttgaggcaggaggtttcaaaataggatttcagagatgtaaagttgttggagatggcaaggttttatgagttttgaaactgaaaaacccaagaaaatgagtaacaagtcattttcctctaaaataagtcaaatacctagcattggccccaaggttatggtaaggttctagggtgcttattttttaatagaatatgcacagtttattgattcctgaaaagtaaacccagcttcacattctgtttctggcccctagacctctatggagaggaagttattccccagcactagttatgtgagaagtagggagtgcagtgcatagagagggagttctgtcacccagggaggcagaggccaaaagacctaggcaggagacccatgctctgtgtgaggaagataggacattctgtttggggactactaaatggcttagaaaatgatatgcaaatgtttccactaaagtgtggtagagttatctgtgatgtctttatggcacctagggaacatttagcatttaatttgctaaggatgttcctattttgaacttaaaactgtttcaagatgtattttgcaatacaaatatgtgccatctcattgcactgttcattgaaagatttctctctagtgtactatgcccagaaagcattgaattagttatgctccattgaaaccagtacaaaatggactgagaagtttatagtttctatgtcagattattaaaataacattttcttccaggcccatgcatatacttttttccaaagcagtaaaaaacgatagtttactaaaaataagaggtcaggtttgcatattctctatactttgggggtgaatatgagttggatatgaaatccaaataaaactagaggatagattaaatggtgcatgatgtattccaaggtcaagaattaattaaatgtaattttcacartgatattcttagaaaataggaaattgccctatgctttttgaagagaatgaaatttggttgtttaattgttagaaaatagtacactatacatattttaaatattttgtcaaactaattgaagccactacattatagaatatgcaaaaacaagttgcagtttttaaaaattcatgtgattaattccatgacacttttaatagcctcacctgtctcatcccacatcatgcccttcatttactctcttatatccactctccccaaacccttctttcaacttttcaattttctaaatatcctataaagcctagctcttccacagaaagtcctttgactgtaagacccaaacactattcatttctgatttcttttggccttgggtttagtaccaccattccaaagcaaatggcctctactggctagttttcacatttaacaatttgaggtttgtaaggacaaaactgaattcttacatggctcttctcatccctacagaaccagcctggtcctgggcacagagtcatgctcaaaagcatgtttcattgattgatttaatggataattaatgcatgtctcaactcaccacccaacctccagcacactctagctgccttttaataaacatctagtatgaaattcattttgtgatggcagtggtgacagtggcagggaaataaaataatgtatagactctaggccacagttacatatttcatcaacaacaacaattttaattactttttgacagattaatttgaagtaggctaagggaaaatcaaaccaattctctaataagccctcatctatcaaaaagtcatcccaagaggtgaatattttgtatgtaaatgtgtgtatatgtaaatggcatcactgtagtccatcgtttctgggtccctgcccttgaggagcttacagtaattctggtttgaagaatgacatggcatgttgagagagaaatcattatattatgtccatttgaccattatataagtccagctaagttgggatttttgtttatgttttctgcagtttctcctaaaaggtaagcaccatgaaggcaaagactatgtctgcactgtcccttgttgtagccttcatagctaacacaatgcttgcatatagtaggcaayaaataaatattaaattaaggcagaattgctatttgacataaagaagactggggagtgagaaagggarggcagtcagtacgctctaagactgcaaaggtagcacacactgtggtaacatggtgtattatctacacctctcatgaacagcagccatggaccaggtcctcccagaaaggagagcgatgagggtccagggatatccattacccaggaagcaagacatggccagagaggaagggaaggagtgctgtgctgcagccagacagctggagctcatgaacaccaagtatctgttaagactggccccggggaagtccagccttggctccagagctactggattttggcaaggaaggtttttaaattcttggtcccactgaacaggcagatggaggtgagcttccccagccaaactgggctcctgagctgtggatctgaaggtagagcccctaggggatttcaccctgaggaagagtcctcaatggtcagcaattttgctcttggtatgaaaaaataatacataaatgcwtatatatatatatacacacacacatatagatacaaacaccttccgcttaaacctttaatcagtgcaagggttgcttctgttaggagagtagtggaagactttcagatacatttttttttttcttgagacagggtttcactttgtcacccaggctggagtgcagtggcacaaacacaggtcactgcagccttgacctcccaggcttaagcagtcctcctggctcagcctcctgagtagcttggactacaagcgcctgccaccacatctggctaacttttgtatttttggtagagatggggttttgccatgttgcccaggctggtctccaactcctgagctcaagccatccaccagcctcagtctcccaaagtgctgagattacaggagtgagccactgtgcttgaccagttacatttttaacagctttattaaggtagacttgacatataataaatggcacatattttaattgtacaatttgataagttttgacatatgtatatacctgtcactacagtcaagataatgaacatatccatcaccctttccccctaaaatgtccttatgcctctttgttatctatttgtgccagttaatgttttattacttctcagctccaaatgcattttttgcctgctccatgaaaatggacctaggtcctttaaatattttccctttggagctgtcagcatgttgagctttgtcggtagagggcgccggagagatattaccagaggaaagggtttcccttctgggttccagtgtgtgcactggacaggctcttctaggggccggcatcaccaggtggccacaagctccctgcaatacgtcctcgggcattttcataggtgagtgcctctgatgagacacgttctatgaacagctcctctggcaccctagaaagtggatttcaagcaacttacaccagtgctgcagccagttcctttgctgtctagttctgtatttcaaccttattgaggcggtggcagaggggcgaggagtgggactttttctcgggtgctctgcctcagcattcaaaagcgtagctgctccttatagctgctattcctgtagagttctctttacccctggttgctccaatcccttgttatagttagtaattctttwtattttctctgttttaattactgtacagattccctctcttgactggacccagactgtatctaccttctcatatatctatatttacatgcacacacgcacacacatctgtttatatctgtatacctatatctgccttcccatgtgaatttccmtatgaattttagaactcctatcaatttctacccaaaaaagcctactggaatattgagtagaattacactgaatctataaattaatataaggagaaatgacagcttggcaatattgtgttttctaacccataaacaagttatactgctccatttatacatgcatctttaatttctctcgataatgctttttaattatcagtgtacaggttttgcatattctttgtmaaatttatttcctaaatacttcacacatttatgttactgcaatgacattgaaattcatattgatcactgctagtatatagaaatacagctgagtttatatgctcaacttgtattctgcaacctcactaacttattctagtagcatttttataaattccatcagtctttctatgtaatcatgtcatctgcaaacaaagacagttttaccactccctatccaatctstcttttctttttcttgcccatcgcactggctggaactttcaaaacaatgttgagtagaagtggtaagaacagacgttgtcttcttcctgattttaggaggaaagcattaagtcttattaagtatgatgttagctgcaggttttttggtgatgatctctatcagatcaaggaaattcccttcaatttctcatttgctgagagttttcatcagaaatggacgttggattttctcagatgcttttttagcatctactaaggtgatcatatggtttttcttttttagtctgttactctgataagttacactatttgattttcaaatgtaaaaccatccttgggataaactccacttgttcatgatgaattattttttaaatgtttttctatttttcttctcaaaaagttagaatataaaacttttgggaaggggaaaaaacagcgaggaaaatatgctgatgccttcttaatctcttactcaattttagtaagtaatttgagctttggggaagaatagaatctatgtttgcttcccattacttctcagtatcatttccaacccaagtctttttgttcagtttctgagatgggcttaatgaatttttttaaatataccatttgttggtcttctaattttagcatcagaaacaaagtctgagatgtgataaaatacataacaatcttatagaacttatatcttacctggtaacttttctccaatagaactaatattcaggtagtttttccttgttaattattttctaggaatagatgattgtatgtgttctcagaaccttgtcttgattttcaacttttatacattgtaccttgcatttcataattaccttgaataagtgatttcagtaatggtataagcttcagctctaaaccagcaaggaagttttttcaaaaggaaagttttaacttcatgttaaatattctcccaacttctagacagtcattttactatagttgccacaaatcaataccttattttcatgtactgcataaaagttgttatagatgtattttttaaagtatggatatgtgcccattatatgtagtttttactctgtactgttatttacagaaaagtacaaatagaatatattgtaagtgggaaaggcagaatttcttttttgtaggtcttttttgttcaattcaaatcaaggaacatttatggaatgctaactctacacagcgttcttttgttaatagtatttcttaatttgttatccttttcctaagtgacagtattttatcattttattcgataggtctattttaacagagagatggctactcttagattagtcatatgatggatgataatgtaatttatttcattcaagtagggatagttcgtgcatttctgggaatctcattatcttgaaaactttgccctattatcttcttcttttcatgaaattacctccttagcttaattacaagtgtagtgttttcccacaggcaatataatatctacttaccctaaataycccaaagtaaagaacacttggagcattaagtaaaaytgatttgttgagcccaaatcgaaaacaacattacagcttactggttaatcaatgtaaatttcactaatgccacaaggagtcaaatccatttgtaaaagaacatgtgtgcaatctatttcataaacttgtatcatatgcaatgttaatttgatctaaggtagttctgtgagacaaaaagaatattaccccaaaatgctctatttaatcattgtataacaagagttatgcccagttatggcaggagatgtgcacagagctatgtagaaacgtttattgacacagaaaacagcagtttataaatttgatcagttagttattatagcaaatttatagtgcacttatcctaaggaaaatctactcattagtgaccacaagaataagaagtccccactttttaccaaatttaattcttgaaaattgtttctaaggtgacaacaatatttctccacaggcagaaaatgttactgtggttacatttcccgatcaaataaatatttggtatcaaataaataaaaaatataatcaatattatatcacagtagcaaagatacaacaaatataaacttcttccttgagataaaatggtaaaattatcctgccaatcatataaaacagcaccgattaactaattacttgctccttaagaggtcaaaaatcccactccctgtacacataattcctaacagtgctactctactgtgtggttacctaaagtagcatactagctgaaacatgctttggctaaaattttactgacatttctttggcttagaatttaggaggatttggagggattatatatcacttttcagcrctcctgaagctgtccatagacatttgagctgctgccttctttttcctaatgtatttttcctctagcaagcaaaagtgttcattcataattattcctttgaccttaaaaccgcctcaaataaggtaggcactggttactcagtggttctattgacagctatgagagtagtttacactttactgggagatcataggaaaaaaaaaatcaccaggtcattagcacaaacttttttttttcctttttctgtggatgtttgaaagtgctcttgtaaaccgcaaagatgactggtatcccagagcacaggtayctgcttcaaaatctgtcaaagttttaagtggatggacaaaggtggtaaaaattgaggtttgggtgttcactgagcctgaactgaggaaaatgatacacaacgctacaaaaaatgagtctcgtgacataacccttaatccatgggtaacttgaaccaaaagtattctccttcttctgtatatttgttctcaacccccaattcctcataactttctaagtaagtagggtgaaaagaaagtcagggctgcctagggaagctacatttgcttctcaaggcttgcacctgcatatttcatgcccgacatgttgctgaacacarccgagtaaagtgccagaataaaatcagctctgtccacgtggtaccaggaatgctgctgaaatgaaggtaagtataggattccacaggatctaagacagtccagggaactgggaccaattgtgggaaacctcaaagctgagcatatttgaagaaaatgcagagtaaaatggctatgggctgccgggaggcctggatttgagataccaagcaccactgatataaacactgatgctcagaaaaagaaatgatgagtgtgtatttgtgtcccttgagacctaatttaatttataattattcaccagagataagaggcaaggtatgtctacttgctggatatctgaatttacacagttctctagtcattagtattttttacaaatataccactcagactaggggtcagaggatctgggtttaattccaagacctgtcacttatctgtcatgatttttgtagcttataaagatctctacagtttaaacattttttttaaaagtctagcactccccctccctggataacagaattgttttaaataccaaaaggaatgaaatacttaagagtgctttgaaaattagaacaataggccgggcacagtggctcacgcctgtaattccagcactttgggaggccgagatgggcggatcacgaggtcaggagatcgagaccatcctggctaacaaggtgaaaccctgtctctactaaaaatacaaaaaaaaaaaaaaaaaattagccaggtgtggtggcaggtgcttgtagtcccagctactcgggaggccgaagcaggaggatggcgtgaacctgggaggtggagcttgcagtgagccgccactgcactccagcctgggagacagacactccgtctcaaaaaaaaaaaaaaaaagaagaagaaaaagaaagaaagaaaattagaacaataaagaatacagttaggcttgaggccaggagtttcagacaggcaacagagtcagaccctgtctctataaaaaaaaaattaatttaaaaaaagaaagagaaagaaaggaatatagtcaatcaacaagaaatgtattgctgactatgttctctgaagtcaactagctgatgttcatgagcttttccatcatgtcttgtaatcatctatacaattatttagttaatattttttcttaaatcaactcatttttccccttttgcacccacattactcttatcataaaacataatattcataaaatcagaggttgatgtgtttatcattttttttaagcttttaagagtcaaggtcttgctctgttgcccaggctggagtgcagtggtgcgataataatctctaattcctgagctcaaacgatcttcctgcctcagcctcccaataatttaatacgtactaaaatgaattcatacttattaaaagtttttaaaagttctgtatatcatgcctcaataaacactgctagggaagaagaaggccttaaaatgcaggcaagtagctgagactgaacagggtaagaaacagaagccataaaagggttgaacaattgttatttgatcctttttcagatagcatcactctcctctttaaaagtacagtattgatttttaacttaaggtgagttagaaatttattttgaaaattctctttttcaaaaaaaaattctttacagtcactaaagtcatctggaagtgtagaatctgaagaaaaatttttatttgaggtttaaaattttatcttggtctggaaacttctgttttgtcaaaggaaggggtgatattggcacattctggagttcagaatttttctgtaatgcgtgcttaaaaagccagattttaaactttttacacagccctacctgtggctcagcatgttagcattatgatgtattttaaggatggagtttgaactaagattatagtgtgtgatttttggcataggcaaacaatccaataaactgagcgttcaaaaaaggaaaacaaagaccatgtaaatctcttcaagccagaatgtctacctcttgcttccttgggtagagctactgtggtccaagtttattacctttaagttatccctgtctgtaccctcctcaatcatggcacaattctccctgggcatctaaggcattggggacccatcatggtaatgttcaaaaggtctagaacaccagtcctcctgctccagatgggggaaagtagacaaacaacagtgagctcctccagatccacaaatcagctcccatttcagtgccgaatgacagagattccggaaccagcttacgttctgggaatggcaaagacctcaggtagaaagaactatgtgcaaccatttccaagccaggagtgcagtaacatattgaatggttaggcagtagaggcaactctgcagttaatacacattctttaaacttttattttaggttcatgagtacatgtacaggtttgtaatataggtaaattgtgtgtcacagaggtttggtatacagatttcaccacccagataactaagtatagtacctgataggtagtttttagatcctcacccttctcccatccttcaccctcaagtaggccccagtgtctcttgttctcatctttgtgtccaagtgcactcaatgtttagctactacttataagtgagaacatgtggtatttggttttctgttcctgagttggtttgcttaggataatgacctccatgtccatccatgttgccacaaaggacatgatctcattattttttatagctgcatagcattccatggtgtacatgtaccacattttctttacccagtctaccgttgatgggaatttaggttgattccatgcctttactattgtgaatactgctgtgatgaacacacgtgtgcatgtgtctttatggcagaataatttctattcctttggatatgtacccaataatgggattgctgggtcaaatgataattctgttttaagttgtttgagaaattgccaaactactttccacaatggcagaactgatttacattcccatcagcagtatataagcactcccttttctctgcagcctcactagcatcatacacagttttctttattgaaaatatttttggagcttttgatatacccacaggcactgtaaatcaacaaaaggggcactctgtcctcaattacatcattcttcaaaattttttaaccacgtggtgcttttttaggagcatgtgaggagaataacatcccaggagagtcctactctaaaaagatactgctgtttgggacaatatagatataaygcaatatcatataggaagttgtctttttgtatatttttaaaacatgttacttttgtgctttggagttgccctaaataaatatgttgtaaacctttgtgagtatctgcttattcggcttaataacccttttgtggcttttgaataatgtaagaatttgattcattatttagaaatctgagttgctgcagcaatgaaccagatattacatttaatcgagactkycaatactgcacagattgccagcctcacaggacatcagacctaactgaactttcctgctagttttagaaaaaaagacagaaaaataattcacttccaaaagttagagaaaacactttgccaattactagtgacccttgatgtgacttttaatttatagaaaggcccagattaattgttttcaaaccaaaagctatgactcttagctagcactttaattttacacaaatcttctcctccatcttgactgtgagatcgtacctatagagtgataagccttctaatgatgcctggcatagtgtcagcttttgaagccatatactgtgtatgttttggaactaaatatttcttctttccattgactcttgacccccttagaacaactgtcaccttcttcaaatgctttcactaagtaaaaagtcaattggctgtaagtggtgatgaagaaaatgtcgtgtgattaatgctacagtttaggctgttgtgattagtcacaggaaaaacagttaaacttcctcccccaagaaacatggtatgttaacrgcaaatggcctgcctcaagcccaataggaagaaatagttgggcagtgttaaaagctgcctattgatttgtgccccgactgaaagccatgtgctgatgtaaatgaaaatgtgtcaagagttgatatcgattttttttttaaatcagaccatctctggggaaatactgctagccatactactgctcgtctatgagtgaaataaggttcctttccacaagactacacatgtccagacatcaaatttttctctttaaccgaggtgtggtaggatgcctctctatcgtctgcaatctctgcgtggagaacgtgacccagagactataaagattgtcttgatgaaagacatgtatgtggggaagggtgtgagctcatgccacctatctacacattggtctgtttgtgtatggttcgtaacacacatgtaggcttcagctaggaattgtcatcctatgtctcctagaataaatcattgtagaagaataaatttatttttagaaaattctatccagagagaaccacaatataggataaaaggtaaaacatattagaatatgaaccatgaagttggggtctttcttttccttcagactgtaggaaaactagccacatttttttccatttcttaggagttattccctgagctgtaccttattcatagactgcagtgcttgtaaatattgactaactatatatgaaaaggccaagagtcataataatcatgcagctttgggtcatatctgtggggatttcagctgcctaggtaaggctgcactcctgattcagctgggataaagcatggacgctaatattaggctattagaatggaaaattagtgtggaagaggagaggggtcatcacctagcaatatatgtggattatttggaatcaactactgggattagagaaaatcctaataaactaataagggatatggtctttccctccatgctagcttagagagctgaatccacttagtttgatttattggccttaggtacagacacatgatgaaaacttcactttgcaaattgattaactttttgttgattactcaatgacttttgcagtactctaaattttatgatctgtgtgccttgtgctccagattaaaggaaaaacaatgatctgaaatagaccttagggaataggaattactatgatgagacaattttatactgaaagttctgcattaaaatttaggaatctgtaacaaaaactttcagaagacagtttgttactagtaactgggaagacaaatgaggtcttacaaatgatctaagtagatggaacttttcaattagggctgctgccttaaaatccttaaaattaacttgtacttyttaaaacaggtgtagcttgctggccctgtaatttgactaacaagctaaggcttatggctgaccctctagtgtattcctaaggtggctattttctgcagcatggaagagcagccctttctgcaacatggaagacyagcgctgactcagagatctttgcctatctatcaggagttctagaccagctcttgactgctccacctcacatcatttcttgtattgttatttaacttygggtatatatttattatctccaacaggacattaaactcaataaaaacatgcattatagttcattgtgttggcaccagtgcataaattcataactgctcaaggaaaaaatacacaaatatatgtacatacatgtacacatatatgtgtgtatgtacatatttttaatgcaagatgagctagccttcctatgacattaaattatttaatcactttttacactgaaatcaaaaaaatacacaccaatggctttacacagttatttattctaagatgaatgcaaattacctcagaagatattatccagaataacaataaatgtttattctttcttcttacggtttatatagctgcttaatatgcccattcatcaagtatttcctagttgtctttcacgctcaagcatataaatatataatttcaaatatataatcattttcaaatatatawtttaatattatatattaaaatatatatttgatagtgataaatatatacatatcatacatatatatgtacttgaggaaaaataatttgagagtggccataaagtctgaaaatatagacaatattaatttatcatctatatttaatataatattaatacattatttgttatatgttttgtttccaggtttggtgaccactcagtgtttgcaaatatattgtaaaggtatatacatttaacaaattaactgatcttctgattttaacttcagttaccargttgaaggtttttctttacttgctttttttgttttaaataaaagaaagcaaatgattttaggaagagaattgtcacagccaaaaacttccaggttaagcaaaagatcataataactttatcttaccaactaccttgaatgttctaaastatgttcttcactcgcttagtaaaacgtctgaattagaaagcttatattaccatttaattcccagcctttcctttctggggccaccctcacttttccaagtactatactagtgaaagaagtagagaagtaaatgtctgtacatgagtcatgcatttgtcttttgattgtagagaagaaaaagaaaatacatatmtacacatataaacctaaaaataagaatgaattatttgccagcccacaaaatttttcactactccatttttgtcctttaggggtagagttagttaaaaatctgttttttaaattttggtttggaattaataggctgagatgggaaaccagaaaataatgagaatatatactatactttgattttttttaaaaaaggaaagaataaggaagtagagctcaggaaaattaccttccttttctcattccctaaatcttctatccccaaaataattttgattacttcaattcaaagtgctcatattttccagagcacaaaatagactccaaatatagttctatacagaattttatatatttatgccacaacatttgacaatcatagaaaaatataagaaatatgcaacacggaattcttataattggaacatatttgaaagcatggaaacaaacataaattacaatatacaatataaaggatgctaaatacccaatatttccttccctggtaataatgcttttgttttaatatgttttaatgttcctaggaaaagttgttaaacaagttttgcattttgcatatcttagaacagtaaatgaaatataccctaataagttaccttttttcataagtatatccacataggaccaagccttttaatgaattcctttaactggtaatatattagtatttacaatttaaaagctttattctgtatattctgttgaataaggttaaacaacctaatatccaattatatatatgtatagagatacatatttcatatctataaataattatctattaattgatggaataattcaggtggcaaaaattttaaacattttgttttgtattactcaggaagaaaagtaatcaggaaactagaggaagctctttttttcccctttttattacaccaaagaaattgagtgcaatgaagcacattattcctttctttatcaggtgcatatttacatttgcatttctaaattatttaccataaatacatttttaacactagaaaaccttaaaataataaagttccatttttcaggctttgtacaaacatgcaaatgttaatatgactaaggaatatactttaaattacagagcatttttattcattattctattacccctgctgtgatagtcaggcctcccacctatggaatattagagwgccccctagtggcacttatatgcctattaaatttccaaacgaagaataaagttagttactttccttactaactgctaggaccagttttgatacctaaacatatttggttgacttttttccccaatttttaaacccaagttgacttccctttatgtaccacacaaattgtgcacgtttatggcatcaaaaatgtaataataacatcatctctggttattcaaatgctcagttgctaaacatctctcttcattttttctcacctggtaacctttccagtcatctcagaaatcatttggagattcactgtgaaaaacatttttatggggaaaaaaagtcctacgttaactggtaaaagcgtacacttacccaaatagatgttattttaatgttattgcagtaaagaggcatgtcttcattatactttcatgtagccggatgaaaagatatacaaaatgatacctaagatgcattatcactgaggcagccatctaacatgtttggaactttttaacattacactagtttatggtcaagatttgatgacgggctcaagggtgatgttcccttggactagtgaacaatttgcagtatttttgatgctttttccactggatacccacaaagcctctgcccttgcctaaaattatccttcttaataggtgagtgaacgcttcctgaaggtttaaaatacatccatggaatcttaamaggtaaggtgaaggtagtcttacaaatgctggaaaagaatgttctgcacagtgaaaataacttcaacaggaatatggagatgaaactagcatgaatatgccccaggaactatactgtaaatgattagtatcattgaaatacagagtgagaggtaggagcataggacaggagacgtatccagagatgtaacagggaccaactacactatggaaggctttggggactacagtaagggttttaatttatcctaaatactagtagaaaatattgtwagataaaccaggtttctgctttaggaaatcagtctgggaatagacgtgaggataaattagagggggaataagattccaagtcagagtgaacatttggtccaagcaggaaatgatgagagctggtagagaaagttgtcaaaagtgcctctacagtaaagtgaggtcatttttgggctactgatgccctggacaacagtagaattaactggagtctcagcaaaggccttagcaccaccctgcttcagttaaatcgcctatcagtgttgtcttctttggttatttgccccttatccttggtaattctgctgcctccctccctctcccatattcatgtgagcatcttgtagccatcagccctgaagaaaggcatgggttgtgtagtttgaacttcactagtttgacgggtatgaagcaaagaaaagaataactggttgaaaggtaggattttggaacatgcagagtggttagatgctagatgttgggcataagggacaggaagaaggccagaatggctccagggtctytgtcattgcaactgggaagatggaagcactaatcactgtttatacagccaatgaaagaggagggccaaaagtgaagtgtatttgctttctatgctgtgttacaaattctcacgaagttagcagcttaaaacaacatgcatttattacctcatcaatcctatggggcatgagtttgggcatggcttagctgagttccctgcttcagagtctcacaagactgccatcaaggtgtcacctacggcttggttctcatctggagactaaactaagggaaggagatgtgcttccctgcatgtggttgttgacagcattcagtttctagcagctgaaggttcatgacagcttcctccttcaaagccagcaacagagatagagagtccacagtaagcctactagaaggaccatcttatgtcatgtataaaaatcacaacggtgacattgcatcacctttgctatgtgggctagacacaagtcacaggttctgcccatactcacggggaggagattmtacaaaagcatgaatatcagggaccagggatcatgacagccaccctgtctatcataggagtacttttataatgtttacaaaatgtgaaattactgagtgtttttacctccaactattgctgtaaggaaattatattataccataacttggatcgttattatataggcttaggattattagaataaatgtcccaagaatagctaccatataggaggaaaaaaaggaataactccattctttctgatctttaccccccattcagaagggttcctacatttctaacaggaatttgttcttcagtgtctcacatacctctgagaaatctcagtttatggtttggaaactatcaaagagcaaactccaagaatacctaaaactaaataacactataacattggattgttgctggttgctttcctatccactgtgaagtttgacttgttgtaaatatttagggaagtatcaaaactaactttaaattatttccttgtgcacctcttcttgaactcccccaaataagtcaagattttttaaaaactagggcagtcctaaaatggcatatattatatccrgtcgtcttctaagtcctaacaactytttctttaaaatattaatactggctctacctcatccccttttttctatttacacaacttctcaacactggtgcaagctgttactgtcttatgtctggataaatcagcatcaccatcctatttggtayccttactctacttttcccttccctcttctgtcagagctattcaagattgaatttttattatatataaacagctttgaacatgcagtttcttttttcagtcctgcatgctggtgctctatttgctatactaccatctacatgcccatgtctgcttttttagaaggtctattatctaatgtacctgcctattcaattatattcccattcttaacacaaatcatattttctcttccaaataatttcctcttggcctctatacaaagcaggcttgttttcgttttttttgtctgctcagattttasttccagcttgggttgtccatgcatctgtcatcatgtctgccctaagtcatgatgaatagatactgcacaatggggagcccaggtaaagagtaagaggaaaccagatgtatagaaaagaaaaggagaaagatgagatgaacccataacagaactcagaaggcaaagcccatggcagagccagaaggttggaagaaggtaggcgaaatgaacagtaatatcatcagattctagaagtcaaaaccaatccaagcctggtaggtaagccaggacaaatgtaaatatcaagggtggagacaagcaaagaggggcagacagaaaacatccagacacacacacacacacacacacacacacacacacacaaacaaacaaacaaaaaagatacaaggtcattctcaggccttatagggatgaatgagcaaagagaacaggcaggtgcatattcatcaggagcagcttgattagagaggccacattcatcctgaaagccaggttctttaacaacccagtgtacttcctgttcaggcagactggtgcatgtggaggattacggtctttgaagccagtcagacatgggttcaaattcctcttccaccatttgttaactgtgtggccttggacttgttattgaacttccacaatcctgacttcactaatctgtaacatgtggatcattctaccagtctcatggrgttataagaattaaatgtgattacatatactatatgaaatgcctgacatcggccaggtgcagtgactcacacctataatcccagcactttgagaggccaaggtgggtggatcacctgaggtcaggagttcgagaccagcctggccaacatggtgaaaccccatctctactgaaaatacaaaattagcagggtatagtggtatgtgcctgtaatcctactacttgggaggctgaggcagttgaatcgcttgaaccccaggaggcagaggttgcagtaagccgagatcgcaccattgcactccagcctgggcaaaaagagtgaaactccttctcaaaaaaaaaaaaacaaaataaataaataaataaataaataagcctgacatctggcaagtatacaacatatatgttgatttttatcattttatttttatttctatttttctgtctgccaaaaccaaaatggctgccaacttgtagctatccttttataaggtctgcatgactttctctaacctcttgtgatccataaaacctgcctcatacattgtgccacttaccacagagtgttctttaggtgtgctaagtttcaggttattcaagctaatttcttcaatgatattaaaagctccttggggagagatttcccagtgctgagctcatcatattcagcctacacttgagattacaatgcatttcaaggccccgcttcattcacccattcagcagctatgtattcaacaccatgtgtgatgtactggggatgagacaacaaagaagacaagctcagcttcctagaggtaggcatgggttatgtcactaaagtaagggcactgtcatcttaaaaatggaaggaccctaagagattatctagcccagctctttacttttacaaagatgcaactgagaatcacagaaatgacagtggcatataatttcttctccactgacctctttttggcctgttgaatcactgtcatttggaaaaacgaagagataaaagtctaggatgttttaactgagtgagagtttgagagtggttttgccttctgccatgtcactgtaaaagaggccacttatctcagacagcattgccagcaaatgtccatggcatagcctcctgcaagtctctaccagaaaacataagagttctctgtggctgctatgctctgacctctttgcttgttccccagtgtgagaaaaataaaaaaatcatcataggaagaaacacaggtaattcaggaaacatgcaaagatactttcgctttctttgttgggaaaggccaaaacatggtggcttcttccagcaatcattccagaccactgcttagtacatttttttttttgagatggagtctcgctctgtcacccaggctgggtgcagtggcgcaatctcggctcacagcaagctctgcctcccgggttcatgccattctcctgcctcagcctccggagtagctgggactacaggtgcccaccassatgcccagctaattttctgtattttttttttttagtagagatggggtttcaccatgttagccaggatggtctcgctctcctgacctggtgatcygcccgcctcggcttcccaaagtgctgggattacaggcatgagccactgcacccagccactgcttagtacatttaaaatgacacatctaagcatttgtatgtagggatgcatttgaatcaataatatgagactggcatctgaagactcagtggctttaatcaaactgtttgctcaacatccttcaatacttgatccacaaacttatttcaaaattagaatgtcaaggtgaagattaacacctccagttcagtggggctaatgagacatgacttattaatcctacaagaaaatcttaattaggcactggggcactgcttgtttcattgttaaatactacccaatccccaaagaattggaaaataaatagggactaaaatagaaaggagtgttataattaggccccctgaaatgaaagaaatagtttttttctccccacagaaagtatttgtcacttttttccctaaattacccagtattagcatttgtaataaaagtttgatacaaacattcttgaaatagctagacatgtgaacaccagagaacagtgagagtctgatgcaccagaactctgctaagagggcaattgtactgctgagtttcagctgcagcaaaattcacgtcaccgtccaggttaattagcaagataacttcattattatttacttcttgttcatttaataggctcttccattaagatacactcatttttaacactaaggatttcgtgatgcaagttgaaaaggaattgcttcactttatttcgttggcatttttttscaaactatccatagtacccaaaaaggaaatgggagaagggagggctgcagcacaagggaatagcagacatttacccaagcttcctaaaactgaaaagctggaacatagcatacccatagtaacactcatgaccaacaagttttccataacatttggtgttctaaaatttgttttcatcagtggattaaagataagtgcagaaaagaagaaagaaggacagagaagagggaggagggaggagggggtagggaaagtgggagagaatctttgtgacattcatttactacttcagaataagtcaccttgttaagttacagccagaaaaaaatatcactggcattcgagacacaatttgttacaaagtatactaataarccagattgccaaattatgtcagtcacatctaaataacaacaagcaaattgccttacacagacggagaatgtgtaaggtgcatagatttcctgtgaggcaacctcaactaagacttattgattaatgttatcctacttgtttattctgtttaaaagcacggactgcattattttcgccttccattaaagcctaagccccacatttcaaaatcttcaagctttaaataaagtttccttatctttggcagagggttcatggccacatgtacagggttctcaaagaaatgtcagtgactacctccccaacgccagagcttcagaaatgcaagagtacccccaactaaagttttgggaagccagtttaacaattattccgattattgttatattagataaagctattaaaagaaacgttttctttccatgtgtactaaaccatcaaaattgtgtttgaagagaataaagaataagaaattatctggggagactgagatcatgagattgcccaacggcttctccgttcagtggccacaaattataccccttgcctcagcataatgaatctgtgctcttatccaatacaattaataatgagaagcaatcagagaagcaatcataatatttgaaaataatatagaagacacatacagctccaacatttcttagctatgtgacgtttgatcagtttaagttaacttctttgagtctttggctccacatttcaaagtggaagcgctaataaaaactaataagtttgctttgaaaatttgatgatayagaatacataagacaggtgctctgtaaaatatcaagcaacaaataaatgtatgaaagggaccaggacacgaaaggataggggatcaatgaaaatccatcactgataattaggaaaattattgaaaacwcatatatactcttttctgcacagaaaaatgccagcaagatcagcactgaccaacttggagagggtmattcaaaaaggaaggaaaggtgtaattaactattgtgaatccacatatgcctagatgccattgccagaaaaactgttaaatggctaatttaatggttggctgaaattctgttttaaatatagctccccattgcttcccaactgtccttcccctctctacatggtagaatgaaaatactactattctgagaatcaggggctatgtagcctagtttgagttcaccagatgtgtttactttgcactgatcatttattcattcattcattcagccaatgtttactgacctcttaagtatcaggtcctgtacttaccacaggagacagagcagtatacttctcacgtgccttcctatctagcaggggtctcttaacttctccagcctcagctccttcatctgtaagaagagggaaatgagcgcagtgctctctgcagtatcttccagccctaatgttcttagtgttgattctctctgaagatttttgttctttatccttctctaaggacctacaaaatcttgctgagtctttccctattcattaaattatgaaatgttgagtctgtatatatatttacatacatgaatatgtatatatatacacacatatctgtatatagcctataacctattttctaaatagaattcttcccttcaatttatgtattgcacatttttgagagttattgagggaagtcactgtgctatttgtgaaggcatatgcagataggtgtatcaaatagtccctatcttctaagtacttataacgtaatagatgagacaagataaatatacaataaatacacatcagaatccttcctttagaagaaatccctttccattagtgggatcagaggaggtttcttccagtcagtgaagctaaagtgagcttggaggagaggataagatattgataagaaaaattaaaaaaaaaaaaaaagagaagatcatccaggaaatagtataggcagaagaaaagaataagaaagcacagaatctctgaaaaaatactggccatggtggacatttcatatgtgggatgtgagagttgagacaagtagaggagattacagccagatgtgaattacagcacaaaattcaggtgctgggattttatgctgtaggctagcacatcccagtagagtataatacaagccacaaatgcaaaccacgtakgtaatttacaattttagaggcctcattagaaaaagtaaaaagaaacgggaaattaatttcagtgataaattttctttacccaatataggcatcacaacataaaatcaatatatttgacattctttttttcatactatgtctttgaaatccagtggacatttaacacttttggtacatctcaagctgtgctcatggctagggrctagtgactaccatattagaccatgcagttctaggctatggaaagttattacggggttttagagggagagttgtttagtaaaagcaacttttaggcagctgaatgaggcttttgtatgtagatgtgtatcagattgtaaggatgttatagcacaggacagagagatgaacctgttgaaatcatctggttttgaagcrtggtggtcgactcacaggttatgaaaacttgggagaaacattgaggctacacaatccaattaaagagaaagtagtgagcaatatgctgactcatacatttaaaaaaatagaactattcttttgcatagaactcttttttgcacctgattattttgtttatctcactgggcctgagccacattaggttcactcaattccacaaacaaggatcaaacatctaataatgaactgcaccaggctttggggattcatagacgtacaggccattgttcttaatgtcagtaacttaatgtcatggcaattacacaacagagggcaaaagctattttgaagcctttggaaacacaaaataggaactatccaattctgcctggaaaaatcaagaaatggggcaagtgacacctgagctgaatattgaatgataactacaatttctacaggtggaaatggaagaacgggcatcatgcagggaaggaagaacaatgctggaaatttggaaagtacctggcatgtctgggcaacaataaatatcttccaaatttagggtctgtgtggacatttatcagaaatgaagccagaaaggcaattaagggtgaattggaggaagagggaggtcaacatgtagctaaatgcaaagtggctccactttgccgcagagacctagagcctcatcaaggaaagagggcacttccagagcccacaggtgagcactgaagaacatggctttaacctgagaaaagacagagaggagtcagcttctgtgagagttatgtgaagacaatagtttacagattacaacccagaacactgacttggtgtcagatataatgatctgccttttcaccgaaaagtatttgacatttcactaaattgacctttgcttgccaatagcaaactcaattgcattatcttctctgttcaaagtttaatagtatagtcataggcacaatgtatctcttgaaggtgagcttttgttgtttggcattctgtgttccccgaacaaaaagcttcaagaaaaaatcactagttttgttttttcttaaagctacaggtgatagrgaaatatgcctgcattagttttctattgctgcataacaaatgcccaccaccatggaaacttaacatccatttattagcagatagttctttaggtcagaaatccaggtaggctcaactggattctctgctgagcatctcacaaggctgaaatcaagctgtcaggtggattgtgctctcgtctggagatgactctcgggaagaatctgcttccaagttcattcttgtggttggcagaatccaattccttgtggttgtaggaatgaggtcccggttttcttgctggctattgactaggggtcacagctcctagaggctgctttccaaatccttgcatcttcaaactagcaacactatgttaatccttctcttgcttggaatctaatcactccttctgctacttgctagagaaaatactctgctgttaaagggcttatctgattaaattagacccacctgagtgatctccctatcttaagttcagctgattagtaacattaattacaatctgcaaaatcttttgccttgtaaatgtactgcaataatagtagtaacaccaagacaaaggttatgggagccatgtacaattccacactgcctttaatagcatgtcagagtaactttcaaatagaaccgttttttttcctgtaaactgaaagaagcatttgttgctaaaaatgaaacaaaaacaaaataaaatctttgaatgtccataaaagaacagatatagaagtttttcctctaagtggctgattaaatgggggggggggcaatgaatttatatgaatttaagagaaaatgaataaaataaaagcaatttttatttctgatagtatggtagaataggtaccctatatcatttatatcaccctcactgttgaaataactaaaatatatgatgaaatatttaaaatatatgtctaaatctataaatataaaactatatctatgaggctgctggaaagtaaggagtgaacagatccctaacataaaataaaatcagaacacccaattggtaagcaagttatcaagtggctattgctgtgagaatttttgctaaaccctagaattctttggcttccattctgatggttttgtgggaccagctgtgagatacagcctaggtcttggtcagtgcagggaatctaacaggaggcattcataaaaacagtattctagagagctatactgccaatgtaagaatgaatttgcaatgaactctgatatttcacaagcaaattgattttggcatagtgtgagagaatggaattctctgaggattcataatcccaaattggtctttgcttgagtttgggttctgattcatcctgcatgtgtggtccataaaacctcaagcatgatcccagacgaccatgtccttaggtgactagtagaaaaaaatgtataacttcttcgaaagaactcaacttcagcccaggattcaagataccacaaataaagtttcttataaaatgaacagtcaagagtgaagtatcacaaaacagtaaaagaagtaaggcactgtgagtaaaatgacagaccacaaaatcctcatataatagaatttttgacatggaatataaaacagttatgtttaaagaaattttctcactttgggaggcggaggcaggcaaatcacgaggtcaggagattgaggccatcctggccaacatggtgaaaccctgtctctactaaaatacaaaaaattwgccaggggtggtggtgcgcacctgtagtcccagctacttaggaggttgaggcaggggaatcgcttgaacccgggaggcagaggttgcagtgagccgagatcacaccactgaactccagcctggcagcagagggagactccgtctcaaaaaaaaaaaaaaaaagaaaagaaaagaaaaaagaaattttctaagagtttgaaaatatgcttaagtttgctgctgccactggagccactccaattgctggcctcttcacgcctggaaccttcactaaccaaatccaggcagccttccaggagccacggcttcttgtggttactgaccccagggctgaccatcagcctctcattaaggcakcttatgttaacctacctagcattgctctgtaacaattctcctctgcactatgtggactttgccatcccgtgcaacaacgagggagctcactcagcgggtgtgatgcggtggacgccggctcgggaagttctgcgcatgcgtggcaccatttcccgtgaayacccgcgggaggtcatgcctgatctctacttctacagagatcctgaagagactgaaaaagaagagcaggctgctgctgaaaatgctgtgaccgaggaggaatttcagggtgaatggactgattcagctcctgagttcactgctactcagcctgagattgcagactggtctgaaggtgtgcaggtgccctctgtgactattcagcagttccctactgaatattggagtgctcagcctgccacggaagactggtctgcagctcccattgctcaggccactgaatggataggagcaaccacttaatggtcttaagctgttcttgcatgtgttcttaagcaacatggcaataaggttgatgggaaataaacatcagtttctaaaaaaaaaaaaaaaagaaaagaaaatatgatcagggaacctgagaccataaaaaaagaccaagtgtttgtacaatataagattctgcaaagtaatatataataattaaaaattaaaatgaaatggataataccattcaacatattagatgtaatgaagatagtgaactggcagatcaatcctaagaaacaaactagaatgcagtccagagagatgaaaatatagaaaacatgaaacataggttattacagaggctagtgtaagaaggtttagcatacatctaatcagagtttcaggcggagataatagagataatggagmagaggaatactcaatggggtgacaagaatttccccaaatttttaaaagatccagtcttagaaatgggaaacctagtggatcccaaacaagataaatgaaaagatttctacacgaagacatattaaagaaaagctatagaacaccaaagtaaaagagaagatcttaaaagtggaaaaagtgaaaagagagattgctttcaaagtatgaatagttagcctgattataaactgcctgtttgagatgtaaatcttctaccacccagaactgtctccttaatgacctggagctgtctctttgacctcaaaggaggtagtgtgagttccaccgatccccaacccccactcccccactcccatcccgtctcctgtcttcttacctccctcttgttcttttgcctcccaggctccttgggagggtaagggaagaattttgttaggtgccttacctaatttgtaaaactgcctcctgtcctggaggtacgaagtttgtttcttctccatataagtgccaattaataaaccagatggcctgattacattgaccaagccccttcttgtttttgtaattttccatttccctcactctgttggacctgccactggtttctccttccctgtttcatcagtctctctttaaaccaccatcacctctacacagttggagtcgagctcagttttatacttgttataaataaagtttccgtgctgcaaaagaaatagcacttgaatgtaaaattttctttttaattctcagcaaggcaatgtacttctatagaagggtgtgcccttacagatggagcaatggtgagtgcacccttggacaagggaggggaaggggttcttatccctgacacatgtggcccctgctgctgtgttkttcccctgttggctagggttagaccacacaggctaaactaattccagttggctaatttaaagagaatgacggggtgagtaaggtttggcaggaaaaatrgttatgacagagcaggtaattggaatgagtcagggtggagcaggtaatcgaaaaaggttgctttccgaggaagttaagtttaaaagtagaaggcaaagaattgaacatactgacatattgattatttgaagagaaatttagaactcatagctaacatactgaagtctctctctactactgcagtagtattactgaatagaagctgtctttatcacctttaactagtgtctagctttgtttttctttaacaccgctcaataaatgcgaactttattctgatatctcaatacatttccctggtccccgtgaaggtgttttgcctcctggatgctgactcttctttacaagtttgtgtcttatatattttggaggcaattactaacctaagaggtctttactgaacactaaatgacttaaaatccagttaagaaaaagaaagtcagattaattttttgaggagaaaattttagtaacttaactcttttaaaaccagcttcaactcaccgctagtctcaacagctgatcattaggatgatatttcaagaattagttcatcctaatgaagaaaacagctcaaagaaagaagtcctacatatttttgcctttgggaatgagaagaaattaaggaaaatatttctgcatttggtttgaaacgtcacaatttttgtttgctgaatggaaggaaattctacttctggcagaaggaaaatgaaagagctgagatgcaagaaggaatagtgcgacagaaattagattagtggttgccaagggctgggagggaaaaatggagaaatggggtagactgctaaagggtacagtgtttttttgggggatgatgaaaacgtaaatgtaaagttaattatggtgatgattgcacaatactgtgaatatattaaaatgtaggtacacttttaaataggkgagttgcatgtgaattatatctcaataaagctgagaccaataaaaaaggaatagtgagcgatggtattgataaatgtggataaatctaaaacaaatattatctaaaacagcaataaaaataatgtcccatatagggagatttggagaatcagtctataatgaaatttctgactaaaaaatgtacctattagtgtggaggagatattggaactggtgtactaattctactgttgtcattctcagaaattattcaagcaactagtttatctcctcttttgctagccttgatgaatctactataatccttctcatcccagcatgatattttatgagaggaaccgttgctccatccagagagagtaagactattaacaactgtaagtttcaaattatttgacacctctttcatttcttctaagttctgtacttttacaaaaattacttcagctctcttttaaaatttgtgcgtaccttgttttactgtgcctcactttattctgcttcacagatactgctttttttttttaattaaagatgtgttgcaaccctgcattgagcaagtctgccagcagcatttctccaaaggcatgtgctcatttcgtgtctctgtgccacatttgggtaattccctcagtattttaaactttttcattattatatctgttgtggtgatctgtgatcagtgatctttgatgttactactgtaattgtttcgggcaccataaactacacccacataagacagcagacttgatcaataagtgtgtgtgctgtctgctccaccaaccagctgttcttgtctttcttcctctcctcaggcctccctattccctgagacacaacaatattgcaagcagaccagttaatagtcctacaatggcctctaagtgttcaagatagagtcacacatctctcattttattttttattacttttgttgtaatttcaacttttattttagattcagggggtacatgtgcaagtttgttacctgggtacattgtaccctgaggtctagggtacaaatggtaccatcacccaggtactgaccataatacccaatagttagtttttcaatccttgccccttctctccctcctacctctagtagtctgcagtgtctattgttcctatgtttttgtccatgggtgctcaatgtttagctcccacttataagtgagacatgcggtatttggttttctattcctgcattaagtcagttaggataatggcctccagctgcacccaaattgctgcaaagaacatggtttcattttttatggctgcatactattccatagtgtatatgcaccacattttctttatccagtccaccactgatgggcacctaggttgattccatgtctttgctattgtgaatagtgctgcaataaacatgtgagtacacatttcttttggtagaacaatttaatttcttttggatatgtactcagtaatgggattgctgggtcaaatggtagttctgttttatgttctgtgatgtctctcactttaaataaaaagcgttttaaacatatgtgtaaatatcacatctgttcacagcatcgtttattgaatgtgtttaagcttactgttgagacctactgtttatttaaaaaggctcctttcaaaagattactgttcactgacagtaatcttgggtgayctaatcacccaagagtcctgatggagatgtacaaggagattaatgttgctttcatgccttctattacaatatccattctacagtacatggatcaaggagtaatttcaactttcaagtcttattatttaagaagtacattgcaggccgagcgtggtggctcacgcctataatcccagcactttggaaggctggggcgggcggatcacctaaggtcggaagttcaagaccagcctgaccaacatggagaaaccctatctctactaaaaaaaaacaaaattagccaggcatggtggcacatgcctgtaatcccaggaatttgggaggctaaggcaggagaatcgcttgaacccaggaggtaggtggaggttgcggtgagctgagatcgcaccattgcactccagcctgggcaacaagagccaaaactccgtctcaaaaaagaaaagaaaagaaaagaaatatatttcataaggctatagctcccattgtgattcctctcatagatctgagcaaagcaaattgaacaccttctggaaaagattcaccattctagctgctattaagaacttctgtgattcatgaaaggtgttcaaattattgaccttaacagatgtttggcagatatggatatcaaccctcatgaatgactttgggaacttcaagacttcagtggaggaagtaactgcagacatggtagaaatagcaagagaattagtggaatctgaagatgtgactgaattgctgcaatctcatgatcaaacttgaaaggatgaggagttgcttcttatggctgagcaaagaaaatggtttcttgaaatggaatttactcctggtgaggatgctgtgaacattgttgagatgacaacagtgggtttagaatattacataaacttcattgataaagtagagacacattttgagagsacacactccaattttgaaataaattctactgtggttaaaatgctgtcaaacaatattgcatcccacygaaaactctttcataaaaagaagagtcaatcaatgtggcaaatcactgttgtcttaatttaagaaattgccacagctaccccaattttgatcaaccaccaccctggttagcagccatcaacatcgaagcaagaccctccatcaacaaaaagattacaactcaccgaaggcccagctgatcattagcatttttttagcaatacaatattttaaaattaaggcacgtacattgttttttaaaacataatgctattacacacttaatagactacaatatagtgtaaacataacttttatatgcttgggaaaccaaatgatctgtgtgactcactttactgcaattttcgctttattgaagtgctctgaaaccaaatccacgacatctccaaggtgtgcctatactactcaaggattagatttgcactaatgaatgcatatccagtcctagaaccaaataatgacaaatcttcatagaaaggggatgaatttacccagcacaaacactgaaggtcaatacagctagactgtattttgaactctgctagttataggtgctaggtagactggggcaccacactttaatgaggtcttggcttcctcatctatagaatggagaataaaatatcttgtgtctcttatatttttgttgtgaaagtccaataaaatgtttaaacttgtgctttaaaaactgaaaaagcactatacaaatggatagtattttgaaaactgtgtgtttgccgggcatggtggctcacgcctgtaatcccagcactttgggaggccaaggggaggtcaggagttcgagaccagcctggccaacatggtgaaaacccgtctctactaaaaaaaataccaaaattagctgggcttggtggtgcatgcctgtagttccagctactcatgaggctgaggcaggagaattgcttgaacctgggaggcagaggttgcagtgagcagatatcgcaccaatgtactccagcctggatgacagagcaagaccccgtctcagaaaaaaaaagaaaaagaaaaagaaaactgtatgtttatgtttcttaagtgaacagtgggttatctgtctctaaagttttcaggaggttatacttacacgaatttgctaaaattttatatcaaacatgttaaatttttggatctaacttggtaatttgaatatgatacattcatatttctgcacagtctgctaatggtttaattcttcacataaaatatttaatgttaaaaatcagcattcatcatcagtcattatgaaagaaatacatggcatagtgttatggaaattaaaaaggagaaaaaagtcactgcagagagaggataatgaaaactacaatgaaatgaagcttgatgataaaaataccattatacttttaatgtatctatggcattaaaagccatttatatacacatttctttggtcttcattaaaaacaaaaacaaaacttgaggtaaataaaatttaaaagttggctttctgtctggtmgtgaatactacctttgattttaaaatagataccttcaactgttaacagatatgacaaatagaactaatattactataaaactgatatttgctacatggaacagagggaggagcttaatccagttaactggaactctttaactgcaggagcctatatcactagaatgatgtttggaccatgtatattaacttaattaactataattgttacctctccaactcacacttttcyatataaatgcaagattaaagaaggaaggattctgcttctgagctccctagcaggtcaaatttactaaactaacaattgtttaatgcagtgaaaagaaatttgggggaagagtggataaacattagtttatcccttctataaacattagttacctataccagtgagatactgggattaagagtaattgggattccaggcccaaacaaaattcagttcccatattttttcttaagacatcattctactaaatgagacccctgagcagaagcagaattaactggctccttttaagtttggtaattacaaatgcaaartgagtatcctcctgcagacagagccagaggactactcaagctgatgcaataacgggagctgtgataaataatctatgcctgttatggaaagctgaatggaggacagaaatgaagaacccatatgaaaatttggaatttgctcaaagctattctcaccataactccagggaagataagcagtattccaccctgcagttctgtataatttatcaacctttttccttttcatttctaacattcacccttcatggttaactgaagaaacaaagagctaaatagcttccttagccatttgatagagcaattatgagcatcctgactgatacactttctgcttaatctactaacaaatggtgtccattttcctcttaatctctacyccatctcccattcgacttgacacstgcacaacactgctttttgtgccctgttcctgtgcccctcttcatttgtttctttctcattacagtgctcttacgtaattattattacagaaggaaaacgagttctttatgacaattttcctcagctgcccttggttaattttttcaaaatgtgatctctatgggctccctgacaacagagcaaattgaaagctcatcagtagaatctttcttaagatcggtatcttttctaagaaatgttatgtcttaggacaagaggattgtttctcccagtaataggcagtatgatgtggtgcagccatctttaaagaggtcaggactatttaaaactgggggctattaagacattaaaaattaaaatgtacctcaggcataaatttcccaccacaatgcagttgtctttacttccttctgcattaatctctcattataagaacattcattttttcctagaataagagaatttggggcccagagggattgctgaactcatcccttctcaggcctttgtttctaggaaaaaacagaagatcagggggttaagtggtttacacaaagtcacatagcagcagggtaacctagtttgagcttcctgttttgtttttcccttgaagggaacatgaaatggagaaataatttcctgccccacagaaggagcagatgtcctcaagtctctgccttttcttacctgtttgatagagatactgtcctcttcacctcacaggatttccctcagtaatctattgtgatgaaaccctttcttctgggggcatgtgtgtgtgtgtatctcacagcactaccttgtgtggcacatactctgctatggttattgttcttaggactctaaggctttgtggagagctaccacgttcttgaaggcagacaccattttcagtgttggttacccaaggaaaagacgagcctcaaggacgaccacagaactgagagggagaaataaaagggagtgaaaatcccagctctgtaagaagatgtgaagggttgtgttcctgtgtgatggagttaagacagtgtctgtctcttaaagttcagtatctgaagaagaaaggaggtaccactgtgaagagccatagtccccacacaagtaatctatcctcaaagaccaaaaagtctggctgcagaatcaggcacataatttatggggcccagggcaaaataaaaatgcagagaattctaagacagcgacaatagagcattaaaccaagcacagggcctttctgagcacacagccccacgtaaacgcacagctaccagctcatgtctcaccacaagtagttactttagtaatgtctggtctaaacatacccagtgaagacttcactttgcatgtggtttttgaagaaaagagtcttgttgaaggaagagttgtgctttttggagagtagtttgtggctacttgggcaggaggcaaggactcttcaaggtggattttagggccaggaggtgagattctgaagtgcagcggatcctgcctttgtagcgattcttccttcactgccaatctaagagaatcagaggctacagccacatcaccctgaatgcgcctgaactctcatgagaggatctaagctctatgtttaacagatgatgcggatcttatatgtatatcaagagttgaacactagaaaactacaaaagtaatgaggcagaatctgtgtctgttgtccatattatttcctgcatctgcagttcctgatgcatggcaggtcctcagtaactatttgttgatgactggtaacaggtggttatcttagtgttgaaatttggtggagtccttctggccctaaaaggaagatcagagatttagagaagaaaggtgcctctggcaataaaaagaaaaaaagttttgaagcatgttaagaatgctaattttaatactgcaatttaagaaaatgttagcatgcctaagaaggggagacttttagtatcattttgcatataagcttattatatattattttataggtttattaaatatttataaagtttcctaagatttttagctgtacttttgctatcaatgttacttaagaataatatctcagtactcttttcgttttaggttattttatttagagaacatagtcagtggcagggtatagggagaagcaaaaaagctgggaagaaagacttagaaaagtcaaaaagagaaagaaaaggatcacaggggtctcagaawtgaaaacaggcctctgtaaaaaggcagaatagagagggaggctaaaaacagaagatgaggggtaggcccccttcttttttagaagagttattggcaacatactgcacacttgatgggaacttgggaaaggcctgattattgaatgtgcaaaagaaaaataaatggggcataattagtgatgtcctggtaaatacttaacaactagctcttggggagtggggtgtggtttgtagtatttgtcaatttctattgcataaattcttcatggcctttttttttttgctctttttttaattattatactttaagttctaggtcacatgtgcataacgtgcaggtttgttacataggtatacatgtgccatgttggtttgctgtacccatcaaatcatcatttacactaggtatttctcctaatgctatccctcccccagcctcctacccccaaacaggccatggtgtgtgatgttcccctccctgtgtccatgtgttctcattgttcagctcccacttatgagtgagaacatgcggtgttggttctctgaccttgtgctattttgctgagaatgatggattccaccctcatccatctctctgcaaaggacatgaactcatcctttttatggctgcatgatattccatggtgtatatgtgccactttttctttatccagtctaccattgatggacatttgggttggttccaagtctttgctattgtgaatagtgccacaataaacatatgtgtgcatggctctttatagtagcatgatttataatcctttgggtatatacccagtaatgggattgctgggtcaagtggtatttctggttctagatccttgaggaattgccacactgtcttccacaatgattgaactagtaggtagtttacactcccatcaacagtgtaaaagtgttcctatttctccacatcctctccagcatctgttgtttcctgcctttttaatgatcgccattctaactggtgtgagatggtatctcattgtagttttgatctgcatttctctgataaccagtgatgacgagcattttttcatatgtctgttggctgcataaatgtcttcttttgagaagtgtctgttcttatcctttgcccactttttgatggggtttgtttttttcttgtgaatgtgtttaagctctttgtagattctggatattagccgtttgtcaggtggatacattgcaaaaattttctcccattctgtaggttgcctgttcactctgatgatagtttcttttgctgtgcagaagctcyttagtttaattagatcccatttgtctattttggctttggtggccattgcttttggtgttttagtcatgaagtctttgcccatgcctatgtcctgaatggtatcgcctaggttttcttctagggtttttatggttttaggtcttacaataagtcttttccatcttgagttaatttttgtataaggtgtaaggaagggatccagtttcagctttctacatatggctagccagttttcccagcaccatttattaaataaggaatcctttccccatttcttgtttttgtcaggtttgtcaaagatcagatggttgtagatgtgtggcattatttctgaggcctctgttctgtcccattggtctatatatctgttttggtaccagtaccatgctgttttggttactgtagccttgtagtatagtttgaagtcaggcagcgtgatgcctccagctttgttctttttgcttaggattgtcttggctatgtgggctcttttttgattccatatgaaatttacagtagtttttttccaattctgtgaagaaagttattggtagcttgatggggatagcactgaatctataaatcaccttgggcagtatggccattttcacgatattgattcttcctatcctcttcatggccaattttaagctaccaccatgaattgactgaatatgaaatcttaagctaccaagatgaattcactaaatgtgaaattgggaagagatgtgtagtattccattgtacagatgcaacagacttaacctcaagaccataggtaatagtaaaatggagtaagataattaggaaataaggagtttttcaaatttattacctttgctttactctacttaattataaatttatataatacaattttaatttttaataatgactttaacaactggcttccaaagtaggagccagctgtagcatgccagtggatgggcatcaccacatgactctaccatctgtgttaaaatataaaaagagctttttcaattttttttttctttcttaaaaggaattcagaaaagtgtatgaggagacaagaatctcttaagagtattttttgtcaccactttgccaaaggtttttttctttttaaacactcaactcagaatttgcagattgaaagtttagacaaagatgagagatacatctttttctaccaataaaatctgcaatattttcagctttgcatgaacttcatagggaggcagagtggtgcaatgtagaaagccctaatataattatttacaaccccagactaagcagtctgcagctttgagcaggacatttcacctccctaggctttgagacaagaatgcccactgccccacttctatcacagggcaacatgtgcatgtcaggtgggggcttctcacatgctgcaatgttgagatctgccacttatttttaatggttccataaaagtaatatgtgcttctatagagacaaataaaacaaatatggaaaaacattaacaatcagcgaatctaggcaaaggatatatgagtattcgatttttttcaaaataaaaagatagaaacactaaagtcatttatacacagacagcatttggcaaacctgctaagtagtatacaaagacaaagtaccacatctaaagagatgtggtatccagatgccayaatcttaggatagtcaaagttcatttcatctaactgattgrattattcagcaatcatttactgagtatcaatgaccctaaatgctggagataactcaataatgcacaacacatacttcttaatctcacagaatttaatgtagttagagttacacacaaataaacagagaattacaatatggcttaaatagaattaagtagagactgctgtggtgccatatasgaagaacatctaaaccagccctaaatgatcaagaaagactttcccaaggaatctgagagcagtgagaacctaagatctaaaacataggaattaaaccaaggcctgggagggagagcaagcatccatctacgtgtctagcatttatactataagccaagcaacacatgcccatttactcctcacagcagtgctgtggggcaggttattggtatcccatttgacagatctgattacagacttggtattttcaagcaagggaaatcttaagaagaaaggccctgaagcaaaactgatcatggcttattcaaaagaactgcaagttgttctgtgtattgcagtttgcatatgtaggccttgggtagggtatgtggagttacagtggaaaggagtacagggtcttgtggataataggcatctattaaagggtattaagcctggagatgatgtgatccagtttccactgggaaagattactctggcatcagtagggagaataaattgaggaaggaacaaaactaatagtggggataccacctgggagctcataagttagtctaaaacacacagtggcctgaactaaggcagtcacaagtgatggcagaaactgggtggattctgacaggactggaggtagcatcttactggctgattggacatggggacagggtggagccaagaatgacaacttccaaggtttttggcaagggtgaggggcagatggggagccagtcactgagatattgagaggcagtgttgtgggaaggggtgggtagggattgggtgataatgagagggcaaagacagatttaatcaagatcttacaaagaccagcacataagaatctgagtctgtgacaagtggcagctaatcccaatggtattttgatcatctactataaatctttctaagagatagttcttgagttatggagagaaaaagtggggtatccatgattctggtcagttttaattataagtggcttggtgaatatgaaaaaaacccttggtaaattatggaaacatgacctttcattataattgctactatcattacttattagtattttctccctgctttcatcaggttcaaaccacctaaatggtcccttttacctgcccttttatggaaacatttctcctctttttttttttttttcatctccccatcctctaactcaaggttcagtggcaggtaatttgggtggagttaagtggtttttgtctgctctcaatcaatgaacgaatatttattaagaatctcccagaagctaagctgtgagggcacaaaggcatgagagtgatagaatggactttggggactgggtcggggtaaggttgggaggggatgagggataaaagactgcatattgggtacagtgtacactgcttgcgtaccaagtgcactaaaatctcagaaatctccactagaggatttatccatataacaagataacatataaccacctgtacccccaaaactattgaaattattttttaaaaactctcccatgtaagtgtaaaccaccactagaggacttatccatataacaagataacatataaccatctgtatccccaaaacaattgaaattattttttaaaaagtctcccatgggccgggtgtggtgactcacgcctgtaatcctagaactttgggaggccaaggctggtggattgcctgaactcaggagtttgagaccagcctgggcaacatggtgaaacaccatctctactaaaatacaaaaaaaaaattaactgggcatggcggtgtgtgcctgtagtccagctactcgagaggctgaggcaggagaattgcttgaacccggaaggcagaggttgcagcgagccaagatcgtgccactgcaatccagcctggcgacagagcgagactccgtctcaaaaaaaaaaaaaaaaaaaaattctcccatgtaagtatccaaagctctatgactggtgctgcaatcatggggtcatgttctttggggtcagataattctgaatttaaatcctccttctgcatttatttaccaaccacagcccttgggtaaaaaatctacttatgtctgctcagtttccattaaaaaaaaaaagataatattacagaggtttgttgtatcatatgaacatatgaacatatgaacacagagcctagtgttcaataaatgtagttcctgtccacctcataaggctgttgcccaggataaatgagctaatactcaaaagagggttatgatttccttggaataattctgctatataagttcagtcgtttttaatgaattttgctgctattgttcctcttattgtttttactggtaccaagggcttgtggtaaccatstctacaagcctttgagcagcacttgaacacatctttattattattatttttgaatctccttatttctttgtttcatctggggactcatttctttctttgcttagtgctgctatagagaaacagccagatgtctctacaatttgtcgtttctggccacatactctgttatttagatactctgctttgttcagccaagataccgtgtctgttaaagctttaagagtctgaagaaactaattgtgctgttattggcaggcaaaatgaaagacactgagagattaaaactgtggatggggggagcttaaatgtcactgtaggtcttcaagcattttttatataaaaagaaataataaactttctaaaaaaaaactttagttttatataaatttcccattaccagtataactgctctgatgaaagattattaaaatatctgttaaagctggcatagctaaagggatgggatttgggggttggagaagcagttaacactctacccgatttaacagcattgtccgtaaggatcaaatggtgtgccttctctttgtcttatattcctagaccaaaagcaacaatctccagcttttaagacaccatcctggcagattcaaatgctttataatgttatagaaaaccaaagaggcattttcaaagttaaattaaccggatatctttggttttccctggggaagttttattcagagctgctatgatattgtatcttagcacatagtctgagactggttacaaaacagaatgagatttcactttctgtctgctagagagcctcattagaaacttctggyttggcatcctcatttctcaaaaattccaagagatttcagctcaagaagagaaatattgactgtgtgtgtatgcatgcgccatcttgctttgaacaaaaaaatagcattagcattctaattcttaataagaatttccattaaaagttatttatactttaaaatactatttttcataattccgtatactgtttatgaaaactgcattttttaattctttttctctgtaaaataattaatctacctcccgaagctattaattatgtttcatttttgcacaatgcacaaatgttcccaaagttctatcctactgttttactcagtgctcacatcataagaaccctgtgagatagacattattatcataattttatggatgagaaaaacaaaactcagaaaatttccattacaaaaccaaaccaaaatgtgacccaaggtcttttgactcccaatccagttgtctttccacttcaccatgagtggttcactcatgttagttgagatcttcaataaaaatattagtttttctcagtgtcacagtagataggaaggtaccttggaatgcgtaccgggcctgccataaccagacggggcagtgtaaggagccaggccagccttgcaaacaaaatgctggagaaatcaggtctcctgaagagagaaaaacctcagtaggcacatttaaggcatctcaggcacagagaagctaggctggcagtagtatctaatcccagggagcaaaacctctatagtaataactgggtttatcataaagcgagagttaggtttaatagcctagtatataccagatgacctgtgcattgcaattggatgctgacagttttttcgtcatagtttcctaaatcttgcactacttcttcagcaggcttcacattctgtcatgtttttcttctttttcctgtctgctaaacttaaacagtttaaccatgaggtcattttataacttcactcacccctacatgcaaaagccttgcaagttttattcccaagcccagctattatcctttggtccygtaattatttatacaatggacatgacccattcctacccaccagtggaatgcatattgggatttttcccctaaactccacatccaccgagatcaagatcacttcctaggaagacaccagtaggatctggaagtctcgaaggaggagacataggaaagatatcccaggccagcaaggaagctgatgattgcacagagataagagaaaaggcatatggagaacagtgcaggggctgacctgacaggctcagaggctggagtgagtgacttaagagggtgagaagctgactgtccacactgggacctcagaaggaagggcatagactttcaagaggaagtgattgaacttgatccagtgaacaaccaaaaatagatgrgggacaaaataacttatattaggaagattaatagtactatacagggccatagaaaatgaacaaggggagcatacccaaatgttaaggaacaagggaggcacaaaatgcctgcacagcacaaagcaagaagaaattaaggagaaatcatttgtactgaccttggtgactgaagatacaaaaggtggtagaaaacgataagctttataactttattctaatttttttgttgttttttttatttttgtttttgtttttgagacggagccttgctctgtcacccaggctggagtgcagtggcacaatcttggttcactacaacctccgcctcccgggttcaagtgattctcccacctcagcctccagagtagctgggattacaggcacctgccatcatgcccggctaatttttgtatttttgtagagatggggtttcaccatgttgtccaagctggtgatccatctgccttggactcccaaactgctgagattacaggcgtgagccaccatgcccagcctgttctagttttataaatacaagattaatgcatacccattgaatcagaatatctgagggtggtagcaagtgtgtgtgttttaaaggctctgcaaacttgccatagagaatcactggcctgtgcagcaaagcagattctgggcttagtacctttctgtaagctttctagtgcttctgagtcagtcagtcggtttagcccattgccccattgctaggagatgatgataatacacaccaaagaagcagctaacacaaatcaaatgcttatgcacaatgaaatgtctaactgtggttttgactgaaagaacaagagttagtggaggtgggtgattggatcctggactggaagctggagaagccttcccagaggaactgtgatatagcccagaccttaaagaatgggtggactggagctaaaaacagacaggtggaccaaggagctggtgaaagtggacgaagcattgtgcagtacagttttaagcaggarggtgtgggcactatgtttaaatagcagaggaggtcgataacttccctagccttcctctgaattggtcccctgtatgaggctggagacccttgcaaaggccatggggcaagaacatttttcctttatttttcccatccattccctttgcagctcagccacagacaagctttattccctcacactactcatctgtgaatgcacactaaattcagtcatgctaagaaacaaatgacacataatcctttgcattagtctggcaagctaataaacctttatatagtaatatcacctgtagaaaactcatttcattcttactacagcactatggaatggggaagccagaagtggtcctcatattgtagataagaaaaggaaaccccagagaatccaacctcaaaaccatagagctactaaggggagtatttaattgggggacttgaacacagttttctttctgccaccctgttctgcaacttgctgcagtatttgcatttcaacaaggatcagagcccaaagcacgcaggtctaactgaggacttcagacatcaacctgtagacaggagattggttctttcagtgaagctctgaatcacattacrtaggtaactgtctttgtcttcacattatctgtcagttgtgtgatcacaggcaagttggagaaaattgtgagcttcacttgacctatgaaatggaaataactccatctactttatagggtttttgagaatttcctgaaataccacctggacaatgtccttgctacacagtaagcctcaagaaacctcactctctttctcttccccattttatttacacacaaggcaagccctgctatgttaaaaccacaggctcatccagcctacctgtttttgctctctctttgcttatgctcttaatcctttctctctttccctctacctttgtccaaccacacctgcctgccttcacttcttaaacaagccgagccttttccctcctcagtccctcatgtgagctggttcctctgctcgctcatgcctccttgctcctcctcctccaggtgtcaccccaagtgttacttcttcaggaaggactgaagtaggttcctcctattactctttctcactagatcctgtaactttcctttgtcatattgaatacaatttgtaagtatgcattaatcctgtatgtaggcttaatgcctgtcttctccactagactgtggactcccacagggcaagaacatgtctatttaattggccactattctccatagtacccaatacagaatctagcacataagacatgttccataagtatttgtcaactgtgtgttggatgactgctggtcttatctctccctcttaggatgccctcctaccgtctcctcagcaattcacatagtacattccacacacacaaaaaaattttaccatgcccacattctctgaccttttccttaattttcttttcccaacacttattcatacattatcataattgggtaatgttctctggttatttcatgattccctaatcacattatcagttttctaaggaataaaactctttggggatctgttttgaaatctctgataaacctagtataatagttgaaaatgctttgggaattcagtgatttcttgaataatgaatgaatagatcaatcactcaatcctagtatatcccttttgcacaaagaaaaacttcacatagcaatacagagatatcattgcagcaaaacaatttctaaccatgactcattgctatctatatagcttccttcttgggttactattttgagtttcaataagaggcaaacaatcttatcttgaaagagggattggatttatttttaataagaaaggctgaattgggaacttgcatttttccccaaaatttaataacagcactagtaaagccctaygctcctcagctggccttatttcaggtatatgagaamagagcttccaggtaagcttctttcatgatctaagagtgagaccaatatcaccaaacctgtctaaattcattgacagccaggggaggtcacatagcaaaagcatctagtcygaacatgtttcagaacccaggactgagcagaggacatggagggaaacatcaggttccccaaggccattgtcctcaaacatgtgacatcctgatagtcaccactgataacttcagtaagtatcacttcgatttcacccccttcttctactcacaactaaaacaaaayaaaaacatatgtaattaaaatatgtcattgctatgctcaaaatgataacttatgaactgggatttcaaattcaccttgttattctgaagcagagccttcagtttatggttgccctgctgttaagcctcaagytgctcttttttttttttttttttctgagacaggtcttctctgtcacccaggccagagtggagtggcatgatcgcagctcactgcaacctccacctcttgggttcaagtgattctcctgactcagcctccctagcagctgggattacaggggcccaccactgtgcccagctaatttttgcatttttagtagagacgaggtttcaccatcttggccagggtggtcttgaactcctgacctcaggtgatccacccgccttggcctcccaaagtaatgggattacaggcttgagccaccgtacccggccaagttgctcattctatccatattctttgaatcattttatatatacacacacacacacaaacacactatatgttacatgcattttaatttactttgacaattatctcacaggttctgtctagttagtactagttagtatccttccccattgagttagtatttgatcttataacatggtccaggaaaagaaaggtaagttttgctaagtacctgttacatcatgacamttgtgagagttggtatgggatctgctctttgtgcagtgtcacttatcacctgtcttccacctctgcttagctctgtgacaaccaacagagcctctaagagatggctgctgatgagtccttctatcgcaggctgcagcagtcctgaaggttgatggagggccatgctattcaaacagcaggcgtggctgagacagaagctcctggtgctgggaagccttgccgttgggagtctcctgtatctagtcgccagagttgggagcttggataggtgggtgcttaaaacacatgcttatacccctgtgacattaaggcttgatttaaacttccttaggacataattttaagtctatccacttgtttttctccttcgaaattcccaggaaacatgcttttctgcagtattgattttgatttactgagcctttaaaagagagagatccaagttcctcaaaccaagatgttttgtcaagatccatttgtattccgtgtgcattgacacttgttttcaggaaagggataaagctgtgtacagtaaaaatgtcatttaatagagctcagttggtcygtgtgcatctggtgttgacctctagctgtagcaaaacagtgatgatgtatctatgtatctttcttttgaaatttatgagtggacacttaatgtgctatcaggagcattaaaattatgtatgagcctctaaaggagctcatcgagtttgcaatccattgctctggaaagatggctgcaggcgtggggagttttaactatgttaattagctctggttttcaggggctgaacgcaccagacaaggaggctgttgctcagaataattgcccagaaagcaatgggaaatccatggagagaaaattacagtgctagggtttagctctaaataggtgtacagttgagaggtattggacttgcagaagtcccagcaacatcagctggcttcacagtaaatgtttctggtgtgttctatgtctagtctaatgggcaaagacagagaagttaatttctgaaatgtgaagcttccctttttgcccttaaaaaaaaattttttttttgagatggagtttcgctcattgcccaagctagagtgcaatggcgtaatctcggctcactgcaacctcctcctcccatgttcaaactattctcctgcctcagcctcccaagtagctgtgattgcaggcatgtgccacacacccagctaattttgtattgttagtagagacagggtttcactrtgttggccaggctggtttcgaactcctgaccttaggagatccacctgccttggcctcccaaagtgctgggattacaggtgtgaaccactgtgcctggctggccctttaaaattaattcttgcactggaaagactgaagtgtgttctccatgagttcagttctcacagtcagtgaaaacacatacaaaattaaaaatgaaaatcttttcctttcagttttcttttccttccaaaatttaagctaatctgtagaccttatcacttagattatttagaaataacatagcagtggtccttgttttccttcagttggtgtcattttgactggtaaagtgaactcctttgatgcttctcaattcaaaattcctgagtaattgtctcactcactagttgttacctaccctgaaagtgtaatcagagcttctcaccgacttccagtagtttcctaaagtagcacttgatggttattgagaagccttgaggtggtgccattggcctacctctgtaatggaactcttatatccagccctccccaactgacctttaattagcttccaatcatttaccttttacttagtaattgatctaatgatcactaatgcattattatttagttgatgattcttttcatttttttaactctgtctctagtctctaaggggatagcttttatttggaattgaattgtttggtgggctttstaaaagcctctcacttcagactttgagattatgtctgaaggtaacaggcttatttaggcccactctccagtaactgaagaccctgctttctgggagggagacagaggttacttctaccatcccttccaatcctaaacctgtatgatttttcagtctgggacccatactcagaatccatgctttcagaagtgggaaagaatatgatattttctcawattttcacattctatcttgagttagggagtccaaaaagcgactattctgcaggatgtgatctcccagggtagaagatagaaagaggaaggaagtaaagaaggaaaatgaccctttctacaagtggggaaattccatttgacctcaaacaaagcagagactgtctatatcagccactctcagccagggtactatgaaagaattaaatcctacaaaaaagaatttgagtgactgtttcctcaattcttccaaggatggtactagcatcattctaggtgcttaggacagaaatccatcaatggatgccttatggaattagagcttaattctcaaccagaacccaagaagaactgaaagatgaacttgtattattccaatcagtgtcacaattaaaagcatctttgcctatgtatctattgataattttacatcctccatttaaagccctagtacattaatctcattaacaaatttataaaaacaaaattcatgtttctctaaactattaaccgggttaaatcctgttttttaaaagctgtctaggccaggcacagtagctcacgcctgtaatcccagcactttgggaggctgaggcaggcgaatcacgagatcaggagttcaagaccagccaggccaacatggtgaaaccttgtctctactaaaaatacaaaaattagctgggtatggtggcgcacgcctgtaatcccagctactcgggaggctgaggcaggagaatctcttgaacccaggagacagagattgcagtgagccaagatcgtgccactgcactgcagcctaggcaacagaccaagactccgtctcaaaaaaaaaagaaaaaaaagttgtctatattttcacactttccacaatgagcatgagttgttttaaaaatcataaaaaagaaacatcgtgaaaagtagtatacattgatatttttccttaagcattatgatagatagctgtttaaacagaacaaagaccaagaccatgctcctcaattctgcagaacaggctgagtgtattagtccgttttcacagtgctataaagacatacctgagactgagtaatttataaagaaaaaaggtttaattgacacacagttctgcatggctggggaagcctcagaaaacttacaatcatggcagaaggcaaagaagaagcaaggcacgtcttacttggtggcaggagagagagggagcttgcagggggcggtgccacacagttttaaaccatcaaatctcatgagaactcactatcatgaaaacaaggggtaaatacacccccataatccagtcacctcccaccaagcccctcctccgacatgtggggattacaattcgggatgagatttgggtgggggcacagagccaaaccatatcactgggcatgaccttgaggttgtttctcatctcagaaaacaagaaagatgcaatacagtctcttgggaaaagcaagcaacagcctcattgccacagagggggagacacagattccaaattattagaataactggaagctttcaagtgtaagaattggtttaacagcctttttgactgatattatttaattttaccaagaaggctaaaatgccctcacagatcaacttaggggaattataatgaacttcagttcaattcagactatacctaaaaggaaactcaatttgctaaccatatatgttagccatgacaaattaaacagtcaccatcgtctactatcattgtgactgttaccacatctttctccctgagaaaagcagagatggttgttcactattcaggataatactgaagtggaaatcctcctgtctggctatatccattgcactccttccttaatgagattgagttcctgattttaatgggcttggcaatgagggcttgaggcttctggccctgtcaaggtcttgttgatgcctggtcccaggtgtggtaggtgatatacagcacttgctgatggcaattgggtttgattctatattcagcaaagtggatatataatcctgacctctttagatagaaagagaaagagaggcagaagaaatatagtattcttctggctatcctcaaggcccagggcagagagtctcagaatgaaaatctcagcaagttccaagattggaattttgcaggttgatgatgcaaacagcccggggcagaaactgggacctcctttcagattatatctcaaagattttcaagagccatctgagtgctgccgagctgcaagaaaataataccacacaaaatgtgaaacacatggcctccctgctacccttccacctcccagctgaagattataatctcctgcctttcactttttcttaatgattttaactggtgagctgttaaaaagctattagtatggctggtgccacttgtctatcctgtactgcaaacagaagtrcacgccgtagtcaattaagtgcttggagaataaaaaattttaaggagcactaataaaaaaattcatcaattatgtgtgctccatttaatacatggttgcttaaaataaaatttcccaaacatatgttcattatggattgcagcaggctgggaaccagtggctttatttatgcatttaaagtcttggtctgactggggaaccagaaaaatgaaaagttagttgcaatgagcttaaagtgtctctgtcttgcttgcaggctacaacccatttgccccattgaaggtcgactgggtggagcccgcactcaggctgaattcccacttcgcgccctgcagtttaagcgtggcctgctgcacgagttccggaagggcaacgcttccaaggagcaggttcgcctccatgacctggtccagcagctccccaaggccattatcattggggtgaggaaaggaggcacaagggccctgcttgaaatgctgaacctacatccggcagtagtcaaagcctctcaagaaatccacttttttgataatgatgagaattatggtaagggcattgagtggtataggaaaaagatgcctttttcctaccctcagcaaatcacaattgaaaagagcccagcatattttatcacagaggargttccagaaaggatttacaaaatgaactcatccatcaagttgttgatcattgtcagggagccaaccacaagagctatttctgattatactcaggtgctagaggggaaggagaggaagaacaaaacttattacaagtttgagaagctggccatagaccctaatacatgygaagtgaacacaaaatacaaagcagtaagaaccagcatctacaccaaacatctggaaaggtggttgaaatactttccaattgagcaatttcatgtcgtcgatggagatcgcctcatcacggaacctctgccagaacttcagctcgtggagaagttcctaaatctgcctccaaggataagtcaatacaatttatacttcaatgctaccagagggttttactgcttgcggtttaatattatctttaataagtgcctggcgggcagcaaggggcgcattcatccagaggtggacccctctgtcattactaaattgcgcaaattctttcatccttttaatcaaaaattttaccagatcactgggaggacattgaactggccctaaaataatatgtcatacaacactatgtgttgtgcctggagacacacaatgtctcctgtagattaaaatatgcacttttcctaggcagagctatccaagtcatttttccatgtatatttgtacatacgcagtgtgtgaccaaatataagatcagttctttttctactgaaaatttacgaaaaaaaaaaaattgctgtctgcatagtcgcatcttttaagctatttacaaaagagaagaggtggtggtattgggggaaagtgacttcagctattctcaragagttagtcttcctttgattcagaatttgtcacccgccattttcatagatttaagccaaaagataaatgtgtgaaaatgtaccaatggctgcgaagcttcaggaagtagaggatccagtgatgcattttttttttcctaagggaaagctggctctttaattcagatgctgaattggtgccatgaaaacagaaaatgctattttcttattatttaaaagaacgtcttatctcataaaattgacattgttccaaagttcttgtggtgattttgcactattgttttctcgtatggaccatggtgtcacttgtagcatgtcaatcacacattggaaagtcaagtccttttacttccatgttgtatgtcaacagagagaaatgtcatgtacataatgtatattgttgtaaatactggtttcacactaagtaattctattttgtaaactgaatatggctatttaatttattgtgaaaattaaatttattgtggtatttaaaaatggaatggattaaaattactctatgtgcaattttttttttttttactcattttgttttacgtgccccctgctggcttccaaaatggaagctgtttacgtgcatatgagagcacttggaaagatgtgcttccctgctggatttctgtaccccagtgaaaatgtatttatgaagtgaggttgagtatattaaaaaagaaaaacctcaaccatctggaaatcaagtataatagccacctcaaagaaccctagtgctgctctgctacaactttgtaacaattaatttactcgcagttgctgctgctcaggaagagagacaaggaatattttaacagaatcaaggcatagaagaatcaccattttatttgaacctctaatcagagtcagaccagtagagaaattaaataagattagaaaactctgtactgaaagctgctgatgcttcaaaaatgaaaacaagatctcacaactctccctgttagttgaaaatatatcaatttgctctgaaaggattcagctgcctagtgttgccattactaacataaacatatggctcatatttccatccagagaaattaatgctaaattggtgcctcgctaacatcagatacactgtattatgcttaaatatattcagtaaaatgtggaaaggggtattaacaacgacaacaaaaagatggattttttttttctcacaatcacagttgctaatccagtgggagatgtttgagagagttttgttcaacatcacagtgagagtgcctagggaaatcagaaaattacaatggattcccctttgattgtaataagtgttgattttctccatgagttgtttatcctgtctagtgatttgatggtgaacttttctaaataaatagccctttcccctccggtgtcggtatatattgcttctcaagccascgccttggtaatcatctctattgtctgaatgagcagtgatgctgtactctcagcttgaaacaggcatgacaccaatacatgctggcaggccagctcctcccttactgtgggatgacactagaatgagagcctcaggtctaaatgtcagccacttctcccctaagccatgaatgaagtcaatataaggatcctgcagtcagatttctctgggcctcaactctctgctaaccatcagtataaactatttgaatacaatgttcaaggacacaatcactgtattatcattaatttcatagaagtattcctagagcgctatacagccaatatgattttgtgccagtaactgtcaaattatgctccattggaacacggatgtttcaaaaactcagaccaggtattcaatcagtaaaataaaaaaatggtaatcttttcccagattcacagaggaataaaaaaaagttaataaattgaaatttctccgtaatcatcttttatgttaccaatttttcttagactttgctactgctaccaatagtgtatatcagactttattctaagattctatttgacttatgccaacttttatctcaataagccagtatttcttcaaattcaggggcaggaggggggaagcactgtgatttcagttgttctacttcctaagtaaatttgagaattgttttaaatctttaagcctccccayggagatctaaagcaagggcctatgttgggagaattttttgggtggcaggttctatttcactgaaaaaaacagtcacagccactgctgattgagctaggtagggagaaataaaaatgctatgatttaatagcataacactcgtggagattttaaacctacttgtttagaaaaatgtttcctgttatcagacagacaacagaactctagagaaatcttcacctcattacaatagctccacgagggctctctttaataagttacttcttttatgtcataaacaccttgcatgttttcaagaggcacagtggaaccatacagctttgtggaacagttctagctgcaaagagaaaaattgtttaagcaatggcggggtttctgctggaccataaagctaaaattacaccatttctggaagccaaggaattccagttacaattaaacaaatagcccaagggatggagagagactaaggatcagagagattttagattttagaatagtaaaataaacccatagatacacatcctgaaattccaagtctatctcctacccacctgaaaccactgcatataaacccttaattaattaaggcactaaacttttcttaataattgcaatgtagaataacagaagcccaagacattttggttctgagttaatatatgatcaagcaaaggcttgtaaactcttatgaggtttataatcccatctgatcttagatgtggtaccttttatgttgatggagcagtgacaagtcataattggcagcccagttcctcytcatgagtgtttcatgggcgtgcttcctggaatgctgcccctgaaatgaaggctcttctggaagacaagcttcaaggcctgtggggggcatcacctgggacactgcagatgcactgcttctcagggaaggtgagaaccagggacaagtgcagttcaaattccatccctgctgagaagatttgcttggtccagagagctgtttgctaaatcaaattgccttcataagcctaatttgagaattttccagcaatggagaatctcaaatgattgtagaatcttcccactraaatcttttatactctttccacacactcagcagccattttccactaaaaatagtctacagtctaggaaagaaagaaaaacattccccctcaaaattactaaatacagaaaaatcctagcaatttgggataacgaggtgaaaatataaaatattttcaaacaaattcattgcaattattgccaagtagacaaagcaccaaaccgggaggccgagtaggcagatcacgagttcaggagttcgagaccagcttgactaacatggggaaatcctgtctctactaaaaatacagaaattagctgggtgtggtggcacgtgcctgtaatcccagctactcagcaggctgaggcaggagaatcgcttgaactcgggaggtggaggttgcagtgagccgagattgcgscactgcactccagcctgggtgacagagcgagactccatctcaaaamaaaaaaaagaaagaaaagaaaaatatccaattgtgcctgctttgccaaatcaaagcctcttaattggcatattggattttttttccaaactggtattattcaagtatttcaaaatagtctgttctcttaagtaggttattcaagccccctagcatctgtcaatttttacagcacacctttcttttatagctcgtgtaagagtgaaatttagtccaaaatatgatcatttggtaaggttctaattaacgatgccttactatacatcttataaaaacaatttctttacatttgagctttcaaaaaattcttttcagttacattttattgcaccttttaggaataagagtgctatttcataatgattagaaacagattgaggagttgaaaggcagaactgaactgatagcaatacgcagctcccatagaaagtgcctgactggtatttcaaaaacaagtgtctgttatttaaagatagttcagttgaaaagcagtaccctttcagtcatatcaagtaccatggctggtacttgatcaggctagatctattgatgaatttatgaaccacatcagtctaccaggtttgcgggaggtgttggtaaaaggctttattgtttctaaagatatgtgtcaccccctctcaaaaacagtctgtcaagaaggtgagtgtctcctaatagatgggtagcaccatttcaaaaaggtagcttaccttacacatatctaaatgcacatgtctctgctttgcatttccatttctttgatgacaccagagaacatccttaaggccaactctaaaactgcctgtttccttggtaaagcctcaagaagactcacctaaaggtttgggcgtaaattataaaagaagttgtaattgctacgtgatcaggtaatccaacactaggtcctgtaaataaacttaatatgactctttaaaggtgagactctctagcaacgccagatgatcatgttgccataccaagtagaactagtgagtcacagttcagaaactgtaggagaaataaataaataactcagcctggaagaatcagagaaggcttccatgaggcacatttgaagatcataatatctcaccaggcagacaaacaggaaaagcatactctaggatgagggaaacaatacagcaaaagcacaaagtgtgaaaaagactagcatatccagtatagctggagagtaggtcataagagaaggtggaatgtaagaatggaaactgcaacagagcttcctaggccctgagcgagtccttccaccatagccttgaggggaccctgctagatagcaggccaggccatcatgctgagtctacacccggctgatccttagaggctgagggttcaatattggaaaagagatgataaaattaataagccgaaggttatctttcaaagagaaaaaaaaaaaatcacatgattggtgcccatagaatcatcattttccttcccattctgcttcactcttctctttgcttctctcacttcccttcatggccagtagctttgctgcagctgatgggatcctccatatttggctcatttttctcctgagattgaggaaaaagtgtttctgtgggtatactgaccatggaagagtcatattgtctccttgccactgagcttctcactaaaacttcacccatcctgagactataacaggagacataggaatgaaaagaaaaacaaacacaatattctcctgcaagataggtgttgagtgttctcaaaaaaaaaaaaaaaaaaaaaaagccaggaaacatattcatttcattacaaataaagcaaataaagtcatgcatcacttaatgacaggcatatgttctaagaaatgcatcattaggtaattttgtaattgtgtgaacaatataagagtgtacttacacaaacctggatggtatagcctgctagacacctaggctatatggtatagcctatcactcctaggctacaagcctgtacagcatgttactatattgaattctgcaggcaattgtaacacaatgataaagatctgtctatctaaacacatctaaacatagaaaaggaacagtgcaaatatataaaaaattgttaaatgctacacctgtacagttagggcacttatcatgaatagaacttgcagaactggaaattgctgtaggcatcagtgagtaagtggcgagtaaatgtgaaggcctaggacattgctctacactactgtagattttatatataaacactgtacacttaggctacactaaacttataaaagaatatttttctttcttcaataataaattaacattagcttactgtaattttttataaaatttttaattttttctttttgactcttttgtaataacacccaccttaaaacacaaacaacacattgtacagctgtacaaaaatatrttctttctttatatccttattctataagcttttttctacttctaaattttctcattctttcactttttaagctttttttgttaaaaactaagacataaatatatacattagcctaggcctacacagaataaggatcatcaatatcactgtcttccacctccagatcttgttccacgggaaggtcttcaggggcaataacaggcatggagctgtcatctcttatgataacaatgctttcttctggaatactcctgaaggacctgcctaaggctgttttccagttatttttttttaataagtagaaggagaacactctaaaataatgataaaaagtaaatacacaaaccagcaacatagtcatttattatcattgtcaagtattatatactgtacataattgcatgttctatactttgatacacctggcagcacagttggtttgtttctatcagcatcaccacaaatgtaatgcattgtgctacaacattatgatggctacgaggtcacaaggcaataggaatttttcagctccattacaatcttatgggaccacctgtcatatatgaggtccattgtagacccaaaaatatcattatgtggcatatcactgtataagctaaactttcaggatgaaatgggcaagccattttgtctttttgagcttcccattaaataggaaaatcagaacagggaatttttatgctccttcttatgacattatatcattccatgaaagggattattggagcatttcttgtgacactgaacgtccacagagtcagggcatgaaggtggaggaggaaggaggggcctctactgtacttgtgcaaatgatctctccaaaaaacgttgtctatgattttgcctttaagggctcttctttgtcaccactcccttgcaactaaactttcgtttattcaaccttattctcaactttggtttctagtttacctatcccttcccacattaattaacctttgccacacagccaaccatccccccaaaatttaatttagttcacaattctgttgttcagctggacaattcttctgttctggcccagcttgtcttccctctgctggcctctttcacatacctgtggtttctgccgggtcagctgctgcctggatgatctcaggtggcctcatctaaatgtctggtggcttgtgctgcttagtgattggtgctacctcccagtgttagctgttggcttgatgacaaaggtgcctaggtcacatgtatcttctcacttagtatatgcaccaggcctcttcacatggtagtcagaaagggcttaagagtagcaagagaaggcaagtcccagtgtgcaagtactttttaagtatccgcttccatcatgtttgcagtagtctcactggccaaagtatgtcatatggccaagctcaaagtccacatgagaggggatttcataagggtgtggatacaggaaaggaaaggaaatcatttttttaaaaatgttttggccaggcatggtggctcatgcctgtaatcccagcactgtgggaggctgaggcaggcagatcacaggagctcaggagttcaagaccagcctgggcaaaagaatttttaaaaaattagccaggtgtggtggcatgtacctgtagctactcaggaggctgaggtgggaggatcacctgagactaggaggcagaggttgcagaaggccaagctcatgcctctgcactccagcctgggcaacagattaagatcctgtctcagaaaaaaaaaaaaaaaaaaaattgaagagatggaatctctcttagttgcctaggctggtcttgaattccttacttcaagcaatccttcccccaacctcagcatgagctgccatgcccaataagacaggaaattattgtgaccatttttacaaataatctattgcacttcaaccttgactttatcatgatgaaaattataatatagcaataaactttatgtttcttaatttttaaagaaatacataatcttaataagaagagtggtaggtagaataatgccctccctcaaagatacctacatcctaatctcgggaacatgtgactatgttagcttacattgcaagagggactttgcagatatgatgaagttaagggccttgagatgaggagagtatcaaggattatctgggtggtcctgatgtaatcataagggtccttaaaggtagaaaagtgaggcagtaaggggcagttagtggaatgataagaactgaagaatgggtttacacttcaaggaccttcagggagatgcaacaatgctggctttgatgatgtaaagaaggggctagaagccaaggaatgtgtgcagcctttagaagctggaaaaggcaaggggacagctttcccccagggcctccagaagggaacgtagccctgctaacaacttgatttcagcctggtgagacctgtgttggatttctaaacctacagaaatgcaagataacaagttcatgttgttctaagccactaaatttgtgttgatttattacagtagccatagaaaactaatacaagaagcaagaggaaatggagggctcacaaaatgtcgtgtttaatcagcttattccccttcatcatgaatgggtgatgaggcaagagccatcaatcacaaaggacatttccgaacaatccaaacagaagtcctgaaggataggagaacctttgcaaatccctaagactgaacaggcctagtgaatgcaggcagagtgaccctgcaggacacaatcccctggtgatggaaacatggagtgagcaagcctcatttcttctgggacaccttccctgtagctcagagtaaaaaacaattttcatgctaaatttcagataagtttatgcaaagtgcacattacatgatattttttaatatccttaacattatggcttttatgctgaaaagagaaaacatttcttttcttcttacaaatttgtagtatctcaccttgatccagaaaatctgaagtccccaaagatcagagccaggagcctccgtcttttcccaagttgatcccaagatttcctctaaatggcaytgaaaatcattctataggaaaataaagacctgaaatgctttttcttggacttaatgaaattcagaggtatttattgatcatctaatcatctaatacattcctagctcctgaagaattcatcaattactaaaagtcactaggaaaaccagttaggcgtgtgaccagaatacagctctccagaattccagcccagggccacttgtcaagaaaagtacgtaagtagttctatttattatttatacctgcagacttcctaaatggatttgaggtggcaattttctaattaaaatgtgtttctaatcccttcctaatctcgttttattgggtacattttaatcccttgtacttaaccttgaatagaagcatgtactgaatctgtataaaaatatgaattagctgagtgcagtggcacatgcctataatcccagctacttgggaggctaaggtgggggaactgcttgaaccctagagttcaagataagcctgagcaacatagcgagacctcatctaaaaaatatatatatgtgtataaattagcattaaaattaagatgtacatccatttaatatacatgtaatatatatgaacacatatatttttatttgtaagcctgytgaaagaagctaataataatggttcatccttggaccaattcaaacattcttttgctaacaattacccatcaaatttacagctgcctttaaaaaattatattccaaaggtgtcacagtctagccaaacaaagtaagaatatataagagaaaaaaagaaaaactcaataaattgatatttcaaaagcacatcaaccaatctggaaacaaatactttgacaaaagaggatagcttgtctaaagtgtcactatatagtataagaagtttcaacggtaaaaggcagatgtcttctaatccgaggatactgaaagtgctattaggaagtattatacatccaactattgtgtgtgtgtgcatgtgattttcagcaattctttaactggttcatcccattgtgatgatcacgttacctttcatcttgaccatcactgcaagtattccaccttgaaattgtatcaggtttctctgaaagcacaattaaatttaaagataaatttaagaataaagtgtttacttagtattattgcctgcatctattgtgtttgaggtctccttcattaatataaagtgataaattaataagcatacaaacccaagcctgaacctctgagaacagagtcttgataactttctctgagatcctgaaacgtccttaggaactctgagctaaagatccaagcaattactgaaaacaaaaggtgttcgcggtgaggggtcagaatcatagggacaaaagaaccccaacacagacactcactgacacccattatcaactatgtttatactcacagacgaaccagccaaatccagccacgcaaaccattattttggatgaagtttgttaagttggtcaaattattggttactacatgatcatcctcaaaaagttactccaacctttccaatatctgtctcaaataatgtctttgaaatatctggagaaagaacttaagaattcatcgtgtgaaattaattctttgtcaatctctttggctgcctcatgcccccagccactgtaaatgtactcccagagcatttccaggagtccttgggaacttctaagctctgctgacatacaagccagtcagcactacacatcacctgtcaaacatggctgccctcctgctgtgtgcctcaatgtttgttcagtactacagccaattctgttcaggcagtgtggcttccctagtcaggcattgcggcttccctagtcaggcattgccacagtctccaaataaccaaagaccaaagaccaatgacaatgggtgtgtgtgtgtgtgtgtgtgtgtgtgcacgcgcatatgtgtgtgcatgtgtgtgtttatgggggcaggtaattctttctctcctatgtaatattccctttgaaaaagtaccaaagctacactatagtgatatatcaataaagccactctttcagttcctatgttcagaatctacccctgaccttaatagggtcaggctggagtggaagacaaatctgtgtaacagacaccatgttaaactcggaagcttatgatagatgtttaatagacattaatggagtgggtgaatgaatcactctttcattataatgacaaaggcattactagagggataaacttatctgctctttcttcccttcgattgggttctctgccaagagaacctaaaattctttatgcaaatagatttctggtgaccagtccaccaaagagtcagacatatcccctagcagtgaacacagtgcaggattttgctgagctcctgaatgcccattacacttttcatgcattgtaagacacaaacacaaagaaccaagggctaacttgaaactctgctcttcaaaagacttctcgtgccaggtaccagcatgacatttcaagtcactttgttcctttatgccttgtaatatactacagtgaggtggtagatgtcgactcctatttatgtaagagtccttttcccttaataacatggatccctaaattttctctattaagctgttaaattttacatttaattaagcatgagttaaaattgtaagtttccaaaaccataactcaaataataaatgaagtgccaccttcatcatattaaaccaatgttctgaatattcattgttcagggttttatgatattaaaagtgaacatcttagttcactagtggtatggaagctagagctagtttttgttgttgttttgacacggagtctcgctctgttgctaggctggagttcagtggcgcgatctcagctcactgcaacctccgcctcctgggtccaagtgatgctcctgcytcaacctcccaggtagctaggactacaggcatatgccaccacgtccagctaatatttgtatttttagtagagacagtgtttcatcatgttggccaggatggtctcgatctcttgacctcgtgatccgcccgcctcagcctcccaaagtgctgggactgcaggcgtgagccactgtgcccagccattgttgtttttaattacacttgaattctatctttttttgcatgttaatgaatcttagcctggcaaagtgccagacacagtccagtggactcaaagagaagcaggcagttcataggacacaatgcctctggagagtaataggggtctacatatacacaacttcccagtcatagattaggagaaacactcacttttatttactttgacatatttaggaaatcactattagacattaattaaagaatgattgagactaattatttgcacaaggctctgtgtgtacaaatgaaataatcagaccatggatgatccacttatttctactctctaatggyggaaatagctgcaaactgaaattgtcattctctgagtctagttattattgcacctcagttgattggttacatcatatagacacaggcaaatcttttaggaacatactttaatgcatgaataactttggaaaattcaccaaatgaagaggcagcagctgtgaatagatgaaaaattcttggcctggatatccacttaagtcaatagcgatagttctgtctaggtacgatggataataaggttaacatctaccctccaaactgattatttcagcatctcacaggtaattctggcagagactcaaaataaatgtttatgtcacttcccaccctcatatggcagaggagaaaactgggatgcagaaaggttcaatgacctgcctaagctcatacaacaggtaattacaaagctgggagcagatcccagggattcagattcccaccagtctaggaacccagctgttcttatcatatttagtccattgttattattacacttgggaagagtggctgtttgtggcaattcatgagtttaaaaaacaaggtagagagtaggaaggagagctatgtccacatcctgaaagtaccaggtagaacccttcaaaatctgggattacagcacacaggcagggaacggggcttctcaaaccttttcatgccacagcacacatacttatatgtgataatatttgtttgcaacctaaagtacatacaaagctattattcctgaccctggagactctttagctatccagaccctgtccagatgctcagagggcatcaatttatcctctgaggacaacaatttatcttggcacatttctaacccattcacaactcacccagataccttggaccataaataggaaaccctaccagatcgtaattattcttttaattattagaattaaatgtaacaactgaaattactgtggcttcttggcttccattattcttyactaaagatcatatcaagtaaaaaaaaaaaaagtttacagaagctaaaaatataaggctgtacctggtttacaaaaaattatcaagaatctctgaagttcattatttgctgaaaaatagcttctgatgcaaaataactcccagagaacaccatggatggtcttacatataggcatttagttcagagcccatcatgagaatgcaagaaggcccatttgttccaagcctcacattgacagagtcccaactttacagccgtgacattatacctccaaatgagattatactgttctctttgaaaagctctgacacataccacgtattttgactttttttaaaaatgtgcctggaatctcagaaaatattggtggccctgggcctctgagcatcaacaatcctcatacatatgggactaaactcattcataacaggattgttaatagagaagttgccctttaggtattcattttgctcttccttgtcaattcgatagagaaacaaaagcatgggatccacaggtctgcaggagaatgtgcttttgaatagagcaagtgcaaacgggagaaaaggtacaggaacactaatccacattcccatagaaatgctcaggtttcaatattccttttgaaaaaatgtagcttctctagtaagttggtcacactccaagaggaattaagcttgaaagataacagaacttcaaaagccaagttgaaaagaccagacctgaggcagtgaagggcattcagaagaaagaagagttttaactcagctttcaaagcatgttctccttcctctttgaaagtttctgacactttcagggttgctggagatgttcccacccatgacatctttcatcagaaaagcatgaaataacaaaaatctctctccaggtagaatagggagaaaaatgtgaaagtaagttaaagtaagttgcttcttgttccgcttcttcttgagcctaacaagtcatctccaagaaaattacttgagccttatctcactgcaaattagcaagatgcaaattctactatgtagtggaactgaggccccaaacgagcggtccccgaaaggaagcagaggctggttgccagccatgtgtttccatgactcatttttcaggactggccaaaaaacgaaaaacaaaacagcaacaaaacagtcgggaaaaactagaaggtaagagtaaaatgtgtacttaagactcagtaattacatctgtgccttttaaaggctaattccattatcagtaatcccctgttgttctgcatttacctgggtaactctgctgatccttcacagctcaactgagaatcattccaattactactgggtgccaggccaagagctgagcacaaggaacatgataatgatatgcacagtgcaaggtacctaccttcaaggagcttttgccagactcagtgctgggtgcatgggacatgacggtatgcaagatgagccccaataagctgagaatgggttgactgctaggcataagaaatgtgacacagggagaccccatctctacaaaaaataaaaaataaattagctggccgggcgtgatggctcaggcctgtaatcccagcactttgggaggccgaggcaggcggatcacgaggtcaggagttcgagaccatcctggccaacatggtgaaaccccatctctactaaaaacaccaaaattatctgggcttggtggtgcatgcctgtaatcccagctacttgggaggctgaggcagaagaatcacttgaaccagggagtcggaggttgcagtgagccgagattgtgccacagcactccagcctggtgacagagcaaaactccatctcaaaaataaataaataaataaacaaattagctgggtatggtgcttcatgcctgtagttccagctcctcgggaggctgaggcagggggattcctcgagcccaagagtccaaggctgcagtgagctaggatcacaccactgtactccagcctgggtgacagagcaagaccctgtctcttaaaaaaagagagaaatgtgacaatgtgcacaatacaagattgctgctcataaagaaatgtgtgccaggctcaatatgggcaaaattatggtacacgatgcaagaggccacacctccaggggctgccttccttgaaccctggcctaatcattgctttcagaacccccatttataccctgataaacaccaacatttttgaatgaaatattttcagtgcctatttcccccaatgactataagcacattgagggcattaattataacttgtttatgcttgtatccctggcaccacacacagtgactgcaaaaaaacaaaacaaccgccaccaatttcaacacagatgtgtgtagcactgagccaaattactcaatttctgctcaagaaaggtcaatgaggttttaaaggaacagcttatctgctaacatctacgtagtatttttacatcaatattcatgagtgatattggtctgtggttttctttgtcctgtctttatctggcttatacagcagtgttatacttgcttcacagaaggagttggagaggtttctttccttttcagtgctctagatcaggaatcagcacatttttctgtataataggtcagacagtaaatattttaggctttgtggtccatatagtctctgttgaaagtttcaactttgccccaaagcagccatgtacaatgaggaaacaagtagggtggctgtgttccaattaaactttataaaaaataaaacaggttgctggggctgaatttggtcagtggctgatatctactctggaataatttatacaccacttgaaccatgtggtcttcaaagggttgaaaaatgctatagactaaatgtttatgtccatgtaaaattcatatgttaaagcctaatccccaatgtgattctgttacaaggtggggcctttgggacatgattagttcgtgggggcagaaccctcatgaatggaattagtgcctttgtaaaagagactccagagagctgctgtgctccatttgcatgtaagggcccaagaagaaggtgccatttatgaaccaggatgtaggccctcaccwgacacaaatgttctaggaccttgatcttggacttcccagccaccaaatctatgagaaataaatctgtgtttttcataagccacccagtgtggtattctgttatagcagcctgaatggactaagacactagaggaatgcctgatcttaatggaaaagcctctagtgttttcccattaaaaaagatcacgaaatgttgcaggttcatcttgtattttcgttaccttagttctggaataaaccatgtctccaaggaggcagtggcatactgttttagttayagagtgtttatagtgtatttttgatatctagtagaagtagttccccttgtggttttactgttttcctattttgtgacagaatctttcttggctgagccaaccacagaagaacagagaagactaaaagggtgtgtgacccaaagtcagacttgccacagggacagtgggtgcaaggaggaagcrcagcttatyaggccaaatgtggaagctagtagcttgagcatggcaatattgtgaccatgggttccagcatgtgctcatgtctgtgggtcctggcatgtggtcagggaggctgagagtttaacactagtgacataaggctccagcagcagtgaatccaggtgcaagagaaatcttgagaccgacacatgctgggtagcaactggttaacaacggtccctacagaggaaggttagcctggtaaggacaaggcaaagccctcactgcagaggctcagggtcccaagacagcgacccagtagaaggatcaaggcagatctgtttggtagagctgccaggcatctggggaagagactgagatgccaaaataagccctaagatgagttaccagaactggagctcagggcacagctggacatgcaccaaatggggtttagggtgaactcaaatatcaggctagagctcctaagtccctcctgactaatgtcccaattagtcccagagtgtccaagtagagccgattactctggctttgaagtaaggaaggagagcaatcttggaaataatcaaggtcagacagtggactgagttttgggggttgtcctcgattagccaaatgaccttgggcagaccactttacctctctgggccaccaacggaattgaatgaaattatgtctaaagttctgtttacttctaaaaggctaattaattaaaccatttgagagcaaaaggaacttgtatttcaccagcgcattccgtgtgccatgcactctgccagtcattttacatacattaaagggagggaaactagtgttttatgttaccagtggcatgttggtaaatgtttaaccaacatttttggttagccaaatgcaaaccagctctcttgtgggtggagagggccctgatttgtagcatttgctaatgtctgtggtataaatactcccatcatagtttcaagctaccaccatgtagttactgaatgcagggctgggaagaaatatgccatggaacaccataatatgccatttctatcacacagaaacaatccatgtaaaaaaccttagagcggctgggcgcggtggttcactcctgtaatcccagcactttgggatgccaaggcaggtggatcatgaggtcaggagtttgagaccagtctggccaacatagtgaaaccccgtctccactaaaaatacaaaaaattagcagggtgtggtggtgtgcgcctgtaaccccagctgctcaggaggctgaggcaggagaatcacgtaaacccaggaggcagaggttgcagtgagccgagatcacaccattgcactccagcccaggtgacagtgcgagactccatctcaaaaaaaaaaaaaatccttaaggtatagatattagtaaaatgcaataaaattattagtaagtgataagctttaagtattcattacatttatttttaatataatttatttaactacaaatatatataawwtaattttgcataatgccygtgtttaacaactggctctcaaaatttccaatttatcaatcggtttttgagagcttgtatacatcacctataacataccactgactgttacctattgtctgccagtcaccatgattggcattttagatacattctttcattaaccctcactgtacccttctggaatagctattattttacagatgaataaaatatctcagaaagattaaataaattgcctggattcacatagctaaagtctggttgtatgacctccaccccctaaatctccatattcaattatactgcacagccattcatataacagaaatttgcttttaaactgttttatcctttatccaagataatagattgtgttccacataagctggggtcctttaaattcagtgagtctgaacatcgatgtatgtgcttgagttcattgacactgagtagtctagttacagaaaataccattaagctggataagaaacccaatgttaggcaggacttaaaccatatggaggatgatcatggggagctgattacgccatattaagtcttccacccagaggcactagaatcacttcaacctcttatctcattttccttaagttaatttcaactcaacaaaactaattcctttttaagcaagtttctttttttgcacaatgaacctaaaggtagaatatccaataacatttcaaccactattttcaactaactcataataattgttactgttgtaatttttgtgccaaaacaatttgttaatgttttgtaagttttgtttcttcttacaacataacaggatggtatttttttcattattaagagaatattagtcactgtaatcaaacccacatagataagaccttacatatttaatacaagggttactcctgtacaaatggaaataaattaagtttaatgttactacacaaatatggttgttaatttatgtacaatgtcaactcaacatggtaaactgggatactttttccaaagtttacagtacagctaaagtttccaaaaattcaaattatatgtatatatataattatatgtataattgtacaaacataattatatataattataattatatatatttatataaaaagaccaataatagcagcatgttatgcatcaatagcagcaacaacttgtccaggttctgcagtcatctgarcaaaatatagagacacccagcacactccatttaaagaaaaggggaaaaaaaagtaaaaaccaaaatcccagaaaattgcaaagttctgttactattgtggtacctggcaccatttttttaaattagyttcagaatcattatctggaaggaaaacattctagaataacattatttaaaacaactttgataaagcatggtcactactatgtaccataaagctggtacaagatattctgcattcacagaggtatgatacagtactgtcctacatctatattactagaagatacaattaaaaaggcattatttcagacttgattctactttcctaggagagggcccaaaggatggtatgacacagctctgtaaagaaatgctccttcttaggatttcctttcattagcagcacagttctaggtactcactgttcctcatgaacatcaactaagaactgttttttaaaaaaacaggccacattttctttatccagtctatcattaatggaaatttaggtggattccatctatttatttattgtgaatagtgctgcaatgaacataggcatgcacgtgtctttataaaagaataatttatattcttttgggtatatacccagtaatgggattgctaggtcaaatggtatttctgtctttaggtatttgaggaattgccaaactatcttccacaatggctgaactaatttatactcccaccaagggtgtataagtattcctttttctcgacaaccttgtcascatctgttgttttttggactttttaatattagttattctgactggtgtgagatggcatctcattgtggttttgatttgcatttttctaagatcagagatattgaactttttttcatatgattgttgactgcatgtatgtcttcttttgaaactgtctgttcatgtcctttgcccacttttttatggggttgattttttcttgyaaatttgtttaagttccgtatcgatgggggatactagacttttgttggaggcatagttcgcaaaaatttactcccactctgtaagttgtctgtttactctgttgatagtttcttttgctgtgcagaagctttttagtttaattagattccatttgtcaactttttatttttcttacaattgcttttggtgccttcatcatgaaatctttgcccatgcctgtgtcctgaatggtattgcctaggttgtcttccacggtttttatagttttgggttttgtgtttatgcctttaattgatcttgagttaatttttgtttatggtgtaaggaaggggtctagtttcaatcttcgatgtatggctggccagttatcccagcaccatttattgaatagggaatcctttgcccattgcttgtttttgtgaggtttgttgaagttcagatagttgtaggtgtgtgtttttatttctgagttctctattctgtttcattggtctatgtgtctgttttttttatttatttatttttgatcttaacattttaatatgtgtattttgattttattaagaagcacattcaaacttctcagccaggaataagagaatcaaagataattcaaagtttttttaaaagcagtaccaccccagaaaaatagactttagctttcataactgtatccaagccattcaataataagctaaagtgtacatatgtgactcttcaggatctgaaagctgccagtttgccttcctacgtatcagacacttttctctaattaatctttttttaaattattatactttaagttctagggcacttgtgcacaacgtgctggtttgttacataggtatacatgtgccatgttggtttgctacactcattaacttgtcatttacattaggtatttctcctaatgctattcctccccctgcccccaccccacgacaggccctggggtgggatgttccccgccttgtgtccaagcattctcattgttcaattcccacctatgagtgagaacatgtagtgtttggttttctgtccttgtgatagtttgctgagaatgatggtttgaagcttcagccatgtccctacaaaggacatgaactcatccttttttatggctgcatagtattttactcttttctcaatagccccaataacatcaactattttaccctattttatatctttcctcactccatccctccattatgtcctctatytcaatgcaaaaaaaaaaacctcctatatatataaaagtgcatcatgaaagatacagaacagaataacagttctctagcccttgctcaatgcgctctctatcccttcagtcactcatttcttggcctcccctgaagtggtaggcactgtgccaggctctgggcacattgagatcaaagacacatatccacgctccttttctgttttccatgtactcccttactgaatgccagaagagaaatggagaagagcaaggaggaaatgagagaatcagagagagaataaaagaagggtataackgaaggtaggggacagagaagcaggaacagtgaagataagaggaaacacattcaatattaggttaggcttctaggctgcacacattctgtagagcttcctgtgtggtccctgaagcaaacaaaaagggaaaaataacattatgaattgatgccatcataactcaggacaaaaggggctgatgatgaatgatggaagagaatcttccactttatttcatatatttgttttatttaaaagrtctataaagaagaatttagcaatttgaagatgaagtttaggaatgattacccaagaaacctttcctgtatactgctgaagagattggtttcagcatcttcataatgttccttcytactaagyaatacaaataatacaaataataatttaaaataatagtcactgacattgagggcttattatgtgacaaaccctgttctaaagactttatatgcattgtttctcccaacaagcctatgaaacaggaactattttattaccctaactttatagttaactgaagaacaaagagattactaattcgtgtaatagttttgtattattctaaagataaactccaggtcccttaggatttcaatcagggccctccacaatctggttctaaatacctttcaaaattaggtcctactcctaactgacaaaaatagcactataaggttcctagcatgtcttcttgctttcttgactgtaagcttcactccaaccactgtttccatccaaaatgccttctgcctatcctttgcctatttgaatctttcccatcattcaaaactcagctgtagtgtcaactcttttatggagacatctctgaccaatctcacccaatgaccttgccctcctctgaattcacaactcactcttacaaatactatcttttaacttctcttgacttattgtcttatattatcatttaaatgaccataattggatttttgtttctccaactagcatgttaacttggtataaatcatgtctccataatgtatccacagtgcctagctaagttctcagtatgcatagttatcatcaatgacttttttgttaaagtaatgtattgtgtagcatatacagagattattcatgtcattagaatgtattctattcttcttggagccacacttcacataccttcagcatgaaaaatgttcatatgcccaaagattacatccattctggtaagaagaattgatacaatttatctattaatcagaatatttactactccaacccatattttattgtattttcatattcyataaaaaacagaatactaaaaaaaaatcccactttaaacaaactggttatttgagaaataatactgagaaaacttgcaacttagacaagaaataagaaattaaattgattttcttttaataatgtacaaaaccaaaggtcaggcaattgtaagacaggtagaatgtcctactctattggactcatatttttgtggttgtttttgtttttgagaaggagtctcgatctgttgcccaggctggattgcaatggcataatcttggctcactgcaacctctgcctccctggttcaagtgattctcctgcgtcagcctcctgagcgagcagctgggactacaggaacccactaccatgcctaactaatttttgtatttttagtatagatggggtttcaccatgttgcccaggctggtctygaactcctgacctcaagtgatctgcccacctcagcctcccaaagtgctgggattacaggcatgagccaccactcccagcttactgcactcatttttaataaccttaaagatccctggaaaaggagaggttacaaacatctaaatttaaataaatatatatatatatattttaatggttagtgaattaggaagtttggaaaactttcaggacagtagttcacagctttctgaacgtacttaaatgaggtggaaactgacaaaattgaattgttttggaaaacttgcccaaggcagacaaggaacagatggaaggattatgccaaggaacatatcacatgctacttaactcgtttggggacggactgttaggctaaagatgagaagaaaaaacaaacaaacatttaactccaaatgaaagaaacaacctagctgctttcaatgcactctgcctgactttatttcaaacctctctttaggaatcagtacatcagttttttcgaaaaggcagtgaaaaccatctccatgtccctcacaggctgatttgctcataaaacaagagaatgaacaagactgcagtgtcaacatttactgtcaccttatcgaaattagtgttgtcattttattatttatttatttatttatttatttttgagacggagtttcacactgttgcctgggctggagtgcaatggcacgatctcggctcactgcaacctccgcctccccggttcaagtgattctcctgcctcaatcttccaagtaactgagattacaggcacctgccaccatgcccggctaattttttgcatttttagtagaaacggggtttcactatgttggccaggctcgtctcaaatgcctggcctcataatccactcgcctccgcctcgcaaagtgctgggattacaggtgtgagccactgtgcccggccagtcatttttaaaagtcctgattaagccaggcgcggtagctcatgcctgtaatcccaacactttgggaggccaaggtgggcagaccacttgatcccaggagttcattgagaccagcctgggcaacctattgaaatcccatctctaccaaaaaagatacaaaaatcagttgggcctggtgttgcacacctatgatctcagcctctctggaggctgaggtgggagaactgcttgagcccaggaggcaaaggttgcagtgagccaagattgcagcattgcactccagcctgggtgagagagtgaaagcctgtctcagataaaaaataaaaagtcctgattagaaaaattcttagcacaacacttaaacaccaaggtgatttaattggaataacattagccaagaattcaggaaaaattcttgaggaattgaaattagataacaataacaacggatcaagaatgctctagattcagaaagttgtggactggctagtttaacttctatcctaaagaaattattaggctttatttttagaaaccaattgggaatactaatggacaaagattcccttcattaaacagaactatcctggttgcaggaaactacggtcactttcactaacaggggtaataagagatgccatttaaagatattagagcagcggcacacacacacacacaaaagccaacatcataattagattgccatgaagagtatgacagcatttcacactcggagtaaaacatataaaggccagagtcagggaaatgctactaatgacacaccaagcactcaacgttaaagctcaratgcaagaaagaaagatgctgtaaccttggaatcttagaaagtctgcatggcagtaccctgtaggtgaaattgttatgtactgasgatcaatttttattaaatataaatagtagattacaacttgcctaaaaaaagttctaatatgatagacaatatgatatgaagaatcataacttaataaggaaaagtcaatccaacacaaaacttggtaaatcagggctatttctcatctgcactgctttctgaagaaggtgtaagcagacggaaacatatctagaaacttctgagcaaaaataaatgtcctacatttcttgtcgcagactttcgctctaaaaatacaaattggctttgaacagaacagctggccgattcagtccaaagttccatcaatcatcagagtgctcccaggcagctggattaatgacctttttcatgtattgactctccactttggtgtcctgagattattcaaggacataagtgacttcttaagaaagttggtcctttgatgggcatgttaactcttttatctcctggactttgaaacagcatatataactctagatttttcaccatcaccaaacatttactgagacaaaaaccaacatacataagaatatgtattgaaaagaccgggagcagtggctcacgcctgtaatcccagcactctasgaggccgaggtgggcggatcacctgaagtcaggagttcgagaccagtctggccgatgtggtgaaaccccatcactactaaaaatacaaaaattagccaggcatggtggtgcacgcctgtaatcccagctactcgggaggctgaggcagragaattgcttgaaccctagaggcagaggttgcagtgagccaagatcacaccattgcactccagcatgggcgacagcctggagacaaaactctgtctcaaaaaaaaaaaaaaaaaaaggaagaaagaaaaagaaaagaaaagaaaaagaatatgtactgaaaatagctamgtgtacaaactaccaaccaaaggaatgctaaggaaaacaaatgctacagaaagaggtaacatcttgctctagagaggtgtcaatgaagaattcacagagattgcagacacaaagtgagtttgaaagtactggaagcactggacaaatgaagaagaggaacatgggcatcgagggtaaggaaagcatgtcagcaaagggctagagattggaattcatctggcttgtctaatttgaatacagtcagtattcctgtagcagacgtaatggaaaataaaagtgaaaaggtaattaagagcaaaatgatgtagtgtcttgaatgtcaggcttagcaatttgtactttattctgcagataaatggactgtgatttaggaagattaaggcaatacctgtgaacaagataggttaaaagcatgaagatgggaaaaccagcatgaaaactatttcgataattcaaaccaatgaaaccagattcatacacaatttgcccatgggcccagtctggcccacagctgattttatttggccsacatacttttttgaaaaaatcaaaataagtttccaatatttaatatataatattgcacattataacctgcatttgcaacttctccagaaaggcttgtttcaagaccctcaaagtcttccaaggccgagacactgagtttggaggcccaaccccagggaaaccccatgtttcaatcaaacatctcaaagtsaatgcaaataccagactaaatgtgatttatatgtaatggtatagatcttgactttcacttaatyagttgatattttaggtctcgcagaaaacctcactctacctccttttgtagtttactcaaaacacttattaggaaaatagagttcagtagttataattagttttaacagctcaactctatttcttcaaatgttgcacaatccctagaccagaccacatrgaccctgaacttatttcacgtagaaaaaaaaatgatgcatttcacttaagtagaaaaatcagaaagaaaaagagaatagaataaataattttagacatgttgaatttcaggtgttagcagaaacatctatgttaaaatattcaacagggcactgtggatacacaattggaatttgaaagagattaggtctggagatttaaattttacaatcatttacacaaaagtaatgattgggccaggcacggtggctcacgcctgtaatcctacagctttgggaggctgtggcaggttgatcccctgagatcaagagtttgagaccagcttgaccaacatggtgaaactccatttctactaaaaatacaaaaaattagccgggcatggtggcaggcacctgtaatcmcagctactcaggaggctgaggccggagaatcgtttgaatccgggaagcggaggttgtagtgagctgagatcgcaccactgcgttccagcctagtcaacaagtgcataattttgtctcaaaaaaaaaaaaaaaaaaaggaacaattgaagttattcaaaataagccttggagaatatgaagattagcagactggaggaagtagaggagtcaatgaaaaagaggtaaaagcaaaagaaacaatatattctaggggttggaagccaggagaataatgagttttaagatgastcaaactctgagtccaaatcagcttgcactcccatatacatccgcttatttaatccatacaacgacccttcaagatgtgtcattacacccatttgacagataaaaataccaaaatacagagagattccctgagtaatctgatggcacacagctaagaagtgataaatctaacagtgtgtctcaactacaggtgattttgcttcacacaagacatttggcaacatctggaggtatttatggttgttagaactgggagtggaagggaggaaaggagagaggagattggagggggagagaattgctattagcaactagtggatagaggccagagatgctgttaaatatcctacattgcccaggacaaaggaattaaacaaagaattatctaacccaaaatatcaatgttactgatctagcacatagtctttcaaatgtgatgtttagtctttccataagaccactctatctaagatgcaaccaggttcctgcactaaggccaacattaggctaagggagccttgatagaagtttataattttttttaagagacaggatctcactatgttgccccagctagacctgagctcctgggctcatgtgatcctcccacctcagcctcctgattagctagtattattggtgcacgccaccatgcccagctctggaatatgtatttttgggtagcacacaaaactgaataagaaaatctggaagtggggcccagcagtctgtgtttttaaaaggcttcaaggtgattctggcatattccaaagtttgataacgagtaaactttaaaaaaataagtctgaagaatttggcaatttgaaagccatcatggcttatggagtatgtactttttgagaaggtgctggggaaagaagtaaatgcttcagctaggcatggtggctcacgcctttaatctcagcactttgggaggctgagacaggaggatggcttgaggccaggagtttgagaccagcctgggcaacattacaagacccccatctcgaagaagaaggaaaggaagaagaggaagaggaagaagaacaggaagaagaagaaggaggaggaggaggagaaggaggaggaggaagagaaggaggaggaggaggaagaagaagaaaaaagaaaatgctgggggcaaaggaatgaatgttaataaggaaacataattttatctagttaggctctagtggatagaatcctgccttgcgtttacataataataataatatcccttatgtttcctcatatagtactgtagcctgattgctcaaataggaaacatgtcttacacatttacagatttcccttggtactaagcacaaaataccatgtagtcattatttaataaatgtttgatgagtgaaattaatcaaactttaaaaagtcctgctttgtgttttgggcaagctgatatttacctttaccttcacaaggcctagaacatactcattctctcagcctgattctctgacrtatgggtcagaagtaaatcaatcaaggaaattcctaaataaatttattaggataggagaatttatagataagggaaaaaattctttctatgcattcattgggtcaacttttagcccatacagaattatgcaaaataatttggttatttcagtatcatcgctattcattcttaaggaattgcatgtttgcctggttctaggtactgtgctaagatctggcaatataaagaccaatactttatggaccttgctctcaaacaacccacagtcagttagattgaaaacaaacataaaaacaagagtgtatagttgtttgaagatctagatggagttcactggggcactaagggtacaactaggtatgagaaaggggattgttggtactctaaaatgaaacaaataaaaatccagtgaagttagcttaagaaaaagttaaggatttaggggtgtctgatgaatcccaaatccagtgatgctgctggacttcaaggacaggaaccagaaagtaggaagtagggcaggagttgagaacaaaggctttttcttttgtttgagacagagtcttgctcttgtcacccaggctggagtgcaacagcatgatctcggctcactgcaacctccacctcccgagttcaagcaattctccggcctcagcctcccaagtagctgggattacaggcccccgccaccatgcccagctaatttttgtatttttagtagagatggggtttcgccatgttggccaggctggtctcgaacccctgacctcaggtgatccactggcctcagcctcccaaagtagtgggatgacaggcatgagccaccgcgcctggctgaggaaaaaggcttcttacacaacatggttactaaaatcccaccactgaaargaaaaacttcatcaaaacgattattcataagactagttgcaaagaggagaaagcatttgccccgcagaagagctacaagagggccttctaggcaagaaagcgaaatgagcaaaggtacggggacgtgtatcagtgtggaccatgttagggtaacaacaagcagcttagggtgactagagaacagccagggaaatgctggcaggggaggggtcagtttggagggcagrawtcaatgaattggcagtgtaggcaggaggtggatcacagagctatcaaaacaggtcgggatgcaaaagagtttcaaacatgaaaataccagaattagatatacattgaaaaagttgacttgggcagctatctgtagggtagactcaagtaggatatgaggctagaaaaatgttaggaggatgttattgtatgcatgtcatcagtggtgtccaaggtgggaagagtgtaccctaggagaggggtgagcctatccattttagtggaaatcagaacttcttttttcttcttttcttttgagacagtcttgctctgtcacccaggctggagtgcagtggtaygatcataattcactgcagcctcaaactcctgggctcaagcggtcctcccacctcagcctccctagtagctgggactacgggctccatacaccatcatgcctggctaatttttaaattcagaacttcttttgatatgttatttgttatatttattgttatctaaaacattaagctttactagtagtacatgaattaatactgagacctttccttggtccatgtgctatttatcctgatggtagagtgaggagagttctatgatgtagaaccattgatagtgacactcttcatctcacatattttagagtgtctatttcagctaagatgttcccagtgaagtggatttatggcttatattatctaatttaagctaaactagccctcaaaaaaatgagcacatgatctttaaaagattcctgcaaagagacattagattgtagataatatgaataattcaagcacaaggaaatggcagagctgaagcctcttctgctagctgagcctctttctcaaccacattgttaaaagcaatggccacatagatctaacaagaaattggccaaaacagtctaaattatccataagtctatttaaaatattgttttacatccttaaagataaaccttacccaaattgtgtattgtgctttgagatgtcagctattagttattggtagtacaaagtcaccagaattaggaagatgtttaaacagcgaggatgaaaatatatactgctacttacagcaaaatgaatgaatctcagaaacttcacattgagcgaaagaggccagacacaaaggaggatttgctattgatgaaatttgtgtataaagttcaaaacaattaaaacatagctgtggcgtcagaggtcaggccagtgattatccttgatgatgggggaggagaatgattcactgggagaggtcatgaggggagcttgtaggtactggcaatgttccatatcctggtcctaatttaaactacatgctcacgtgctgtgtccactttatgaaaattcatccagctgcacactcacagtgtatcatcttttctacatatatgctgccattgaataaaaggttatttgaaatcgattttttttttttgagacggagtctcaccctgtctcccaggttggagtgcagtggtgcgaactcagctcactgcaacctctgcctcctaggttcaagagattctcctgtctcagcctcccaagtagctgggattacaggcgtgcgccaccacacccagctaattttttttttttttttttatctttagtagagacagggtttcaccatgttggccagcctggtcttgaactcctgacctcatgatccacccacctcggcctcccaaagtgctgagattacgggtgtgagccactgtgcccagcctgaaatagattttaaaaagtaagatgcttaactattttaggtagcacatataaaaagaattacacaatatttgtccttttcttactagcttattcacttagcataatgtcctccaggttaatccatgttgtcaaaaataacaggatttctttctttttaaagactgaataaaattccactttgcattttgcatatgtgtgtgtgtataaataccacactttgttaattcacctattgattccactgatatgaggccatctaaaatagtcaaactcatagaagcagagaaaagaatggttgtttaccagaacctggggagaggggaaagaaagagctgttgttcaataggtataaagtcacagttatacaagctgaattagttgtagagatctaccatacggcataatacctataagtcaatacagtcaacaatactgtgttatgcacttaaaaatccattaagaggatagatctcatattaaatgtgcttatcaccacacacacacacacacacacaaaagatgcaaagaaacttttggaggtgatggatatgtctgttaccttgattatggtgatggtttcacaggtggatgcacatgtccacatttcaaactgtacatacttaatatgcttagttttttgtatatcaattatatcttaataaggctaaaaaataaatttaaaaattaaaatttgttttctctttttaaaaaattaagatgtttaataattatcaagagcattgacaaatttctgtaattcatgggaaactgtttttgtgctgttaataaatacagtttctaaaacactattgtttcattatctcatcttctaaaatttatatttgaaatgtataaaatattagacaaatagcacatgtacttaatctcataatttcatcaaatataatttattggagcgtttgaacacatcagtttgctgaaggggacgtgccataaaaagcctacctgtccaggcactttgggaggccgagacgggcagatcacgaggtcaggagatcgagaccatcctggctaacacggtgaaaccccttatctactaaaaatacaaaaaattagccgggcgtggtggcgggtgcctatagtcccagctactcgggaggctgaggcaggagaatggcgtgaacccgggaggcggagcttgcagtgagccgagatcacgccatttgcactccagcctgggcgacagagcgagactctgtctaaaacaaaacaaaacaaaaaagagcctacccgtccaaacaagagctgataagagtctgaactatgtcaatagtactgggaatgagaagaggggatggagagaagagatgacaagaagaaagaatctgcaggacctgataactgatgtttgggacgagtaaaaggaaagaatctctggtggctccaggtttccatgaaggctggtaatgcccttcaccaagagaggaaacccaggaagataatgggtatgaggaatatacagacatttagaatatggaaaccacacctctttattgaaatccacaacaataaccccttgttatatagtcagcccttaaaaatgattaattcattattttctaaagccacacaaagaagtgtcactcctaagaggaaatcttaactaattaatgttgtatacttatgattacactgtaagtgtaaggtataactagcaatgaaagtacatttgcttttgaaagaaggtctaggaaaaattattctaaaatcgagtgctgtaattattttcataagtatgggggaaagtacagtgttttattatcaggtctatgaaaaagggcagtgtaattaatcatcaactatattcttaaaattaggctttttttaaaacataaaagtcaaataaatgcatttatttttaattgaggctctaagaatattttttaaattagcatcatgaaattgttattaggacaaaaatcatttgcactgcccacaaatgaccccattttcagtaatgtgcatcaagtgtatcatccataataagacttcgtcctggcttggctttttttttttttaatctaaaaagctttaatttctttacatatatttatccagtgtccctgtgcctcatgaggataattctctgggacattaaaccacaaaaagatgcctgactttcccccaagtcacaagaggcataggaataagggacacccccaggcgagactccttggcattccatgttgctctctttactacagtaaaatgattccacaaagttatgaaattcagatgggaggccctaacatgcgttggaggccagaaaaaaaatatccctaagaagacaggggccgggcatggtggctmacacctgtaatcccagcactttggaggccaaggtgggtggatcacctgaggtcaggagttcaagaccagcctggtcaacatggtgaaaccctgtttctattaaaaatacaaaaactagccgggcatggtggtgggcgcctgtaattccagctactcaggaggctgaggcaggagaatcacttgagcctgggaagcagaggttgcagtgagctgagattgtgccactgcactccagcctgagtgacagagtgagactccgtctcaaaaaaaaaaaaaaaaaaaaaaaaggaacatattgaaggaaaaaagagaaaagtggctccagcatttaaaggatcactctctgccatcatctctcactgttgtttgaagtgtttcctttctattacattaattcttcataaatgacagaagtttcctttccttcctcttcctttcttctgcagtcagtacctgcgaggtatcagggatgtcagcataactaggacacattcctaccctcaaggagctcagagctgagtaagaaacttaagatttagtcagagaaatatatgccttttatacatttttttaattgacaaaatggtaygtatttatcacgtacagcatgagttttaaagtatatatacactgtggaataactaaatctatttaattgacatacacgttaccttmcagttatcatttttgtggtgagaacatataatatccactgtcttagcatttttcaaaaatgtaatgtatcattaactatagtcatgatgttgtacgatagatcccttgaacgtattcctcccstgtaactgaaatttcggttttgtccaacatcacctccttgccacgtccaatagctccagcctcagataaataccattctactcttttcttctatgagttcaacttgcttagattccacacacgagtgagattatacagtattgtctttccgtgccttattttacctaacataacatcctccaggttaatccacgttgtaacatataacagaatttctttgtttttttcatggccgaatagtattccattgtgtatacgtacattttctttatccattcatctgttgatggccactcaggtcaatttcatagcttgctactgtgagtaatgctgcaacaaacatgggggtgcggatatctcttcaacacatgagtttcgtctcctttggatacatatctagtagtggaattgaggaccatatggtagttctattttaattttcttaaggaacatccatattgttttctgtaatgactgcactaatttacattcctaccaacagtgtgcaagggttcccttttttccacgttttcaatgaacacttatcttttgtcttttttataatagccattctaacaaatgtgagatgatatctcattgtgcttttaatttgcatttgtacatttttttggcccagggaacatttggaatttttattttgaccagaaagctatgaatattttcactttgaaatcttaaagtactgacagattgacatcttaaaagcaaatgccgcttggaggaggtggtcatgctgctgctttggcccagggcctccccaactggcctacaccagggcctgacctcgccctcaagctgcctaggggtgtcgcagcctggcacccccagcctgcctgcaccgggacccgcgccccttcctgcggctgtgcctgcaccttgactgcacgcccgacatctgggcrctgcaggaggggartgcctggctcacacctttcatgcacgctgccactcatcactcccacacggcctccttactgcgttgcctcctggagccgctgtcggtttaccctgacttggccaaggtggtgggctgccagtgctcatctctgtcagttgcagctgagagtttcttatcaaaagaaatgtggttggcacccccacagttctacgaaataagaaggcttgaaaacttggcctctctccctgacttgcacaaattgtgtttggatggtacattagaaagatagaaaagatggctgcccatcaccttgttaaccgctgatgggaagctccagctttttgcagttgatgagctacacttggaagattcagactttttagaaaatcttttttctactgcaaagaaagactgggtcgggcgtgctggctcacgcctgtaatccctgcactttgggaggccgaagcaggttaatcacctgaggtcagaagttcgagaccagcctggccaacgtggtgaaaccctgtctctactaaaaatacaaaaattagccgggcgtggtggcaggagcctgtagtcccagctactcgggaggctgagacaggagaattgctcaaacctgggaggtggagctttcagtgagccgagatggcaccatggcactctagcctgggcgacagagcaagactccgtctcaaacaaacaaacaaacaaaaggctgaagaaatcatgaaggaaggcaagcagtttcacagaatagtgatatccaatcacaatctttatgatatctacgtgagtgttcaaagtgtaaacacgtttatcccaagaactccttagtaagaaagagccatctgtagggtgcccgtgcttgtttataaactggcttacttggagtccttgtgaataatgagggttgaatttcaacttgcttgaaacgtaaggaactttgtgtcaataaaagttattataatgcactatttcttatttcaagtgttttagggagctatcttgcttattttattctttaaaccttcagtgtgccacatgtataaagtttataaagtattaatgatcttgttaaccaaaataagaaaaaaatttcacaagggttcccactcttgtattgttttattatctcaaaagtttaaataaggccgggcacggtggctcatgcctgtaatcccagctatttgggaggctgaggcggcagatcacgaggtcaagagatcgagattatcctggccaacacggtgaaaccccatctctactaaaaatacaaaaattagctgggcgtggtggagtgcgcctgtagtccctactccacctactcgggaggctgaggcaggagaatcgcttgaacccatccactatattggcacttttcctgatgtgctttggaggatgatccatgaatttcttagacactttgctggaattacttcaagggtgtctgattagatggtgaacaggagactgagacaaactaaaagtgaccatgtcattgttttcttgctatgtctttagcttgatgattaagatacaattccttttaaaacgaaatgacattagttattatgtttcccaaattagaaatctattttagttgatattttaaaggaacgtgaagccataaccaaaaccatcattgtttttacgccagagtgttaatgaatgtaaagaggttacagaggtgtggtgtttaattagtgatgtttatttttactatatttagtgagtaatttttcattgtctttaaagacaaataatatttattgattaaaggtgagaagccgagtgcagtggctcacacctttgggaggacgaggcttgaacctgggaggcggaggttgcagtgagccaagatcgtgccactgcactccagcctgggcaacaagagcaaaattccatctcaaaaaaaaaaaaaaaatgggtgagaaatgatagttaagacacccattgtgtcaagatctttgactatattatgcattggacaaatgatttcattttgaggcaggaaaatagggtctggaggcaagggaacataaggctgattcacacttaagctatgacaggaaatatcctctccatagggtgttggggaccagcctcaacaccactcgtagggtacccgaagtccggtggcaacaaaggaatgagaagagacaggttaagagttcataaaagtgggagccagggtgccagagcaaatcagaggctgcaaaggcccagagttctggtctccacactatttattgagtacagtcacttagatctaagaagcagatgttcagggcgaaacagtgaaagggaggtgtcaggcctctgagcccaagctaagccatcatatcctctatgacctgcacgtatacatccagagggcctgaagcaactgaagatccacaaaagacgtgaaaatagccttaactgatgacattccaccattgtgatttgtttctgccccaccctaactgatcaatgtactttgtaacctcccccacccttaagaaggttctttgtaattctctccacccttgagaatgtactttgtgagatccacccactgcctgcaaaacattgctcctaactccaccgcctatcccaaaacctgtaagaactaacgataatcccaccaccctttgctgactctctttttggactcagcccgcctgcacccaggtgaaataaacagccttgtttctcacacaaagcctgtttggtggtctctycayayggacacgcatgacatttggtgccaaagacccatgacasagggactccttcgggagaccagtccccagtcctcaccctcactctgtaaagagatccacctatgacttcgggtcctcagaccaaccagcccaaggaacatctcaccaatttcaaatcaggtaagtggtcttttcactctcttctccagcctctctcgctacccttcaatctccctgtccttccaattccagttttttcctctagtagagacaaaggagacacattttwtctgtggacccaaaactctggcgccggtcacggactcaggaagacagtcttcccttggcatttaatcactgcggggatgcctgcctgattattcacccacattmcattggtgtctgatcaccgcagggacacctgccttggtcattcacccacattcccttggtggcaagtcaattgtggagatgcctgttttggctgctcacccatattgcagcccagggctgctccccacccctcttctccatgtctctacccttcttttaaacttgcctccttcactgtgggcagccttccaccctccattcctacttctcccttagcctgtgttctcaacaacttaaaacatattcaactctcacctgaactaaaatctgagcatcttattttcttctgcaatactgcttgaccccaatacaaactcgacaatggttctaaatggccagaaaacggcacttttgatttctccatcctacgatacctagataatttctgtcgaaaaatgggcaaatggtctgaggtggcttacgtcctggcatttttcacacttcgttccctccctagtctctgttcccaatgtgactcgtcccaaatcctccttctttccctcccgcctgtcccttcagtcccaaccccaagcgtcgctgagtcttgtgaatcttccttttctactgaccatctgacctctcacctcctccccaggctgctcctcctcaggtcactccccgccaggctgaatcaggctccaactcttcttcagcctctgctccccvaccctataacccttctattacctcccctccccacactyggtctggtttacagtttcattctgcaactagctctcccccacctgcccaacaatttcctcttagagaggtggctggagctgaagtcatagtcagggtacatgtgcctttttctctatcagacctttcacaaatcagccagcatttaggctctttctcttcagaccccactaaatatatacaggaattccgatatctcactctgtcctacaatttaacctggactgactttaatgttatcctaacttctaccctctccccagatgaatgggaaagtgttttttatctagcccaatctcacgctgataaccaccggcttcrtgagccagacctccaggaaggcattagagcagtcccccgagaagatcctcagtggaactatcaggcagattccctagatatagctaggygagattacatggtttcctgcctagttgaagggcttaaaaaggcagcttacaaagctgttaattatgacaaacttaaagaaactacccgaggtaaagatgaaaacccagcccagttcatggcccgcttagcagcaacacttagacgctttaccaccctagacccagaggggccagaaggcygccttattctcaatatgcattttattacccaatccgctcccaacattagaaaaagctccaagaattagattccagccctcaaaccccacaacaggacctaattaacctcaccttcaaggtgtacaataatagagtagaggcagccaagtagcaacgtatttctgagttgcaattacttgcctccactgtgagagaaaccctagccacatctctggcacacaagaacttcaaaatgtctgaaccgcagtggccagacattcctccaggaccgcctcccccaggttcttgcttcaagtgctggaaatctggccagtgggccaaggaatgcctgcagcccgggattcctcctaagccacatcccatctgtgtgggaccccactggaaattggactgtccaactcgcccggcagcccctctcagagcccctggaactctggcccagggctctctgaccgactccttctcagatcttttcggcttagtggctgaagactgacactgcccgatcacctcagaagcctcctggaccatcacagacgctttggataactcttacagtagagggtaagtcggtccccttcttaatcaatacggaggctacccactccacattaccttcttttcaagggcctgtttcccttgcgtccataaccattgtgggtattgacggccaggctgctaaacctcttaaaactccccaactctggtgccaattaagacaatatccttttatacactcctttttagttatccccacctgcccagctcccttattaggttgaaacattttaactaaattatctgcttccctgactattcctgggctacagccacacctcattgctgccttttcccccagttcaaagcctccttcacgtcctccccttgtatctccccaccttaatccacaagtataggacacctctactccctccttggagaccaatcatgcaccycttaccatctcattaaaacctaatcaccattaccccgccatgctttaaaaggattaaagcccgttatcactcgcctgttacagcatggccttttaaagactataaactctccttacaattcccccattttacctgtccaaaaaccagacaagccttacaggttagttcaggatctgtgccttatcaaccaaattgtcttgcctatccaacctgtggtgccaaaaccatatactctcctatcctcaatagctccctccacaacccctccataacccattattctgttctggatttcaaacatgctttctttactattcctttgcacccttcatcacagcctctctttgctttcacttggaatgaccctgacacccattaggctcagcaaataacctgggctgtactgccacaaggcttcacagacagtgtcaattacttcagtcaagcccaaatttcttcctcattcattacctaycttggcataattcttcgtgaaaacacacktgctctccctgctgattgtgtccagctaatctcccaaaccccaaccccttctacaaaacaacaactcctttccttcctaggcatggttaggtacttctgyctttggatacctagttttaccatcctgacaaaaccattatataaactcacaaaaggaaacctagctgaccccataaatcctaaatcctttccccactcccctttccactccttaaaaaacagccctaaaagcagctcccacactaactctccctaactcatcactcccttttcattacacacagccaaactgcagggctgtgcggtcggagttcttacacaagagccaggaccacaccctatagcctttctgtccaaacaacttgaccttactgttttagcctagccctcatgtctgtgtgcagtgactgccactgctttaatacttttagaggccctcaaaatcacaaactatgctcaactcactctctacagttctcataacttccaaaatctattttcctcctcacacctgacacatatactttctgctccccagctccttcagcaatactcactctttgttgagtctcccacaattaccattgttcctggtccggacttcaatccaacctcccacattattccagacaccacacctgacccccatgactgtatctctctgatccacctaacattcactccatttccccatatttccttctttcctgttcctcaccctgatcacacttggtttattgatagcagttccaccaggcctaatcgccactaaccagcaaaggcaggctatgctatagtatcttccacatctaacatcgaggccaccacactgcccctctccactacctctcagcaagctgaactcatggccytcacatgggccctccctcttgcaaagggattacatgtcaatatttatactgactctaaatatgccttccatatcctgcaccaccatgctgttagatgggctgaaagaggtttccttactatgcaagggtcttccatcattaatgcctctttaataaaaactcttctcaaggccgctttacttccaaaggaagctggagtcatacactgcaagggccaccaaaaggcatcaggtcccatcgctcagggyaacryttatgctgataaggtagcttaagaagcagctagaattccaatttctgttcctcacagccagtttttctccttctcatcagtcactcccacctactctcccactgaaacttccacctatcaatctcttcccacacraggcaaatggttctaggaccaaggaaaatatctccttccagcttcacagtcccattctattctatcatcatttcataatctcttccacataggtttcaagctgctagcctgcctcttagaacctctcatttcctttccatcgtggaaatctatcctcaaggagatcacttctcagtgttccatctgctattctactactcctcagggattgttcaggccccctcccttccctacacatcaagctcagggatttgcccccgcccaggactggmaaattgactttactcacatgcctccagtcaggaaactaaaatacctcttggtctgagtagacactttcgctggatgggtagaggcctttcacacagggtctgagaaggccaccacggtcatttattcccttctgtcagaaataattcctcagtttggccttcatacctctatacagtctgataacggaccagcctttattagtcaaatcacccaagcagtttctcaggctcttggtattcagtggaatcttcrtaccccttaccgtcctcaatcttcaggaaaggtagaacagactaatggtcttttaaaaacacacctcaccaagctcagcctccaacttaaaaaggaggactctgtcaaggatagagcccaaaaactcaccaaccaagcaagtaattatgctgaacccccytaggcactctctaattggatgtcctgggtcctcccaattcttagccctttaacacctgtttttctccttctcttatttggaccttgtgtcttccatttagtttctcaattcatacaaaaccgtatccaggccatcaccaatcattctatatgacaaatgctccttctaacaaccccacaatatcaccccttaccccaaaatatttcttcagttgaatctctcccactgtaggttcccacgctgcccctaatcccacccaaagcagctttgagaaatgtcacccattatctctccataccatccccaaagttttttgccactccaacacttcaccattttgttttgtttttcttaataatataagaagacaggaatgtcaggcctctgagcccaagctaagccatcatatcccctgtatatgtatatgtatatgtatatgtatatgtatatgtatatgtatatgtatacctgcacgtatacatccagatggcctgaagcaactgaagatccacaaaagaagtgaaaatagacttaactgatgacattccaccattgtgatttgtttctgccccaccctaactgatcaatgtacttcgtaatctcccccacccttaagaagrttctttgtaatctcccccaccattaagaaggttctttgtaattctccccacccttgagaatgtactttgtgagatccaccccctgcccacaaaacattgctcctaactccatcgcctatcccaaaacctataagaactaatgataatcccaccaccctttgctgactcttttcggactcagcctgcctgcacccaggtgaaataaacagccttgtttctcacacaaagcctgtttggtggtgtcttcacacggamgtgcgtgacaggaagcagtgcatcttacgcrtaatctatagcagtggtggtttaaatgaatctcctttgtactcaaacagcatatctttaacttatcagagagtagctagcagagcaggcttaactaggagcctgcatgtctggccacattccagtgcttcaaaggagtgtctttctccttgaacacagtgtttatggataagagagcaggtctcgctctgagcatgggaacatgatggcatttacggggctttcctcctcagaggcctcttgtggctttccacaacttattgtcccatatttttatggccagcttatgcaggcaccccacaaacccttttcccaacaatagggcatacattgagtaaatgattttgtaactttacttcatcctcttcatttacatagggcgtgcccccaagtaaccagtggaatcttctagagggtatttaaatccccatcaattctgtaacggcaccctatgctcaggcccgctcccacactgtggagtgtaccttcattttcaataaatctcttcattccctccttgctttgtgcatttcgtccaattctttgttcaagatgccaagaacctggacaccctccactggtaacgtattttgatgagccagtcaggagaaattccaggagaaggtaggtccaaagtttgggatttatttttcttctttcccctttcctttctgctctttacaggggaatctctctctctgtcttttctttccaactcaggacactttggtgggcagcaccaaaacaaggaagcaactgcaggtttctggccgtggccagtgaaactaaggggtttccatgtgaaggtgcctaactgccaccgcccagtttgcttaagggaccagggtctttttcattttttcccccctttctttctttttcagtctttcagtggctgtttcctagtacctgcttggaaattgagggcaactggctggggtcactccctagtattgcctgaaggcccaggaatgcatgggaataactgccctgcccagaaggggaaatgattcttttttttttttttaaatcttttctgggtgtggtccctgatccctgtgtgtagacagctcagagcaaacccgcacaagtttcaggtgacttaaaccttcttttcttatgctatattctgcccttcccctattcaactggctaagggcaaaagaaacccacccagcctccagttcctatcattaaagtttgtggaaagggaagcatgggaaagcgtggccttatcaaattataaggatgctaaaagtcagggattacacccaggtaccaaaggaaagctcatagtaggctctggagggaaagcatgaaaagtggcactggtgcccacctaaggtcarcaacgtctgacactctaagattgcaccccacagaaggacactctgggggatcctgtggacctcaacctccccaaaggggacgctctcggcaaaggttctgagatctagtcataagccctccttagaattttctctgagttgcaattttgcttggccccaaaattgtttagaatctggagtttactatctaatgggagagtgggatggccaytgcatgtatgcaggcttttgcrctaagcagggggcctggttaactaacgtatgatgctctcatttggtgctgtttagccccagtgttctttggagtcgggaggtttggcctttaaaaatcaaactgccgtcaaaactgctttacctgaaattttggttgacagccttcattggattatctactggggcaaccaaagtaaaactggtgagctcttattgctatttcatggctacggttgtaagctactgcatcatttatgcctgtgtatacgtgtctagatgtgtttatttctatgtatacttactgttatatcttgtgtctaccaaactggcttataagtaaaagagcgctcataaattaagtaaatagtctaaacaattttcaagttcatgtgacttaagttactaaacaagctggctttaaaattattggtaaaataaggatagaagtgccttcagaattttcagcatacatttttgtctggattttatatttgtctttgctagagagtttgagatgttagtgtttggcatagaaagttataaaactataaacctagctgaaacaaaatgaccttggtttgcatgctttttttttttttaaataaatcagagtaatttatgaaaggaaaatatcttgggccctcaaaatcaccaagctgaagggaaaattcaagctaagaactccttagggcaaacctatctcccattctattcaaagtctcaccgagatgaatgcatatatgcatatctaattgtttcctttggaaggctaatcagaaactcaaaagaatgcaaccgtttgtttctcacctacctgtaacctggaagcccccaaaccccctccctgctttgagttttcccacctttctggagcaaaccaatrttcattttacatatgttgattgatgtctcctgtctcccaggttaaaagtgaaagaactgagtacagtgaatggaataaatgttttaggtaaactttttgtgtaaattaaaatcttaaagttatttttgatgctcatttaatatctgggtcattttcaattaagaaagggttgttatatagggaaatatgtttctaaaattgtggaattgttcttatctaaaaattcccatatctgatagttcaagatttcttgctttttagggtttcactaaagttttaggtttctaaggataaaaattctagttaacccataattctgtatacaaaatgtgccagaaagggttatgctgttagtgaaaaaaagaataattctgtctaattcagaagttacctaaaagttagttcaaattacagatttgaaaaggttatttgtgaaacaatgtagtaaggaatcattaagtagrgaggaaagatctggaaaaagtttaaataataaaatattatttaaaacctgatggagaattggagatatttggctaacattttcataaagctcttagtcttgattaaagtaaaataagaactattgtaaagaaatgccaatttacgctccagctatgacagggaatatcctctccatagggtatacgtcgagtaaatgactttgtaacttcacttcatcctcttcaattacatagggcataccccaagtaaccagtggaatcctctagagggtatttaaacccctgtaaattctgtaatggtgcccttgagcccctatgctcgacctgctcccacactggaatgtactttcattttcaataaattccttccttccttccttgctttgtttgtgcattttgtccaattctttgttcaagatgccaagaacctgaacaccctccactggtaacaatttttcatgaaatgacttagttttcctactataaaataaagacaatgatgaatttttaaaaatgcctacttgtacccgtcttttattaaataaatgccttttacaaaggactaaaaggcaaggaaagtctactttatctttggatgatgcttttccatggctggaagggatttttttaatataatgattttttagtgatactgacgcatactgcaacatttcagagtgccactctaaaaccccagactttatggctttaaaaattcaagttttttacttcccccttgcccacattttttggccattctaagaccaaccattaagcacaggcacagcaagcatgctttccttctaataggctctgcaatgttcctgaactacagtttccctccttattcctcagctcactgttaaagttgaaagataggggcttcccttacatggggcagggatatcctggaacctcacattgggttctggagtcagtaactgatgcatttttaatgcagcaaccacgccattgttttcaggatgtggcgctgatgttggatactatgaaatgaataaatatcagcctgtgtacctaagtatcctccctcagggctctgtggtatagaaagtgctttgatgtggttgggagaatgagacaccccatgggctgcttctgctccccagcacagagtaagtgtcttctagtgacatagtcaaatgaaaaggaaccacaattgttgtgcagatgaagcagatttttgcctagtgacctgttgtaaaatgtaatcagagctttcctttaatggactgaaaatccaaactaattaaaatactgtctgacccaaaccatagttcagatcagactgtgagaggctattgtctttaatgtacttcacctctcctctgaaacatgccctgcttcttttgaaaaggttaaaattatgtccatgcagcaaaactataaatggcctgccttaaaaggagcaggcatccaaaagagatcctgaatcctcacccttagcaggatgaaagagcagacactggagaagaatgtctgcttatattttcaggcaaaagatgtgaagtagggaaagaaaaatgttaataaattgacatttattcaaatcatgatgggaggagttttagatgttattcattgtgttattcaggaagacagcacatatcactgcccatccatacacacagggaagaagtctccacttcccaacaagagatgcatggatatcatgggaccatccatgaattcaaactgaagggcctagaaaatcaaactgaaggtcagtgtgcgtgaacagcagggataatggctccatgatcctttcttcaaatatatgataagactgagaaggaattcattttggaaaaaaaaatagaggtagacaaaagaagccaaattttgctttctccagctgaatcatctgccacgccatctggttccatgaaagttctgagcagactggcaagaaaaaacttaaaagagtttataggctgggcgtggtggctcacgcctgtaatcccagcactttgggaggccaaggcaggcggatcacgagctctggagttcaggaccagcctgaccaatatggtgaaaccccatccctactaaaaatgcaaaaattagccgggcatgatggcgggtgcctgcaatccaagctactcaggaggctgaggcaggagaatcgcttgaacccaggaggtggaggttgcagtgagctgagattgggccactgcactctagcctgggcaacaragcaagactctgtctcaaaaaaaaaaaaaaaaaaaaaaaaacccggcttatggaccagcatggccagagtagaatgaataagggaaataattctaagaaatgaggtcaaaaaggaacaagaagcacaaccgtgaaacacagaaagcccttatcccagtgcctgagacttgctccctaaatggtacctgtaatagctgcctgtaggactgtgagctcctaagagagacagaagcccccagagcaggaatccatcctcttcactgatattttcagcacctctggtagttcccagcacaaagaaagtgctgagtgaatgawgaacaaattatttacyctaattacactcamgagactgttgtgtgaggtcagaacatgaagttattaatttataacatgtgatacacctctctaatgtattaattatgtcaggtggctatccagggcactttctaccagttatcaaagtagttaggtagcctaattaatcaaaaggaaactgcttaataagcatggaataaggtcaaagaaagctggatagtcttaagggatgttacttgcaatcttgtcttctttgccctggcaattttacatatcagaagacatatccagctaataaattgggtcaaaggctgaacatggtggctcacgcctgtaatcccaaccctttaggaggctgaggcaggtggatcactaggtcaggagttcaagaccagcctggccaagatggtaaaactccgtctctactgaaaatacaaaaaaattagccaggtgtggtggcagacccctataatcccagctacttgggaggctgaggcagagaattgcttggaccagggaggcagaggttgcagtgagctgagattgcaccactgcactccagcctgggtgacagagtgagactccatctcaaaaaaaaaacttcagttacctcttaaaaactgtatctccaaattcctcaaatgtccaaatatctyctgcctccttaaaggccctatcacattaagcrttagaatttcaacatgaatttgagggagacacaattcagcccataacagcttgcctcttattaataatataccatttatttagtcattgtgacaatmatttcagaaggtcagtgtaagcctactatcacaacatctaatgcacaacagtgactatagattgtgcatcaaatttttaatttggataacataagcaggggattagactcgatgacctttaaggtccctcccaactctgagactccatgagtatatttgttaaccgctaatattttaaaaattatgattgtttatatgatatcagttgaattacttttaggtgcgagcttcagaaatayctagataaatgcatcaaaaagtgacttaagctgcattatgtaaaaagcattccaggagtaaagaagttccaggttagttaataaagttgcttaacaaatcatcagagccaaggttctttccatctttctaacctgccagtcatcaatgtgccagcagtttccccatggtcacaaaatggctgcattagctccaggtatcacatccttacaaagtctccacaggcaatacaaaggaaaagtgaaacatctttgcttctttccattttttttaagaataaagaaagcatttcataaaactccccgtcgggcttctcattggtcagatttttgtcacctatgtactatgattggtttaaatcagcagacatcccttcatttctcattgatagaactaagtaacatattgtacacaccaaatcaatgaaaggcaaagcaggaaaaggcacaagtgaattataagtccttcctaggggttggtgaggagtcagtttcccttgacatggaatatgtaagaattgaccaaatccaggttctgttagcaatgaaggataggaagatctgttggccacagatataaccatgttatcaaaaccccaaatcagagcaagcagtgaaaatgagcatttgataacaagattaccttgggaaatctgaaaaaccacaaagatggtgacgacagtggttcctacactagtgttccttagaaatatcagaaggtattgatggaatttctgagctattttcaatatctcaaaagccctaggagaaaagatctatacaaactaactaaaatgttaaatttctttgattttgactgaaattctataaagtcagtatgctaaggattattctctcatcctaatcagaagcttatattagttttaaatatatattgaatcaatggaatgttttcaataaatcaataactaaataaatatatttgaaaggtatatttcaaatatgaaagactcttttaaaacaagaattccatgggagaaaaaaatttttttttgttttttgagacggagtttcactcttattgctgaggctggagtgcaatggtgcaatcttggctcactgcaacctccgcctcctgggttcaagagattctcctgtctcagcctcctgagtagctgggattacaggcatgtgccaccatgcccagctaattttgtatttttagtagagatggagtttctccatgttggtcaggttggtctcaaactcctgacctcaggtgatccacctgcctcggcctcccaaagtgctgagattacaggcgtgagccaccattcccagcctgaaaatactctttaacgggttattggtagagaaaaatgtgagaaatcattgatgttcaaactatttccttcttcaaggaaatgtaaagaatttcagctccttgggactcaggagtgctatcctgtctacagagacaagcagtaaacacccacagacattaaacattcaacctcagtctattctgtgcttaggcagacatctttcacactgaccatatgctaaaaagtcatgatcttttcatatcattaacttaagacaccacgaggatttcttgaataaatgcattaattaatataagtgaatgtaatatgcactcctgttatcttttatttctactagaaaaggacaaatcaacaatgagcacttaaattaaattctatcagcaaaatatacttatatgatatcacagacatttgcatttatatcctgcaattactatctgctaatagtaatttaattgtttaatgaataatatcaaggagagtaaatattaatgaaaatgtagaacattttattttatttatttawttatttatttatttatttatttatttatttttgagacagagtcttgctctgttgcccaggttagagtgcagtggcgtgatctcggctcactgcaacttccacctcctgggttcaagcgattctcctgcctcagcctcccgagtagctgggattacaggcgcctgccactgtgcccggctaatttttgtatttttagtagagatggggtttcaccatgtcagccagggtggtctcaaactcctgatctcatgatccacccgcctcagcctcccaaaatgccgagattacaggcgtgagccaccatgcccggccgaaaatatagaacattttaatatgagaccttctggttttatttgtcaatagtgacaactatatttagcaatttttaaaagatcattaatcaaagccagaaaatagtaaggagagatgattgcatggctcttgaatattagatggctaaaggaaaacagctaatttctagaagtagtgtttagggaagagaatagaacaaattgtagcataaagtgtagcataaactgtcaggtgttttgcatatgtattgtgatactaatggagacaataatataaactggctagaaagagaatgcattgagattccatgaatacccctatttgcatgacttttttattagaataacatctaatcctgcttggcagctgaaagatataattagtgtgctaacgagtaaaacgtctacagagtagagaatgatctcaaaggttggtggaagatgttctgggaagacatgtttttgctgttgttgctttatttgttattaagttatggcttgcattcatacactggtgaagtggacactaagcaacaagtataaccgatactccttgtcatgctggagggtccctgtcttaaggagctttttggtttccaggaacgaagacccaaactaactcaattaagtcaggatattgggaacatacaagaggacaaaagaaatgtcacagatacaaaagccagagtagggtcaacactcacacatccaggagaataaactgaaagctgggtcttactccaagacttctctggagagctcagcagtatgtctttgctgcagtgctccacaattgacagggcacttactcttccacacatgcctctctggtttctcttcctaggaactgtcttattcaccctctaatctgtgagtcttttctccatcttgaagtatatgctcatttataactatagctcatgcacagtttacctcactcataacttggtccagcctatctccatctcgctccctttcactttcttttcccactgataactccattctggaatatcccacttagattgtctaagacagatagtctgattggcttagatcatctttcatgcatgggtcaccgactagctcatacattgactgccctgggtcaggtgcccattcttttccaaccagttgtgtccggagagatggggacacatggtactaaatgtgactacccagggctcttccttcagtagggaatggagaaggggccactttcctttggagcatctgcaggtcagccaggcagtgtgattgacatctctagttaaacaactaaatcaggggaactcagtcagaagacatgcagtagatagcttcattatctggtttggagatcttcagtgagtcagtaaatttataattgtttcatatttactttatataatatgattatagcctatatttcttttaatttgtaagtaaatgttagtaattatgagagayacttttcaggtacactggagttctgatgcaattagcttcttgagacaaaacaactccaacagatagaaacacctaggaactcaccatcttccctcccataaaataagctccctttagaatccatgaatcatgactgtccaatccatttttaatagcttctgtcagagacatttcaaaataaagggcagttattatttattgtttgtaatgaaacctactcagcccagagggacattatgaggatcactgtcagattttgtaaaatgcctttggcttttcaayggaaaggtactatatatgataataaaaggaatagcaataatattcttgcaccatcttgacactgagttcatctttgtcttaaaaaataagttcatctttagacattatggggattactgaattcaatttgtcctaagaatgctatggctggtgaaaaaaaagatgcttattataaaagcgctttctccattccctgttctgttctatatgtgttgtgttgttcttaacttttgtgtatatgggagagttgactatctcttgtaaatgcacaataaagtaaaggcaaaaactgccacggcaaaaaatggtgcttttgccattacttttgcactaacctaataattgaaatttgaactctataaaaattttaggatggcatagaaagaaatttctcaagtgaaactttgaaaatgtttcccagactcacatgcatgcactcatatgctcaggcagttctatgcacacatattagaaagagagmcaaaaataagaaaaggagatgtgaagtgagaattttaagaaaaacattatattcatacctatatatggattgtgtttatattgccttacaaagcacttctgtacatgttatttcatttgattctcactagaaaccttggagttaggtgggaagatgaggattgtctagctcttttgccctgggcactgtaaaattcaaaggcagattttccagagaacagggctggggatgggagagcagatgtgtccaccgtttcatgcaggacacaaagggaaagactctgtggaagcccagaaagctagtgaacccagacattgttctctatcatgtcttaatgtagatttccaactgtttttcctttaaccttgccaatacctatgttaaggtgaggagaaggatgcattgtgagacagacagagttgaaggggttagatcacttggattattcatttcttgtcaattttcaggaagcaacagagaccaagagacttagtgcaagccacagagctaaaagtaatgataaagtaactatatatgatatgaggaggccaggaacaagagatctttccaaatctgagcctcatgcaggggttgctgtgatcagttctctatgactttaagtctgactcacatatttgatatgcagttaattctctataaacaaacaagctgtttgatatgctttggctgtgtccccactctgatttcatcttgaattgaagctcccacaattcccaggtgtcatgggagggacccggtgggaggtaactgaatcatgggagcaggtctttcctgtactgttttcatgatagtgaataagtctcacaagatctaacggttttataaaggggagttttcctgcacaagttctctcttgtctgccaccatgtaagatgtgcctttcaccttcggccatgattgtgaggcctctccagccaagtggaacggtaagtccattaaatctctttgtctttataaattacccagtctcagggatgtctttatcagcagtgtgaaaatgaactaatacactgttttgaccaaaccacrgcaaagaattaagtaactgcccccagagaagttgcccaaggcttgcctctgcaggtacccctaccatcaactcctgcctcttgtgaatgatsacactgctctagtttttttttttaatttccgcttttcaaaaattccaggctgtctcaaatgaggcaacctagcaactttctccctatagaaaacttcaccttgtcattctgccacttctaaatctaatccagaattgcttttctggtttttacaactcttcattggtttgctcctccctccttttccaaattcatttctccttatcttcatcagtctgccaccttcaacaccaccccgtcactctacttcttggcttttcaggcagttactgtttgaaggagaagattgaaaatatcatttctcacttttgagaactcttacaggaacatattgcaaagcctccctcacacctgagagagaggaagagagagagagcgtgacacctcacaaagaatgtctaaagtgggagtagccctaaaatagagcacaataataaactgatggggctgtgctttcttaaaaaaaaacaaaaaaaaacaaaaaacaaaaaccaaagcaaaaaaaaaaaaacaacaaaaaaacaaagcaaaaactcacaatagaactttccctccataaatgagctattatcaaagtacaaaatattcaattctagaaaaattgcataaattgctaaattctctttaaaataaataaataaataaataaaaaaccatgccattcaaaccactgcaacaaaccacaagggaaaaaaggctacaaagacaaagccccattctcacttggtaccagtgctaccctggtatatgttacaccactgagaagacttgtcaattcaaacatctgttctaaggcacacttcactatcagaactagtactccattcatattccttccttccacaggcttgacagatggatgaattcctaatggccccagattacattcaaatagttgcaataaccacctcctccttagtgaacactgctttcccccaggcaataaaacaaagataatggtagaggggtataaaataacataaattgggaatctaggctcaaaatccaacattttccctgccggcaggaacaccagacggtggtgtcttgatcctgccatgcacatattccatgagtgacaacaggcaatgagatgtgaaggaaaagagaaagatgtgcccaccaggtccctcccaaagggcagccaagtgttttgtttgaactgccttgtggcttattggagtcagaactgcatgttccgtagaaaactgtctaccaccaagttaggatctttactgattatcaccaaaggtcttttgtcttcagaatgcaatgaaaaataactcccataaaggaaggtggtataaggtgggaaatgcaggctactatgtcagagtcatgtggayagatgtgttctgctagcaggcttccattttactctataacagaaaagaaagataaaatttccaggaaaaagaaatgaaagcygctgccagtgaaaagaatttctaccaccaagtcaagtaggctggggtctccacttacagatggtgattaccatagactatggattaaatcatgtctgcatatccacaccagaagtctctacaactctatttgatcttccccctcatggtcttctcttttcttttcttttttgagatggagtctcactctgttgcccaggctggactgcagtggcgcgatcttggctcactgcaacctccgcctcctgggttcaagcaattctcctgcctcagcctcccgagtagctgggactacaggcgcacaccgccacacttggcttatttttttttttgtattttactagagatggggtttcaccatgttgcccaggctggtcacaaactcctgacctcatgatttgcctgccttacctcccaaagtgctgggattacaggccatggtcttttcttatactatagtcttccaattttgatttttgctctaagttggcataagattcacatttctaaggatgtcaggttgtaagtacaaaaatgaatttcattctaatttgtttttgtgtatgaaagttaatgtagaatgaggatgtatacatgattaaaagaggctgtgaagaatatcttatagtgaagaatttgcttcctgtagttttgtggcctctggtgttgtaatagagggtaatccatttatatattttcattaaaatttattcaagaccttgtcatgtttcttttcataatgtgccaatattcttgtcctatccactatcaaaatgaacttaaatcatttattttttaaaaggttgcatgctattgagtttacatgttttctattggtatatttgtcctctgcaccctcttttcccctcttgtcaactgctattcctattcacatttggctttgctttacattttccccaattctaacttcccatttgctttctttccgctctcatttccttgctaactctctggagagaatgaaattctattgttgttattgttattttcttttttcttctaaagattggagagtagagctgaaatatttgcgaaatgagyagttccataaatatcaagaagtgagtaataagtggaaactgttcttggaatgctaactcctaggatgtggtctatttttagtagaccacataataaatgggtggagaccaacaatccaagtgccttgaatattgagggtgagctgaaatcaaatcaggtttctttatggtaattgattataaagtaatttcgtccacaatgacaacgaattgataagtcaatttgagaaatatgttattaactcatttttataattaagaagctcttaacagatttctgtaaatgctacaaaaataaaactccaaaaacgaacatagttaattttgttgataagatatagctctcatttaaaaaaawttttttttttttttgagacggagtccagctctgttgcccaggctggagtacagtggtgtgctcttggctcactgcagcctccatctcctgggttcaagggaatctcctgcctcagtctcccaagtagctgggattacaggcgcccgccaccacacctggctaatttttttgtatttttagtagacacggggtttcaccatgttggccaggctagtctcgaactcctgacctcaagtgagctgcccgtcttggcctcccaaagtgctgggattacaggagtgagccactgcacccgccctcatttttaaatttttttttaaaaaaggtaaaattggcctcttagctaagtgattatttctcttgcagtgtgaaaggacaagaaagctcttctggcacaggacttagctgctgctgacctcctttatgttatcagtggacaaaaaggctggttaaaacctgctttgatgccaggcgtggtgacttacacctataatcccagcacttgggaggctgaggcaggcagatcacttgaggtcaggagtttgaggccagcttggccaacatggtgaaaccccatctctactaaacatacaaaaattagccaggcatggtggtgggtgcctgtaatcccagctactcaggaggctgagagaggagaattgcttgaacctgggaggcggaagttgcagtgagccaagatggctccactgcactccatcctgggtgacacagcaagactccatctcaaaaaaacaaaaaacaaaaaacaaaaaaacaaaaaaaaaccaccaaaaaaacaaaaccaaaaccaaaaaccaaaaacaaacaaacaaaaaaacctgatttcatatagtttcctggtgattttttgttttgtttaccgctgagatttaaaatggttgcttaccttaagagaaagagagtatgcttgtaaaatttaagtgcaggaccaaagcatggagcaggaccaagggagcagagggtgagcacgcaggagaccacagctactctctgctgtgttataggagagggtagagccagctggcagacagcaggctggaagccagcagttagaagcagcagctgtgggtgacctcagctgggagaaatgagaaggatcccttgagtggagagatgtgacgacaatgctcataaaaccattgttgcttttactgaaagagcagaggtcagatgtcttcagacattagaggacagacaagtcaggtgagctgcttaaaaattcaaattccttgtcctacttgagtcttggggctcraaaatctttatgttaaaccatcaacacagatgactctgatccagctcttccaggaaccacactttaaaaatccctggactaagatgcagcatctgtgaaaataaaacacaaagatttatgacaattttgcaggtgatagggctacatatttctacttagggatatgcctttgtttaaccctttttaaaagtctcacctactcatgatattaaattacttcagggttatttaattaagtaagacacttccattttccgatattctgacttcttgtcagacagtgtgtccccatttggagtgttctaaatataatcctcattttagaagaaattatgctctttgctgttacagcagttgtttatatttgttgctatttcattctttaaaaataaaaccatatggagatacatgcacaattcctgcttctctcagttacctacccagaaataaagtaattctagctataattgagtctaagctatgccaagcctgtctggtatccactgtttgaaatgtctgcacagagccttgaaggaattcattgttcttcraagtgccagctgtacatactgccatttcctgcatggcttctgccactcaggaatgctgcaccctggtggttctttagtggtgtcttttttctccattgcttcattgtgggacccacagtgtctgtctgaagatactgcaccacagctcaagagcaccatcttgggatgcacatttttgcaacagatagaggatttgagtggcatagaattccataactgctagaggcaagtgcagtaaacctagaacaaaaaaattaaaagaaagaaagaaaaggggcaatggggcagttactttaaccatgtgcattagcttggcaatacctcttagattttttcttggtaggagatgcagactttatccaagaaagacagtgctactgccttccacaaaatttatattttgctrtttttgtctgcaggtcaaggtcacagtcagctttgaaagaatcagctataaatctaataagggcaaagaaacttagagggctttatggaaaagtaagttcttttcagatagcctgcaaaaatgtgctggccttaaatcaccccattgtaatatttgagatatgcaagaaaatcattgaactttgggaccattttcagaaaaacaaaaatataaaagtacttttattttcaaatctctaaagtgaatcatcagtaaattatcacataatctaaaggtttgacaaactgggtcattgcaccttggatatatgtgttagaaattctgtgatggagtctcatttggcctttggtgtttccaggctagggttttcagcactgatgtcttatgctggatctccctcagctgcccacacaccccatggaaatgggacagatgatgcagttggtggatgggggaaagaaaagtgagactaataagagggaccagactgggaaagaattcatgtttttcctcatggtaattagagagcttgatgtatacgcaaattcatatacatttctttaggttgccatagacactgatgccaatattccctttcatcctcaaattctctccctgagcayaggcaggctctataacaatgtcaatgccaatctgtgtgtggaacaccaactaggaaaaaaagttggatggcattaatttcacatgtgaagtggtctgaacaatgcaactaggagttaagaaaatgccaataacagccaggcgcrgtggctcacacccagtagtttgggaggccaagatggatggattgcctgacgtcagcagttmgagaccagcctggccaacatggtgaaaccccatctctactacaaatacaaaaattagccagctgtggcacacacctgtaatcccagctacttgggaggctgaggcaagagaatcgcttgagcctgggaggctgaagttgcagtgagccaagatcgtgccactgcactccagcatgggcgacagagcaagacaccatctcaaaaaaaaaaaaaagaaaatgccagtaccatctctcagcctccatggtgtctaggstgttgtggaagaatgagcagcctctcttccagaagcttgaggggaactgaactcctgggggacaggcaggagattaaatttaaggcaagaagtttgaggatgtaaggaaattaattagatatcagttagggtaatgctagacaaatgctaacgaataagccytcacatttcagtggttgtcgtcacccccaggttaagagtccattgcaggtgttcttcgttggctgcagcttttctccatggaatagttcagacatccaagctccttccatcttgtggctctgtcttcccctaaagctacagactccttcctattcagataggggaagagagtagagaaaacaatcatgcttttaaaaaaccccatctgggaggtgacataaatctctttctcatttcattgatgaaaactagtcacatggcataatctggatgcaggaagggctggaagatgcggttcctggctgggcrgccaaattcaactgacatctctacactgtgaaaggggatgctgaattttaggggacagctagccatctctgccatgtaaagttttgataaggcataatggacaagactaagaaggaaaccagcagaagaaayggaacattacgggaactggacaagacagttaactaaaaggaattgcatttgtctggtatcctggcrtaacaaagatgagatggatgactgaattaattatctttgaaatttgggggtaaggtagtctaagaattcaggcatgatgagattaggaggctttgctcagtgctcaaatcggatataatcaagaaccaggccaagcatggtgactcacgcctgtaatcccagcactttgggagcctgaggtgggtggatcacctgagggcaggagttcgagaccagcctggccaacatggcaaaaccccatccctactaaaaacacaaaaattagctgggcrtggcgrtgtgtacctgtagtcctagctactcaggaggctgaggtacgagaatcccttgaatccaggaggcggaggttgcagtgagcctagatcacgccactgcactccagcctgggtgacagagcaagacactgtctcaaaaacaaaacaaaacaaacaaacaaacaaacaaaagcaagaaccagttctggggtctccaaccaaaaaaaattctttccaagttattggaggacaaggtgagatgttttctagttgttcatgtcccagagaaatttgctgtttctctagctggaacacctgggcttttgctggtagaaccacagataactctagaggagaggtgtccactatgtctgcaatgagggaaatgtcctatatctttactgctcaatacagtagccactggcmacatgtggctattgagcactygagatgaggctaatgtgtctaaggaaattttaagaaatttacatttacaattaaataagtacaggtggccagtgcctaccattttagacagctcacctctagagggatgtaatgggcacctcttgcrtcatctgcccaggcccccctttctctgcaaactgacccttctcctacaagcttcctcaggtagctccgcacagccaggttcataacgtttttccttttcaccagccatggttgcctaaccctggggtgatcactataccaacactttagccagtcagagcctcttcacagatgctgggggaataacagagcagtcagtctcctccgcaggtggatacagaagctgttggtagccatgttttctgcagaagcagaggatgccaatctgcaaaaagagatgaatgaagcaggcatgaagacaacagtgaggtgagagagaaagccagaatcctggytgctgttctagcccctgattccaaactatttctaaaacagggctgcagctgaccctcagggcatgatggcttgtgcctgtagccctagctacttgggaggctaaagcaggaggatctgttgagcccaggagtttgaggctgcaataagccataattgtaccactgctctccagtgtgggtgacagagtgagaccctgtctctaaaattaaaacaaaaacaaaaacacattaagtcagtttggaatgtctgactgccatctctacctatcaaaattctacgaatatttcaaggcccatttcaaaggccatctccttctctatcctatttttcyttctattttagtttttgactagtttgagcacatggccttcattgttttataattgtttatagatggtttgtaggtgcaatactccaaaaccttctccagacacaattttttattaatgcagtctaaaatggcattcaattttctggtagctacttcatattttcatccatattgagttttgtggtcaattaagaccctcaatgtcatctcactggcatgagatggtatctcattgtggttttgatttgcatttctctaatgaccactgatratgagctttttttcatatgtttgttgatcatataaatgtcttctcttgggaagtgtctgttcacatcctttgcccacttttttatggggttattttttttcttataaatttgtttaagttccttgtagattctggatattagatctttrttagatggatagattgcaaaaatttcctcccattctgtaggctgcctgttcactctgatgatagtttcttttgctgtgcgaagctttttagtttaattagatcccatttgtcaattttggcttttgtcaccattgcttttcgtgttttagtcatgaagtatttgcccatgcctatgtcctgaatggtattgtctaggttttcttctagggtttttatgattttaggttttatgtttaagtctttaatccatcttgagttaatttttgtatacagtttaaggaaggggtccagtttgttttctgcatatggctagccagttttcccagcaccatttattaaatagggaatcctttccccatttcttgtttttgtcaggtttgtcaaagatcagacagttgtaggtgtgtggtgttatttctgaggcctctgttctgttccattggtctatatatctctttgggtaccagtaccatgctgttttggttactgtagccttgcagtatagtttgaagtcaggtagtatgatgtctccagctttattctttttacttaggattgtcttggctatatggctcttttttggtttcatatgaaatttaaagtagttttttctaattctgtgaagaaagtcaatggtagcttgatgggaatagcattgaatctataaattactttgggcagtatggtcattttcacaatagtgattcttcctatctgtgagcatggaatttttgtctgtttgtactgttcttgtaatagggaaaaagtctcatgagatctgatggttttataaagggcagttcccctgcacatactgtcttgcctgccaccatgttaagacatgcctttgctcctccttygccttcyrccatgattgtgagtcctttccagccatgtggaactgagtccattaaaaatctttttctttataaattaccaagtcttgggtatgtatttattagcagcatgagaataaattaatatgctattgaatcataaatactgatccaacaaactattttcagcacctctgatatgtgatcactttgctgtagctgacaccagctacatctccaaaccytcttggcttctgttgacaccatgcttccctgtggcctcctcctactccagttccacagtttcctctccagcaggcacttcttcacctcctcttataaacactgctattccttgcagttctgttctgggcctcttgtcttcccacttcacacattcttccccagtggtctcatccacatacctttgattggttttccactatttgctactgactcccagctcttatatccagttaattactcacaactcaaaacccttcaaagttctcttggaaccttgagatcagtttcctttggaacccagttatgcctttaatcttcagcctgccacctccgtgttyttcctgaactagacctctggctcaaaaatgaccactgctatggtttgaagtttctcccctaaccctcctaattcatatgttgaaatcttaacccctaaggtgatggtatcaggaggtggggccattgggaggtgattaggttatgagagtgaagcccccattaatgggatcagtgctcttataaagggtattccagagagcctcctctccgttttgaccatgtgaggacacagagagaagagggctgtctatgaaccaggaacaggtcctcaccagacactgaatctgctggtgccttcattttggactgcctagccttcaaaactgtgagaaaaaatttctgttctttataagctattcagtttatggcattttgttacagtagcgcaaacagactaaaacaaccattgagcatctaagtcatccccgtaattgctgtattcaatcctattatattaccagggctttaaaaattgtttatcgtgacccattactagtcctagaattaattttgtgggtcacagctgattttttaaagaatagaacaggccagacgtggtggctcacgcctgtaatcccagcactttgggaggccaaggcaggtggatcacgaggtcaggagatcgagaccatcctggctaacacagtgaaaccccatctctactaaaaatacaaaaaagcygggygtggtgacgggcgcctgtagtcccagctgcttgggaggctgaggcaggagaatggtgtgaacccgggaggtggagcttgcagtgagctgagatcaggacactgcatgccagcctgggtgacagagcaagactctgtctcaaaaaaaaaaaaaaaaaaagaatagaacaaagaagagaatggaatggaacagaaatagcagaatgcttgcctccatagtaagtattgttttaagattttttagtgtgtgtgcattaagttataataaacattttatttttttattgcagctcatagacaaacatttagtacccactggattagaccactgtgtcttccagagcatcctgaatcaacttataataaaaacaatttggaaactaaattttctgggttcagtcacaggttctggtgcttactagctgtgttttattgggcaaattamttaacctctctatttctcaattttctcatctgcaaaatggatttaaaaattgtatatcatcatgggcctatagtgaagattaaatgaattaatacagttcttgcctgacatggatgaatgctttctaagtatcatctactcttaaacaataaaatatctaaatacwctattaaagatatcaaaatcacgaaagcacatgagagatactgaaacataaacatattgtatgtaatatgaaaacagaagaattcatcagattgctttacctaaaacaatcacactttgaaagactttacattcattcagtgccctttcttggcttggcaatcttcttcaccattttaaggatttttcaatcttttgaggaaattttgacttgatttttataggtctaataaatgattatcagatttggattttatttatatcctgtgggcatggaagttttgtatgcatcatccatgaccccttcttccttcttaccctgatattagtaagagatatacttctgttctacacatctccatgcttctggaaagggactgtatccatcacctaagccaatgcttctagatttttttgtgatgtgacgaattaaaaaaaaaaaacagtgcttgtatagcctgtaggataaaaggaagaggccactctgcttggagatgactggygagatgcgacagtggctttggggcaagaaaaaatggcagccctaaggcctgaagggatcaatatctctacatgtgtaacccattctcagcgtaagatggaaacctctggactctaaaccaagaagtgcatgtctttcccactgccacaattaccagttcagcgtgggcctatgntcaagcctggccaaggaaactgacaagaagaacttagaccccatcgtatcttcstctgtcttactagatgagaagaaggacgaccattgccctaattgacaccaaccttaggatgacactaactctgtggatggtagaaaatgtcatctaaggaacctggctctgacaaaactgcagagctgctgcatcagccaaccctgaagcctaccctattctagattccctgttaaggagataataaatgtcttcattgcttaagccattttgaattatcatttcagttacatttagcccaaagcatcttagctaattcaatggcttgttctactttatagatttttcaacactgcaattcacagaattatactgtactatgaaatataaagtattacacgcaactttgataattggtgtttatggaccacagagcacagataatcacaagtgtttaaatttggggttttagtttcttctcagacccccattaacccttccttggcaaaggttactgctaactagaggttttttgccccatctatacctcatttagattcttcagctttttggtggaatcaaaaagcacttccctaaatctgggtaatttcaacatgtaagctgctggaagccacaatgacacctacctgtgtaactgctttttttggtagttcatagggaactctggcacyggaattttatatttactataaaaagatttaagttcataaaaccagtaactgtggacatgtgtattagtccattttcatactgctataaagaactgctcaagactgggtaatgtataaatgaaagaggtttagttaaccccacagttcagcatgactggggaggcctcaggaaacttacaatcatggtagaagacaaaggggaagcaaggcaccttcttcacaaggcagcaggaaggagaagtgctgagcaaaatggagaacagccccttataaaaccatcatatctcatgagaattcactgtatcacgagaatggcatgggggaaccacccccatgattcaattacctccacctggtctctcccttgacaggtggggattatggggattataattcaagatgaggtttgggtggggacacaaagcctaaccatatcaacatgtgagccccagtaccctcaaaatggcccataattaattgtgctggctttcatggtatggtcatcttgaatgtgtcaaatctctacaactgccacaactaggaaaaggccagggcaagcaccatgggagcttttttgtatgttggccattggtctcccagctcttcttcaggctgctacctggcatcatcctccaaatgtattggcacccatggagcagacggcctggaaactcacaaaaaccccctacgtggccagcacttcaaagcccctcctaactgacagaggatgaacaatggattccagctcctgcttgtgtctcagcaggtgagtgtatgccaaaggagaggagtggacctagtttacacagccctaaacagtggttgggacagtaacaaagcagttctgaagagcccaaccacacagctgcccctacatttttaggcagctttggatgacaaatggtagcaaactcacatcttcggccttgcaatcactgtacaggaactccctccttcttctctgccactggaattcatctagaagaagcacatctagctatgagtaggggtcactggattggctagcctattcttacaaactcccagactgctttttgtttgtgtgtctaatattagaaatattaaggagctgaagggccttggctgctctgacccctggacttcccttatgcattaagagcctccactcctatctcagctgtttgaatttagcatccacagagcaccttcccctggggaaggatgactgagatggcacaggttctggggtccccttcatgagaacctctgcattttcatcacttgaagatacatggaggccaatcctctacctatcccaaggccagttccaagttcttgtctccagggcgtgtgatgcttctttgaggaaaacttaacatacatatttgtttcaaccagggaatgcccttttgcagttaatggcagtttcactccctagagaggaagacagcatttggacttgatgcccttcatttggaaaaaatgttacgaaattatttataaaaataaagcaagtaaccatccattgttctcagagattagtctgagttcacttaaatctacgacagatgctaaagcctaggattttaaggactatggagaaaaataaacattgattaaatggagatttagatccttccctaaaaaaaaaatcagaagaaaagattttcaatagaagaaaacttaggtggtggccctgttatgaaattatttattattgaagatctagattttgagaattatactatcatttacagcactgcttttctaggccataatgtccttggttatctatatggagcaaataatctgtgtgcagttaaaagaagtagactatatatattcttggatgtaaattgagaagacagcacttgttctgggcagagcatgtggctgatgccagggcctctccttatctggcaccttgaagactccttgatgggaacagcaacagcagcagcaaatgggctgcttcagcagaccatcagatttcctcataatgtaactatggtccttttagacaaagcacctcagaattcttaaatgtatcacagtggagatcctgaagagatcaaagaatagatggaatgggagtctcttaaaaagaaatatgacttggctgggcacggtggctcacacctgtaatcccagcactttgggaggccaaggcaggtggatcacgaggtcaggagttcaagaccagcctggccaacatggtgaaaccccatctctactaaaaatagaaaaattagctgggtgtggtggcgagcgcctgtaatcccagctactcgggaggctgaagcaggagaatcgcttgaacctgggaggcagaggttgcagcaagctgagattgtgccactgcactccagcctgggcgacagagtgagactctgtctcaaaaaaaaaaaaaaaaaaaaagaaatatgactttacttcatcctctagcctgtgaattgaaatattcatattataagcaagtgtaatggatatatacttgtttaattgatgtataatttatgtacaacatgctgcattgcacatattaaaaataaacaatttgatgttttgacctgcatatacacttatgaaatcatccacacagtcatgataatgaatatatccgtaaattccaaaaatttccccttgcctctttgtaatccttccctttctgctcctcccactgctcctcccatctccaagcaaccactgatgtgctatcactatagtttgcattttctagaatttaatataaatgaaattatacagtatgtatttatttttgtctagcttcttttactaagcacaatagaaaatcatctatgttgcttcatatatcaatagttcattttttaatgcagaatggtatcacattgcatggctatatcacaatttgtttagccattcacctgttaatggacaggttgttggatttttcaagwattttgctattataaattaagcccctatgtacattcatgtacaaatctttatatgtttgtatcctcttatttctcttaaataaatacttaggtgtggaatggctggatcacaagatagatgtatgtttaactttaaaaaaaattagagacagggtcttgctagattgccctggctggcctcaaactcctgggctcaagcgatcctcccatctaaggctcccaaaaagctaagactataggtacatgccactgtgcctggttgacgaattttttttttttttttttgagacatagtctcactcttgtcatccaggctcaagtgcagtggcgccatcttgtctcactacaacctccatctcccaggttcaagcgattctcctgcctcagcctcccgagtcactgggattacaggcgcccaccaccacgcccagctaatttttttgtatttttagtaaagatggggtttcaccatgttggccaggctggccaactcctgacctcaagtgatacgcccaccctggcctcccaaagtgctgggattacaggcttgagccactgcgccctgccaaatgtttaacttttaaaagaaactgtcaaattgttttccatagtggttgtgccattttacattctcaacagtggtgtataagagctcaaattgccccacatctttgttaacacttgaggtgatcagtctttctaactgtggccattttaacaggtgtatagtggcatctcattgtggttttgatgtgcatttccctagtgattgaggttgagtactttttaaagaacctgacatctgcaaatcttctttggtgaagtgtcttttcaaatcttttgccaatttgtagtgtacatatatatacaatattctttcataaaaacatatatttttggctacctcatactagatcaatatgatgaggcagattactacctaagaagtcaccaacttcttattcccacagctgctaaatacactttacaagtagaaaatytgtaaagtctcagcccattcatggagtagaacatagagttctattctatgtttggaacacagagttccaaaagtttccmctgtctcaggaagcatatacacagtgtggaatttagatggccttggggcagagggtgggaaaagtcaactgtgagttgagcatagatcctaggaccagtgtgtacaagtggcatccaaagataactgaaaataaaggaggttagaaggtcaactgctgggccgggtgcagtggctcacgcctgtaatctcagcactttgggaggccaaggtgggtgaatcacgaggtcaggagttcgagaccagtctggccaacatggtgaaacctcatctctactaaaaatacaaaaaattagctgagcatggtggtggacgcctgtaatcccagttacttgggaggctgaggctrgagaatcgctttaacccaggaggcgtagcttgcaatgagccgagatcgcaacactgcactccagctggggcaacagtgcaagactccatctcaaaaaaaaaaaaaaaagtcaactgttgtttttaagtggctctgggataaagggcaatattagggtcttttttacttgcctttgttctcctctttgctaacatgactcacaggcagatgccacccccatcatctgctgcactgcacagtggcagcaacaggcacatgagacaactgggccccaacaaattcactggatgttaatcccaggcctctcttgagaatgccaatcttaagagggttcacagaggcctaaaattaaacagactggacacagagtgggagggtggtactgctgggagtaagtggctatgattcagtaggcatggtactgcccagtgtggctaacagagtatttcaaagttggctgcaataatcctttcaatccacgatgcttttctgaaatgtcaccttgacattggagtagtgggctctatgtccccccatcttaaaattgggtgcacctttgtgaatgcttcatccaagaagggccgtaaagttatgcgacttctgaggcaagatcataaaaatgccatcttcttcaactctattggtacatccattcttagaacccatctaaccattctgtgagaaacactaaggaaccacatggggagtcttgaagtgtattcccacaaatcacttatttacaaaggggaaaatgaaaactacacagtggagaaacctggtagacaccaccttgacctagttatcaaagttaacaagaccaatagataaggaaaatagattaatgcatctcctgtcatggtcactaaggacacaacatcactcctatggtatttctgcagacatcacagctaagtgtaatatatgattctggattggatctgaaattagcagaaaaattagctgtaaaaaactattgggatagtttgcaggaattttaatacaaaccctgaattagataagttttatatagatttcctaattttgatgactttatctgattatgtaagggaatgtcttagttcttaggaaatacacactgaaatgtttccaacctacttttaagtggtttagaaaaaaaaaaaaaaagtgtgtgtgaacaattggcgaatctggggaaatggtatacagaagtttctcatactatttttgcaattattctgaaagtttaaaattatataaaaattgaaagctctccctaaccctctaaaagaaggtaaggacttaagcgttcatggaatagggctggtttggacatgggcaatacttgtttccctggatccagcaacgctcataggctggctgtgttttagaaaataacagatgatcctcagggaatgggaatgaactacagagggatgtcattgctatttagacaggggtttggaccagcaagggtctccctacagcagagggtggccagtctgtgcaagctcttccttctgtgacaccttgtggcaatgaagagctattgcggacctcagtgccatctgttcaccaggactgacctgcttttaattccatcatctcctagagttctttgacaatttgagagtaaagatgtttaggaagagacacaatgctttcagttaatatggcatgtgaaacttcaaactagaaatgggaaaaataagagatgtaacagtgtttgtgtctttagtttataaagtaatgccaatcatatttctgtagctttatatgctacggtacaacaattgtgtcaaaaactatacaagtactaagagataatgacaaaagtatgactgaacagttctctcaaatgggaaaagtgcaactgcaaagcaaagttatgtaatagtgtctttgcacattaatgtgttcttgaaaagctgagtaaactgaacttttataactgcaaccatattttcactgcaccttgagaatttgaaataatattataggatgaaattttgaaatgtgaagccatagaaactttttacttatctaaatattcagtctctgaaaaaaatcatgttttgctaaagtgcagtattcctacaaagttagatatttacatagttagaagcgagtgataaatcatgtacttaagagcttacatgtttaaaattgtggaccacataataggcaattagtttgtataactattaaaattatttactgataagaagggtgaatttttgtattttattttgaatttgcattatgtattaataaaagctgtttggcttataaataagagagattcatataaactagttcaagcaaaaaatgggaatttattgacccatataactggggagtttagaggcagtgctagctttcaggcatggctcaatccaggggctccagtgttttctttctagctagctaactagctagctctccctctgctatcatctatatctctttacttccctctgtatttttctcagttcctctttgtacaaacgggcttctccttaaggtcagggaagacagccaaaagcaaataaaataagtttctccagtttgctctatcagcaatgtctggggaaaatattctggcccaatctggatcacaagcacatcctggaatgggaggatggaggctatgtgctttacaaccctaccaggatcctggccctggatgggtggcagagcaggatgttaggagttatagttcacccaaagaaccagaagatgaaaaaaaaaaaaaaaaggtagtaaacagacaaaaactataattaccactgtcccctatgcttcattaatgtwcacttttataattctaatggacatatagacaactatgtatcaaaagctttttaagctaaatattggaccaatgcatgaagacgtattttaacagatttaaagaaagcactatttgtaagagccaaaaatttttttaatctaatagggtttagttaaatcttaatttattcatgaaatgtttttgcatgtatttatacagaaatgtattattgagaggggaaaggcaaatttaatacattatgtgtttataagacagcatttaaacagtaaatcccaatttttgttttacaacatatatcctcacctgcttacatagacttacgtgtatttcttttttgtttgtttgtttgttttgagayggagtttcactcttgttacccaggctggagtgcaatggtgtgatctcggctcactgcaacctccgttttccgggttcaagtgattctcctgcctcagtctcccaagtaactgggattacaggcaggtgccaccatgcccggctaatttttttatttttagtacagatggggtttcactatgttgatgaggctggtctcgaactcctgacctcatgtgatccgcccgccttagcctctcaaagtgctgggattacgggcatgagacactgtgcccggccaatttatgtgtatttcaaaagtaaggaagcatgtgcgacaaaatgatattaagggctgggaagagagatgcatgataaatttttttcctttttgtctgtattttcttattttctattaaatgacatataaaacaaaaatcaaattctatacaactcaaagttttatgcattcaaccctagttacaaatactaatccattcctggccaagtgcgttggctcacgcctgtaatcccagcactctgggaggccgaggcgggcagatcacctgaggtcaggagcttgggaccagcctgggcaacatggtaaaaccctgtctctactaaaaatacaaaaattagctgggtgtggtggtgcatgcctgtagtcccagctacccagaggctgaggcaagagaattgtttgaacccaggaggcagatgttgcagtgagctgagaccatgccactgcactccaacctgggtgacagagcaaaactccatctcaaaaaataataaataaataaataaaaaataaaaataaacaaatactaatccattccaaactatcatggtgcctagtggcaaaaggcagaagtcaggccccactaacttacccagttaacatgagctaaatgattcaatttataagaaaactttaggtaaaaatcwaagtgtgctacactgacgtgcagaaaatgtttggataccaagcattagtcaagtttagatactatgcattagtcagtaagtggatcttggctcatctatatcagaatcactttgagaagcttgttaaaatgcagactccccgcgtctcagtccagaacttccaattcagaaataatagaaggtaggccaaggaactggcattttcaatcaattcccaggggatttttatatacaatgaagcatgaaaactcctgtttcagaaatgataaggtagaaacagtataaaagggaagtgatcagtctgccaagagagacttccctacatcatttatgttacaatcattattaatagcacagttcttttgtataacattttgactatgaacattaatcagaaaagtataaagttgtcattaaacattcaaaaaacagagtaattttattacatgtagggctcaacattttttttcccagtaaaatttttagcgattaaaattcataaaattcacaaaattcttactacagaaaccatcctaggatctcatctatgttgttaacaaaataatcttgaaagtatagatagttcttggaaaaaaaaaaaaaagaaaaggcatgtaaggagggaggaaagaaagaaaaactcatcagaattttgctgggcaccgaaaaagaacttagggaaaatacttctaaagtcataaaattccatcaagggtagtctctaaatgatttaaaatataattttaatataccaaattttaatttacaaattaacttatggggaatctacaattttagggaatacctattatcctaaaattttaagataataaaatgaagaaataaaagtaaaattatccaattaaccttgcttcaaccctctacctagccaatgtgcatttgcaagtatattgtaatggaaagccgtgagtagtaataaaggaaacaattaaatggaaaatttttgtttaatagagtaaaatgagttaagctaaattctggtttattataaacatactgaataattttctattgggaagagcaaaaatctttattgcctgctataagtacttttgaagtacttggaaatatattgtaaaggaaaactcagcaaaatacaaaaattaagtgaccttttcagttatttccttctttagtttctatagtgtaatagttgaaagaaactttttaagatgggagagctgcagtgtaccagattgcagttatgcagccctcagcttattcttaagtgacatagtactgatccttttactatggttgcattagtcagggttctccagagaaacaggaccactatcaatctgatggagttttccaattaaactatccaaaacatatgtaaaatttcctaggaattttctgttttccacctatgatcagaaagaatctaggagtcatcctaatttgaatatttcattcatccaaattaggatgactcctagattctgtgggtttatagtataaaaaaattctcattgcttacaatgctttggcattacagttgacccttgaacaaaacaggtttgaaccatgtgggattccatttcaaccaaatgcagcattccccggatgtaaaacccatgtatatggagggccagctttttttacactcgggttccacaggatcaacagtgggacttgagtatgcatggattttgatatatgcagcaggttctagaaccaagccttcatgtttactgagggagggatgactaccttttgtcatgaactgtaaagcatttaaacttttacccttcttgtaagctaataaattaatctgctggtttcatggatgctggcagaagtcacaaaaatcctagttaggagacaaagtactttattgcttatagcacagaaagcagcatgagcatcagcatatttgtcagttcctcttgcccccaactcccacagggaatatgtaatggacccaaatgccacctgcacacttagtgggttgcactgcaaaagagaaacccagatccaagggtccaaatttcttgaacaagcagcaaacaagccaatctcccttaccctgatggtgagcagttacacgagagtcattgtacagttaccctgacccacttaattgtctatgtgtctagctgcaaaaatgctcagtctcaggagacagataagacttgcaatctggcatacttagcaaaattatgcagggacactcaggaccaagacagatcttcctcttctaaccatccacccttaaacgttcttggcagaactcaaaatttcacatgaatatgtgactccattgaccactgtgattaatctgatgtatagaggcttaattccatttgtcttgtatagcacttaattaagggactatcaacaatacaagcagcaggacaaagtattgaccttaatcatgacacccagagttctgaataccacaaaccaacagggtctaccttggaaagtcagtggctttctccttaaggctctcatttgacctttctacttggtttgcggcattaatccaggtatagctggatgttttagggacgatttagaatctgacatctgttgcaattctatcatctataacaattctggtcagtgagttgagttggagctgactaccttctaaggcccaggtggtatcattaatcacttcagctgaactcagggacaaatttcttttcttttttcttttcttttcttttcttttttttttttttttgagatggagtctcgctctgtcgccaggctggagtgcagtgctgtgatcacggctcactgcaacctccacctcccaggttcaagcaattcccctgcctcagcctcctgagtagccgcaactacaggcctgcatcaccacgcctggctgattttttgtattttaggagagacgaggtttcaacatgttgaccaggatggtctcgatctcctgacctcatgatccatccgccttggcctcccaaagtgctgggattayaggcgtgagccactgcgcccagcctcagggacaaatttcttaccaccttttctaattatctgactcccatcgttgggacaaccaaccacaaagtgcacacaaatgagtctgccctctggaaagttccaccaaataactaagggtggccttatttcagagggctccccacagtcatctgagggctatgtagtctattctgggttccgtaaacaatctgaaattttaccctatttgcaagctaacaagctagtcagccacagtttcatcatgctagtattagactcaagactcctgtgttaagggataatttattactcatggcaatagcagtgaccagagcaacagtattaatttttgtgctgctgttctgaaccccaattcccatatgccaacatgaagatgccacataatacttgtactggcaatggactgcagcatagtgtagtgtagtgtagtgtagtgtagtgtagtgtagtatagtatagtacagtaaagtacagtatagtacttagagaacctgatttttttataatgggtagtaatcatgcttgttctttgctccagaaggagtcattttctctatcttggaacgctgttcactacaaaaacatcactgaaaagatagtttcagacaaagccagcacctctgttctcaagatattcagaaacccagaaaattgtctcccaagggaagcctgtagttgggagaaattatgagaaaccactaacttctaattcagattttgcatgagttaggattatattcagctacatataacaaaatcacaactacagtggtttacctaaacgtgttttttttttgtttcatttttttttccctgcatgtcaccagagtccagaagtgcacagtccaggtctggaacggctacatacaaggtcatcagggacccgggtccctatccgtctgctccactattcttgtcatgtggctttccaccccatggtcacaacatgcatacgccacctccatctgtacagttctggtggtaggtggagaagaatggtgactagattttaaggaaggttaaaaacactaggataggaggccgggtgcagtggctcacgcctgtaattccagcactttgggaggccaaggcaggcgatcaccacgtcaggagttagagactagtctggtcaacatggtgaaaccccatctctactaaaaatacaaaaattagcctggcgtggtggcgggcgcctgtaatcctagctactccggaggcctcagcctactactccagaggcctagctactccggaggcctcctgcggaggcaggagaatcgcttgaacccgggagggggaggttgcagtgagccgagatcgcaccattgcactccagcctgggcaacaaggtcgaaactctgtcttaaaaaaaaaaaaaaacccaaaacactaagataggaaagaggaagaattaagatatacatgtaaggtgatcaggagacactaacaagttaattttctcagatgcagtgtgagtataaaaattagaaaatttgagcaagtaggtggattagatcaaagtgatactgtgttttgaaggtcatcagcaaagcattaatcagttaataatgtaacaggaatgatttgaaaggtttagtgtaacagtaattgagtagataagctatagttcaaaaatatatttttaatgtaaatgggtaatttgaaattttgttacacaaatgcacagttcaaaagtactataatctctcattgttagatgttgctattcaggtttataagttatagcttgtagtactgtgtaaagataggcaccatgcttacaagatcagaattcagcttgaggctgtgtgagtttacgacaacactgtagtgtgccactgtacttctctaccttctgtatcgccgtatggaattactacacaaaattagcactaagaaacctaaatttccttacagtagaaataagcttatatgaataattctcttatagaaattaaactatctgctgcagttgtcagcagggtttaatttttagcataagctgaggccatcagtttcttagcagtcctattcttaaataatcatttctgyttaagagatcattttactgaacaatttcaaagcactaaatatcttcgagattgaaaaaataagcacctatagatggagcagaaactaaagaagaacaatttaaggaaaaagacagtccttaactatgcacgcatcctatgaattatccatgctttcagctggtttccttttactgcactgtctaaaactccatatttaaaagggtttgatacagcagagttagaatgtggtcaatgaaatctggagcttgtcaatgggtttcaataactgatgccacttttagctctgctaacatagtagagattatagacagaattctcttggccaactcctatcatgggataaaactcctcccacaccagtttctaaaggtaatgtaacttgcttctattggtttaaaattattaaataataaatacgtttctcagctagtcaaaagatatgtccaggctcttctcacaagttcaatgttaggtgctgtgggtgcaaacagtaatttagtaattgtcactgttattatagtaatcctaataatcccttattcacataattcttcattttttaaaagtattccatattaattttcttatttgagattctgaatattactctccaagtaatactgccccattttacagataaggcaattcaaaaaacgtttaagtgacttgccctaagtcacaggcactagagaaactattacatgcaagataaacctggtcccttcatttatgacactccattcatagtgggacattcagacgagttgtgggcaactgcaacatggttaagtgttgagctacagcatacaacgtacatggcatggagaacagtcttggcgggagaggggtcagggaagtcttcccaaaagaaacaaagtgtcatttcagacttcattgtgttggccctggggaagaacattcacttctactaaattcacttattctgttctcagaatcttccaagttgattttgtacttgatagagcacaacttagaaggtcaattaactttacctctaggccagtgtttcactcaccgtaatttctctagcaacttcatcagtcacctggggtcttgttaaaaatacagaggagggggcggagggagggcaggggccaccctggacttaactttttctaaatctcttgggggtgaggttggggaaaattgctgctttaagcatgaacactttcgggattttgaagtcaaacagcaaattaaaaggggtatttttggtagtggctcttaaattccagcatcaatacagcctttttttttttttaataggggtgtatttggggggtagggatagcaattttatataactgggattgggtgctataaaacaggctgttagcctccagccctcacctgcaaggtggctggcttaaggtaggtacttgataaatgtggatttatttaacagaggaacacttgtattcataacctccaagagtttcgaaagtctttctgctccaatcttccagtgtctagccagcagcattgctgcagagtggaacagctagggtgcgtggagtttgcagaatgagttcaaacctccagacttatcagttagcagtaagaacaagttccttaatctgcctccacctataaagaaggagtacaattgccacttacctcctagagttgttgagagtcttaaatgagattaaatattataaatagattatcaatggaatatattataaatgcaagtgcttagaactgtaccttataaatgagctccacagatgcttattaaaacccgagcggtgccctctccccttaacatccgtaataggcccccttacacctcatacccattacgagtcaaaataataataataataataaataagtgaacaaacgacaaacgagaaaactaggctaccaggcacyggggcgatgggccacagcccggcggggtagtgggcccggaaggggcgcgggagtgggctctccccgccgggctcgcggcacgtggtcggcttgggcgggagcttcgcgacagtgggggaggggagcagcgtgggacgccgaggaggggtccagaccgccaaggctacgaggcgccgactgcgcaggctcggggacaggcgcaaccactgcgcgcagacctgagggggagaacgtccacccggctgcacgctccctggatctacttgcgcagcgaaagcttgtcttcttcctcattttaacactgtgtatggcgccgccttgcgcaggttgttcaccctaacagggcctctaacctcgagcccgaaacggcctccttctccagccgtgccccttcctcccccgtggaggcsgcagtggatgcgctcacctccctgcggcctcctgaggtggtttggtggccccctcctcgcgagttggtgccgctgcaactccgattccgagctttcggcacctctgccgggtggtaccgagccttcccggcgccccctcctctcctcccaccggcctgcccttccccgcgggactatcgcccccacgtttccctcagcccttttctctcccggccgagccgcggcggcagcagcagcagcagcagcagcaggaggaggagcccggtggcggcggtggccggggagcccatggcgtacagtcaaggaggcggcaaaaaaaaagtctgctactactacgacggtgagcggccgggccggtgtcggggtgggcgcgcggggccgggcgctgggttccgcggctgccgtcgcgagtgggcgccggggctgaggggtgggaaggaggagggaccgacatttggccgcatcttaacccgttcccggcccggcacagttagaacgagaccctcttcctggcgcagcccccgcggttcctgcgggcgggaatcagggggcccgcccgtcttgtctcctgcctctcccccttcggccgtgcagtccgcagcctcgaaggtggccgccgctggggacggcgccggcctaccccgccttggtggtggcggcggcgaagggggcggcccattctctcccttctcccgcccaccattcgtggcaacgcaggtttggggtgccccgcgtcggcctcctaccccctcgacccgtcccccgcgaggcaaaatttstatcccggccttgactctacacaaagccccgcggccgcgagagctccgcccctcccgtccccttccctcctcctcgcctgctcgcctcccctaccctgcgttcggtctggccggagcgtcttctccttcctcggcttaccctttccccggacccctcctcccggtgggcgctggagagtagttactgagggtgggggctcaggtcgcgtgtggctttatcacacccatgttttgcgtgggctccaaccctctcctttgttcgctgggttctttgagcgcgtctttctcaggattcaaatggaagggcttcacttcctcaataatagttcgggttttccagtttcaggcagaaagacttcgtaggaaataagaggtggtagggagatgtggaactgctactgcttgtgttgtagatcagactccatgggtcctggcttgcctcagagaggtggttaccacccacttctttgttgctctttgttcgatcaggaaatagaccctgctttggggatttagagagcattggtatcttgcaaaggctgttcctaggtggtggggaatcctggtatgggaaaactttgagaagtgggagaagtgcagaagtactaaatattctaatgaggtaaatttgaggtcaccgtgtagtgaattataaaagtcagataatttaattatcttaagcattctataatttggagtatgagcagtaacattaaatcttcgaatcctgtttcctgtgttttcttgctcaatggagtagtaacctgttatacagatttcacaaaggcttggtaaatagtttatagtaggttactcttgagagaagggattccaaaatttaacagagaatctatcctaggctccttctcctgaaagtcctgtctgatttgtaggaagcaatacaaattttggaagctgtttcctacatgtggtgtattgtaaatcacaaaattttagagaagtaagaccccagagcaccagctcagaataaatctactttaacttgtaaatgaccgtactgtctctttttagttaaaaaggattaatcttttaatgactgatacatataaaataaccacctgtgtcatttggggaaaatctgaaatcttacagaacaaatctaaattgatctgcgatagctaggacagaataataacagccctacttttaaaaatgatttttcagaggactagatatgcattatataagttgatttgaaattatgccatcgtggaggggtggagatggaaatacattttaatttcaacatgatttacattgcatattttgggttattcttgccctgcattccctgatcaaattggaaaggaagtaaccctgcgtataagttaatttgtaaaattacattgtttctaaagtttagagatttatccttgtcagggcttggagtaaagaggaaaattttggttagggaaagtggtactgaggtccttctcgaagctgtcagttggtgttggtagtgatgggctctgaggaagtaagctgcttgtaatttgttgtcaccacaatggaaccctagaaccaggagggtacacttgagtagcagtttctgaacagcgctcttgtcctgggcccatttatgataaccttcgttgtgggaatgggagcaggcacgggtacccgggaaaggatgcaagcttgataagtagggtggaaatatttgtcttgtgattgtgacttaatatgatactttattgtagcccattcacctgcttacgtgatggccagcaacaagtgaatagctgatagtttggaaatctctggtgggttattttgtcttttgtctgtgactcgtttgttaaagtggagttcctagttgcttatgtttcacatactcttttaatttttgtgggagggaattaaaatattttgcagagattattaatgtttatattatgctaattattaatatgtgatagtgtgctgacctcatccaaaaacttatatttttattaccagagaacattgttttgtcagcttacaaaagtagcaatactaattctttttttattgtgagaagagaatgcaaggaaaggagcttctgtatcaaagaatcgtgactttaaggtatataacatggattggattgggaatgggttatatctgtagtaatagggtctgaattatctgctagcctaggttagatggttttaacttcttggtaaaggaagtagaaggaagaaagtgagtgaaaaagaaaaggacggaagtagcaaattctataaccataggaatcctacctttaggcttcctggggctgttaggcacacggagcctcttggccacacagaatgtctgccactgaggctgtttgcatcttaatgaaagaacttttaaatatatacatattgttctctgcacgttatgtaatcttcaggtaaccctttaggtcactgaaacgttggtcccaagggaaccttcagacattgatggattaggtatccttaaacctttgaagaaaagtaagagaagttattacttctctgactgtagctattgatccatgcctccaaattcccaaaaacatacttctgaatcatgttccttctttatacactagaagatcatcaagaatctgtaaaatgatacagctaattagatagtcactaagatcccttctgggccttaaaacgatgtgatttttctctacttaaatataattagcagctaagctgtgttaggctctagttataccactcacatttttaatactgtatctagacatgtttatgctttgttttgaattaatcttgaggccaaacatatttagtgcttgtttttatggtgtatacagtataatagggtttatatacctaatttatgtaactatacacaaatttctctgtgctctattttttcctcctctgagagggatgcataatcagttttggagacaagtggtccagaaaaaaacactcaaagactgtatacagataaaactatataaatacaaaagttatcaagattaggccaggtgtggtggctcatgcctataatctcagcactttgggagactgaggcaggcaaatcacctgaggtcgggagtttgagaagagcctggccaacatggcgaaaccccgtctctactaaaaatacaaaaattagccaggcgtggtggcaggcaccagtagtcccagttactcgggaggctgaggcaggagaatggcttgaacccaggaggtgcaggttgcagtgagccaagatagtgccatgggcaacaagagcgaaactccgtctcaaaaaaaaaagttaccaagatgatacctcccaacgtactccttcttcagcaaattatagaaattctacttggcagccaacgattgtcagattttcttagacttgcatttatgagtagtaccaaagtcttttgctgaataacctttaatacaactacatgggttcttagctgtggtataaatctttattatccgtgaaataggtaataatttctttggaggcaaataagtgctaaattaattatagcagcagttcataaataccagtaatactaattgcacaataaaacatgactaaataagactgaaattttcctatacttctctttccccagaaatcttttgcctctcttttctttcaaattttacctcatcagagatgctttctcctattacctaagtccctgttattgccttatttttcttccttttggttgtaccatataacttttgtctctctcctcactataacataagcttcattaggacagtctgtctgttttgcttgtgtttgtatcttcgccaactacatttaaaaacgtagcttttttttttaattagtgatgaataaattattaattccttatactttttttttttttttgagatggaattttgctcttattgcccaggctggagtgcagtggcgtgatcccagctcactgcaacctccactaccctcccgggttcaagtgattctcttgcctcagcctcccaagtagttgagattacaggcacgtgccaccacccctggctaatttttgtattttttagtagagatgggggttttaccatgttggccaggctggtctcgaactcctgacctggggtgatccacccacctcagcctccctaagtgctgggattacaggcgtgagccactgtgcctggccaattccttattcttatagatagaacgctttcatataacgttccctctaattcttgaaactactctgaactacatttaggtaggatgggtggcattttggcatttttggtattgtttagatgaaaacagattcacatttgtttggtgcagtctaccacttttccttttccacactgactgtagttttaatgttcaaggagagttcaacatccggaatctttatttttcttttttccttttcaaagtgtttcctctgctaccaaacaaacaaaactccttaacaaaaactttaaatgcttctgttgacaagtccttaaaggaaaacacttgggattggagaaggcatctcttagggaatgttaataaattcaaacttggaagaattcaaatcaagtctaaggatttttttgtactggttattaagccttattcctctgtatttcagtagcagtctgcttattgttacttgttcattaagccagctttgggttcagacatatcaaataggcttaaagttcctactgtgtgccaaatagacaaaagattgctcaagtcctaagaaggaaataaaagactgcaggtataaagtaagagagggggccgggtgcagtggctcacgcctataatcccagcactttgggaagccgaggcgggcagatcacaaggtcaggagtttgagaccagcctggccaacatggcgaaaccctctctctactaaaaatacaaaaaaaagttagccgggcatggtgacgggtgcctgtaatcccagctacttgggaggctgaggcaggagaatcgcttgaacccgggaggcagagaggttgcagtgagccgagatcatgccattgcactccagcctgggtgggtggcaagagcaagactctgtctcaaaaaaaaaaacaaaaaaagtaaaagagaggggacctttgatagtgtaatcagaaaagggaagacctgaaggaagagaatgggccagccttaaaaagagtttactacataagatattacaaatagcaaagccagatagttattaatagaacttggtgcacttaatgggaaggaagacaaggaaaatgtggagtcccatgttaggcagtaaaaagtgggactgcacaaaactgtgtagtaagaaatttgactttacccagaggtggaaagccattgaaagtttctcaaatagaatgcattctctcaaaataattggtaaggagttgtggaatataggctggaagcaagaattgaacacatattggtccatataaaatgtaatggttgcattttagatagaaatagacatatttaagagagatttgggcctcaaaccaatagaactttttgatggattagaaatggagttggagctgaggaatggtgttagagaatgaaggatgactcctaagtttctggattgagcagttaggtggtatgtggtactactcactaagattgggaatacaaataaagagctctgttttgaacatcttatatttgagatccttattgaattcaagtgaaaagactgagaagagagttaacctctgtgagtttataatccagagaggagagtctagacatagaaatttgggatttctcagcttatatcaggtgaagtattgagactgaaaaagatacagcatagacagacgactggtcccaggacttaactcccgagagaagagaatttagggcagaactattgttcactgatgaacccaaacccttagaacagtacctgcttggcacatggtaggctcttgatttattaaatgaatggctgaactgaaaacccttgatgtttaaaggttggtggaggagtggccttggggtacaagtaaaatcccaagaaaatggtattatggaagccaaggctccgaatgtctcaaggaggaataacctccttgaaatatgtattaaagatgtgttaatatgtataaaaaatggatagtgggctaagtagtctggaagatgaaaataataaacttttttcttttctcttgttttttttttcctgagtctctttttgcagtcaacttatctttgtggctaaaggtacatttcacagttctgaaatccaaaatgacctgaaaattgaaaaaaattttggtaactcatttggaatcaaaatcttaacctgaatcaatgtgaggctatttatgatctttattcctctgtgaataccgtgaatattcacacttttttgctgtagaaatattaatgtttgattatatcatgccacccaaactctaggctattacataatatatggcaggtgtaccatattatctctacaaaatctgaaaaagtgtaaaatttgaaacatatctaatttgaaggaatatggataagagattgtggaccttagtagacacttccattctgttagtttcttgaagagtgagcaatttgtaaaattttgcagataaataattctttacagtaatttctttgcattgacaattaaagtttgttgtgttcaaggaaccaccttgagctgatttttctgaatgtttatttcattggtaaagtatttttatgtacaggttgaatatcctttatctgaattcttgggac

SEQ ID NO: 96832 - DNA, 14255 bp, Homo sapiens
cttccccaggctggggcagcacttaccaaggccaggctgatgggcagaggcaggggttgtgggttgggggtggggtgggagcaagagcccaggagacagggcattgtgacatcgtgcggtggtacccccaccagtctctctgctcccatggagccgtgcaggtcccatcagcagtgccactgagctggcccccagtgttgatgccctaccagactttattggccaaagtggcctcagactatgttcttgggggctccgggcagaagccgccgctcagggagggtaagccacttcaaggctcctaccgagacctggcactgccacccgttccctgcagggagccgcatgtcagctgctgacccgccagcccaggacaggaccctgctcacggccacacagggtgcccacctgctgctgccccatccagaaaacccaattcctccactttccagatgggaaactgaggccctctgggcagactgggccatgcgcaggtggtgctgggttccctcaggtgcagcgagggctgggggttccccagtcaaatgaaggggaatggggcatgaggacaggcgagtacttactttgctttggcctcctaggacagcatgaaggaaaagcagcaaggttagaggcagccagaaagactaaccgggtcagacacagcagcaggtcagcccggggcggccgggggcctttccagaagctgcttggcgaggtggtgtggaggtgacactggtggagatggaagctgagcgccagacagacccgccgccaccacaatcccaggtggcagctgagtccacacaggtgacatcactccgtcatcccctgaaaggggagctcttgggattactgtcagttggagcctaggcaggccctgggggacaagcagggaccactatctgagccaacctttcccaaatccacccaccctgtcgtcacctgagcaaggtagcctgagacaagataagccagcgcccacaagcatcccctggagctgccaaggagctcccccaagcccctcacctgcactgcccctgtgtccggtctgctgaaggaggcccggaagatgacaaggaccctcaagggggaggcagcccagggctcacattaatacagggcctctctctcagcaggagccaccgtcaagacagggctggcacccaagggccccagcacaagctacaaaggcctcccagactgactctcccacaatgtgcacacaaggacaggacctccacccagttcactcctcggctggagacactaggtgtcctgcccctaatctcaccagagccacctcataaaccctgcaagctctgcgaagggcagctgggcacagctgaaagcccagccaccagcccatgtcctgggtgggactgggcaggaggggccacctcctactgctgatcaacccgagagccctggctgggatccgtcttccttcaccaacgggagctccggccccagggccctgcccacctctgtgcaccccacactgcagcagggagcaccctgcagggaggaactgggcaccctgcaggggtctggtggagacgaggatgctacggaggcagctgccccatgggaccagtaagagggatcttgggtgggcttccctgcagagaggaagccctcaggagacaccacagtaagccatgctggagacctggaggccaggcccgtcacctggggagctggccactaacagcgggcagagagcctcccaggacagccagcacagccccccacacgtccgagcccacctcctcatttccccgcttcccgcattcccaagcatgggaggacctgccggacgcagcgcaccatctctcctaacagagaccaagtctgagcttcaaagcttgcgcagacgacaggcacgtgcaagcctctcctctccagcaggagagcccggagcaggacacagcgactctttcaactgcgtcccgacaaacggtcagccccttcgctcctgcagtttatccaagctcaggaggagctttctaaagagaacacagggagacagctggctgccagagaagcagtcttggaaacgccagagccaggccccagggggaagtggcccaagtgtccctactctgctcctggaagcaggccaggctcaccaccaaggctcttccctgaggggtagacagtgtctgccgagcacctgagcctctggcagctgcccagagtttgagagtgccctggggtcctggctctggaaggctccacccagctaacagggcctgtgacacaggtggcagccagcaagacccactgcagcggcatggccctcacagcctcccctgtccctgtcctgggagcagccccggcaaagactcctacccagaacactccaggtcaggagggcagggccctgaggaaggtgaggacatcctggagagctgtggccaccaaggtgctgcacggcctggaggtctccacacatctgggcaaacggaagctttctgggaggagctggctcccaggccctgctctccacgccaccccatcacagtcgcacacacagacaggctcccagattgtccaccctccacagggagaagtcagggaggtgggcaggggacggggtcagccaccggctcagcctgtgcacgcccatccctcccagcagcacccctctccggcccacctggctggcctgagtctgtggactggcactgcctgatagaactttcagtaccttcagtgcccaaagggcgcgacgactagcccttaaaagaggctggagcccctgaggaagcgggtctttaggcaaaaccaccgcacggcagagcagccacaggacagatcaatgtcttcctgcgggagtgaggccttcggtctttttttgagacggagtctcactctgtcacccaggctggagtgcagtggcgcgatcttggctcactgcaacctccaactccccggttcaagcgattctcctgcctcagcctcccaagtagctgggactacaggcacgcgcaaccacggccagctaatttttgggttttttttgagacggagcctcactctgtcaccaggctggagtgcagtggtacgatctcagctcactgcaacttccacctcccgggtccaagcaattctcctacctcagcctcccaagtagctgggattacaggcgtgtgccaccacacctggctaattttttttcatatttttagtagagatggggtttcaccatgtttgccaggctggtctcgaactcctgacctcaggtgatctgcctgccttggcctcccacagtgctgggattacagacatgagccatgcgcccggcctaattttcgtatttttagtagagacggggtttcaccatgttggccaggatggtctcgatatcctgacctcatgatctgcctgcctcggcctcccaaagtgctgggatcaccagcatgagccaccacgcccagccgcctttggtctttttaagagaaaaaactccacagttccacattcccactcagccactttcctgtctgacccctggatattccagccccactgggaaacgccagcctgtcctgcatatctcagagcactcactgtagctacccaacccaccctgccccaggccaagccccgccccaaccacgtcttttcttaaatgccactgcaggccagctccatggccagccctgcttgaggggctctggccgacctgcccgcccggcgcagcccccgtgcctcctgggtgactccagcacggcacaggctttctggaaccccagacaatacccacgccacacctcacacggcacccttggctgtcagcgaggtgggagagctggagacctgtggcaggctcctacaccagcacttagcataactcactgccaccagcttccaacacgctgatgtcaccttaacacactggcacaggatgatgacccacaaatcctcaatgccacatttcctgtcctcagcccccagaaggctgacgccagtgcacggcacagcccaggtactctttgtccatcatcaagcacgtgtgcccacctgtgctaaaccttgcagcctcacccagcaacccgggagcaaagcccagagggcctagtcctccagaggaggcgggaggcagcgggggctctgtcggctgggcgctcactctgccagcactgactgcgtgtgaaccctgcagcagcccaggggagatgctgctgtctcacaggattggcactgcgcccagaaagcctctacagaggcaggtctaggagcctggctgggcctgaggcatgtggtgagaaggcgaaggtgagcgtctacttcctcagaggacgctcgggggctccttccacacctgcccagcccctcagctgcatcccccacccccagaacggggctgggcacacacgggctccggaagtaaccaactgcctgcgagccagctgcttaaggctcatggggtccagatgacggggtgggcggagctgtagaaggaggctgctcaggtgagatggcctggcctgcctccctgggaggtgagccgcaggcagtgtcaacttaagaagcaccccgccctgtcgggcagggacaaccccaagtttagctacacagttcttctgctgccaggcggtccttcattctggaaaccaatcctgacgtctcatcaggtccccaacccactccgccccctttgccttcttccttccacttaaagcctctgaaagtactacttcttagcaacagcatccccgcccccttcagagactgcccgaccaccctatccaaatcaagagacagaaattttgacccagtcacagtacaggcttattcctttccgtgctcactagcgtctaagttccaaaagtgttgcgtccgtgcctatcccctccgtgctcagctgatgcgtgcagtaactggtgcttgacaaagacgtggtgtacgaaggtctgcaggccagagaaacagctggggcagatgtctggtctcccacggagacggcagcaaacacaggccttaggccccagcagcctggccgaggggcttccacgaccgggatgcgccgtgagacagtgctcccggcgcccccgtcccgcggacgccctccaagccggccacgtggcctccgtcgccccgcctctctgcgctcgccccaagtgccgcacttggcccacggcccctaagcccgcgctggcgcacttgtgcctcagtccctaacggcgcgagcttctggcgcagcccgggccgcccgccctcccggcccctcgggcgtctctgtcgcgcccgactccttccggcgggggccgcggtactcacacgccagccaaggacgcggcgaccaaggaggaggaatcggcggacgcgggaagactgatgaaagggagggccgcccgggccgcgcacgggaaatgaagcactgggctctaccaagagccacgggccgggggcccgggggggggacgcgacccttgcacacgccccgcctggccgccaggaccctcgacgcgccgtgccccgacacttcaaaggcagaattccgttggagatgaccgcggaggccgctcttccccggaggagtctgcacaagtgctgggaacgggcggcagcgcgcgcgccccccctgcgcttcgcggccagtggtgtcgccggtggggaagggtccggcagccggcaagagccgagtgacgcacgaggcggccagcgcgcaggcgcggggcggggccgggccgggctaggtcagcgcgcgtgcgcccgccaagctgcgggacaaaggggagggacccgtgcggccccgcccccgagtgccccgccccgagcggctgggcgtgtggctcccgcgacccgcgcggcccgggtcccccccgccgcagccatgtaccccgcgggccccccggccggcccggtaccgcgccgcggccgccgtcccctgcccgggccccccgcgcccgccccagcccccgtccccgctgcacggccgccgccccccgcgcccgggccgcggccccgcgtggccgtgaagatggccttccgcaaggcctactccatcaaggacaagctgcaggccatcgagcgcgtcaagggcggcgagcggcaggccagtgtgtgccgcgacttcggcgtgccgggcgggacgctgcgcggctggctcaaggacgagcccaagctgcgctggttcctggagcagctgggcggtgaggtgggcactcagcgcaagaagatgcggctggccaacgaggaggagatcgaccgcgccgtgtacgcctggttcctggcgctgcgccagcacggggtgccgctgtctggcccgctcatccaggcgcaggccgaggccttcgcgcgccagatctacgggcccgagtgcaccttcaaggccagccacggctggttctggcgctggcagaagcgccacggcatctccagccagcgcttctacggcgaggccgggcccccagccccgagccccgcgcccggcccgcccgtcaaggaggagcccgcgctgccctccggcgccggccccctgcccgaccgcgccccggccccgccgcccccggccgagggcggctacggggacgagcagatttacagcgccagcgtcaccggcctctactggaagctgcttccggagcaggctgcgcccccgggcgcaggggaccccggggcggggggctgtggccggcgctggcggggcgaccgcgtaacggtgctgctggccgcaaacctgaccggcagccacaagctgaagccgctggtcatcgggcggctgccggacccgcccagcctgcgccaccacaaccaggacaagttcccggcctcctaccgctacagccccgacgcctggctcagccgcccgctgctgcggggctggttctttgaggaatttgtcccaggcgtcaaacgctacctgcgccgaagctgcctgcagcagaaggccgtgctgctggtggcccacccgccctgcccaagcccagctgccagtatgcccgccctggacagcgaggatgcccccgtgcggtgcaggccggagcccctcggtcccccggaggagctgcagacaccggatggcgctgtgcgggtgctgttcctgtccaaaggcagcagccgggcacatatccccgcaccgctggagcagggcgtggtggccgccttcaaacagctgtacaagcgcgagctgctgcgactggctgtgtcctgcgccagcggctccccgctggacttcatgcgcagcttcatgctcaaggacatgctctacctggctggcctctcctgggacctggtgcaggcgggcagcattgagcgctgctggctgctgggcctgcgggctgccttcgagccccggcccggcgaggacagtgctgggcagccggcccaggccgaggaagccgccgagcacagcagggtgctcagcgacctcacccacctggcggctctggcctacaagtgcctggctccggaggaggttgcggagtggctgcacctggacgatgatgggggtccgcccgagggctgcagggaggaggtgggcccagccctgccccctgcagcgcctccggccccagccagtctgccctctgccatkgggggcggagaggacgaggaggaggccaccgactatggagggacctcagtgccgactgccggggaggccgtgcgggggctagaaacagctctgcggtggctggagaaccaggaccccagagaggtggggccactgaggctggtgcagttgcgctcactcatcagcatggcccggaggctggggggcatcgggcataccccagcaggcccctatgacggtgtgtgaccaggccagcccagtgacctttctcctgctgcacttggagggaggggacatacacacagtctcccatctctcctcccctccccctggggtggcccaccgcatgggtacagggggttccaggaatccaaatccagcatggcttggaggagctctgttggtgagaggtcgccctgcctcactggcaccctgggggcacagctggaagagaggcctggcccatgctcctctcagggcaggcacatgtacggggcatacaaggcacagcgcctgttggaacaggtggctgtgttcctgctctggcccccgtgcggctgggcctccgcccctgcaccagtcacatgcactggacgagggccgaaactcctgtctgctatcgagccctggtgctatgtggccccggagccacagcacaatcatctcagtggcgaagcacaccacttgattctatttttttttaacacattaaatctgtttttaaagatactcttcagaggggccgtgagaacaggggccgggtgggctggtctcgggccgccctgcggtttctctggaggtcagaggccccaggtactggagcatcactgtggagtgggaggggtggagccctgtattaggttctgggtgcagcagggaggtgtagagttccgtttccttggatttttagttttccctaagaaaactgaacagatctcttattccgtgggattggcagctgcctggctttgggccctggtgacttggccaacggcaggagagtttcccctgcttcctcatcagccacagaccattctgtccagtcccagggcctggagccacctgacttacctggaagcaggccctggcattagcccccagggcaatacgcagtgccaccctctgtgggctctcctccccaccctcagacttttctgcctctcctgggactgccaaggatgtggctgacaagctgctcctgggaggcctactttgaaaggaggaaagggccccagggcctgtcaaaccctggttctgttctgctctggccaggtctagacctacagtccttctggttggactggggccagggatgcccatgcctcctcaggtagggtgggaactgcctttgcagagatgctgcccgagctggtgtgaggggcagggagctggcctgcttgcctccaggtgttgacccctcgtccccatctgcccccagtgtcctcctaggagagggaaccttgaaaacccagagttgtggagtgcaggggtaggctggaggcctgcacggggaagggaagggctgtgcaccagcttggcagtggggcagctggagggtgtcccccaaaagtgacctttatacaggtccaggaacaaacagttccttggaactgcccgcaagtgaagaaatatatacatatatatgtatatatctatatctcaaaatctgagagctcagggaggccgtggaaatttggggaagaagaaacagactccctgagcagagctcagggcagcagctccaggcatgcctgctgagcccatcaggccaccgccacctgcaggaagagcctctggcctgaactgctggggatgggctgcagaaagcctgagacatttgggccagcaccttcccaggggcacaggcccccaaggcggggacaccacctctgctctgccaggcctgcctccagggctctgaggagaagctgacttcacggccgcggtgccagtgagggctgcatagccaggccttgtctgtagtctgggcggcccgtggcgctgcccttcagcccaactactcattgccgctgcgtctttggcgaggctttcatttccaacctttcttcccatctcagcccttttgttggcccgggtcccaggaggctggtgtcggtgagggcaggcccgctcctctcatcggggtggctgtggcctgtcccccagtccctcaatggtcactttctataaacaaggcagcactaatttttgctataaggtaaaagaggccaggcacgttggctcacacctgtcatcccagcactttgggaggctgaggcgggtggatcacctgagattgggagttcgagaccagcctggccaacatggtgaaaaccccgtctctactaaaaatacaaaaattagctgggcgtggtggcaggtgcctgtaaccccagctactcaggaggctgaggcacgagaaatgcttgaagccagaaggcagagattgcagtgagccgagatcacaacaccgcgctccagtctgcgcgacagagcgagactctgtctcaaaaaaaaaaaaaaaaaaaaagtgcaggtgcacgctggtggggacattaggagcctgtcaagagtgggtctgcctgctggcacttactagacgggaaataccccctaaagagggcttaaaaagcatctccctagcacggggcatgctggcacagggtgctgtgtgacagaggcttggccgctgggccccgctgctgagaaggctgctccgcccatgcctggccctgtgggcagtgccagccatggatccctgagaccctgggctggaacctggggccccgtcccagccctacctgcagctcactaaccctctctgggttctgctcagtgtctgaagtgatggaaagaccccagggttggtggctgtagcggcccccaggggtggcagaaccctttgggaggccaagtgttctttcccaaagctgcgcgggtgccatcgcctgccaggccctggctgtggtgacagacgtgggctggggtgaggctgcatctgcttcctctaacagccgtggctgcctgcgggctctggcctccgctctggcagattctgcacattccctgcaggcgcaggggtgggtgggggtgcctgtggcctcggaggtacagccagctgtcctcagctcagatggcccccaagagcccccagctcctgttcactgctcttccagttagtgacccccgtgtcagcatcattgtcagagttcctgggcttgtgggggctggagaagggaaggcgctgaggagggaaagatgagtgcaggttttgttgaaaccacccgacccgcgttttcagggggacgaggccactgccttggcccaaggacctgcaggcttgggggaccccctcgatgtccactgggctgcggatgaaacatcacactgtggtaggaaaggaaggggagcacccccagacgggggggtcctgcagagaccccaaccccttacctacctagttgagacacccatggggagcagccccaacagcatgtcggagtccctaggcttgcggggtcatgctctgttgagggcccttcctctaactggcgagcttgtttacagctgagctcgcctggtcagatgggcccagtggctttatctaataaaggctggacatgtccacttcatgagcatccctgttttgaagtcttatttttaaactcttgatccaacgcttggatcaggaataccccctagattaacagttggggcatagggcataaaagtggaacattgatcaaagataccgtaatcatatccatcgttttctgtcttgaagaacagttttcacctggaagtagaaggcacaggggaggcctggctcaccacaacgctccctgccgtgccgagaactgagcccgtgtctttgtcacaggccctcaccagctgggccaggagtggctggcttgggatctccacctcccgagctgagctcacctagtgcccagggcttgtcagaggtcccagggggagacaggtgttggtgcaaagtcaatgatttctccttgcagatgggcttggtgtgaatgcaggtggccgtcagaagggctgtccaccttccttcagggggccgcctgcaccagaccccaggctcccaggcctgcccaggcttggcatacagtcccctggggtgacagcgtgcaggggaaactgcaattccatgccctacaaagcccccaggtgatgtagaggcctgtagcaggcatggggagacctctgctgtccacagtgccagcacccccttcggctgacacctgtgcttgaccaaggttccaggcctcaacttatggggcaggcattggaccttgtttctttttttttttttccaagacagagtcttgctgtcacccaggctggagtgcagtggcatgatcttggctctctgcaatctccgcctcctggattcaagcaattctcctgcctcagcctcccaagtagctgggattacaggcacgcaccaccacatccagctaattttgtatttttagtagagatggggtttctccatgttggtcaggttggtctcaaactcctgactttgtgatctgcccgcctcggcctcccaaagtgctggaattacagatgtgagccactgggcccagcccagaacttggttttatccacctctggtgaaacatgagctcacttggtgctctctggcctctttattcccatctccttaggctgaccctgacaagtgccagggccaggcttggaccaagcagtcaactgagtcagcctgccctgggaaccaggcaggggagggagcttacggacgggctaggctcaggagagtaagagagagcagatgaagggcagaagtccgtggccgcagaggcagctgagcatgagggatggagcgtgctgctgtcctgcaggtgccgttagccctgttttgcactggtggattgatctgctcaggcgcacagggagatggcacagcaggacccgccgcccagcctcgctgagggcatgctcccgcctcacctccagaggctgttgggcggaagccgagagctgcagcagttggggccagcgtgggactggaggcccaggtgaatcttgtggggcaggggacggagctgaggctgtccggcccgggccctccccacccaaaggccctagaaccctagccttcaatcctgggggtttgcttctcccctgagtcctggctttcctgacctgccgtccgttagggacaggtggaggggccaagtcttgccatcagaggccagtgtggtggtgccagagctacggggtattccaggacccctgacctaggcacggggcaggagggcccagagccacctggccacttgtcaggagcttaggattgggaggaaagagggagcctgtatccagactaaagccaggggtctgcatgtgtcctggctggccagggccaccctcccagacctcaagccaccccacctaccactgcccacctggtgccaccccagcactgccgcagacctggcccagcagctcctgctccttagcaggggatgagcacgcccaccacagccaccctcttctccaggctgcagggcaggctccagctccccatgggggccccatcaggccagggcccctggctttactgcaggggagagggtctcttgtgcagaccccatatggctcgtgccccctagagctgagatgaggcagccggcctggctgtagctgcacggagccacctggaaagccaaaggcaagctccagctccagaccaggcattgggccagccgtgcctgttaccgtaagttctgttcatggcctcaaccaactgcccaaccatgcgggcaaatgaccaagacgccatctcttgggcccctcagaaccaatgttgcagcaaggtgggctcactgcagcaaggggcagagccaccaccacggtgccttctgctcactggggagggaggagtgtccccactggtcggggctcccccgcctgctggaacctcccaagtcctgccccctgcatttccctgtgcaaggggagaaggagcagtaggagaccctcatgcaggagggagggagccgcagtcctcaggggaagggacacagggagaggcaggggcacagaggcaggaaaggatggccagagcccagcctactttctgctgagctccttggcccggcaggtggcagcctccacggcgctcatggtggctgctcgcagcccgccctgctccagggcgtggagtccatagatggtggtgccacccggggtgcacacgtctgagcgcagctgggctgggtgttggccctcgtgcagcagcatcttggccgtcccctgaggagagcgttagggcctggtgacggggggaggtggtgcggtccccactgtgcggcctgccctcgttgcatcccccaaccttggccccagcttctcgagcctgctgtttccctgcgcactggaagaggtacaggcctgggccttcccgatgttccccaggggccaccctcactcaccagcagggtctgggcagcgatgcggtgggccaggctgctgggcatgcccatcttgacggctccttcagccagggcctcggagaatgcacacacctgtagccgcggcatggtggttgggggggataggtgtcaaagcctgggggctcaggaccttcaggaacaatgcccagagcagtagccgtgggtggccagaaccaaggcctgagcccaacggtctgcaaaggggctggcctcaaagatccccaagg

SEQ ID NO: 96833 - DNA, 13767 bp, Homo sapiens
gagcccaagcaataaacagctatttagctggaactttccactgagagcctcatctcctaaaaacttatttaaatcaaaaccatagttatttaaaatcaaaataaagtctggatataaatggtagtgtggggcactctcctcccacttcctgcagacatattaatattcttcctcttataattttttgttttgtatttctgttagaaaaatttattttcctacttctcacatccctgctcagtgtattttgttcttgtaagaagtcatgggtaactgagagtatcacatactatctgtggcttcacacgtggaagatgggaggctctggaaggaagaggggattgctgaccccttggcctctccccactccttctctctgtctcttccctctctccagggggtgacatccgttcaccacctaggaggggagctccttggaccatacagcagacgttgtctgggtgacagatatggagatgttcagcagaacagccgtgccatgagcataggactgacatcttccccctgtggtgtctccttctgcaggtgccttattaagtggctggaggttcgtaaagtgtgtcccctgtgcaacatgccagttctacagctggcccagttgcacagtaagcaggaccgtggaccccctcaggggccccttcctggggcagagaacattgtatagcttaccgcaaggatcagactgttgctggacacgacgtctgtgtggagccaggaggaacacatgtggtgtctgtatggctgctctctacctaggacaccagctgccacttcttttgcctcatgaagaactcttgggccagccaaactgggaacctaggtgtctgggtcttgtgacaaccaaagcactttgacactaccccctgccgagagaagaggagtggatgagcctgcgggtttgcctcaagaaacttcatgagggtctcttactaactccattacactctctctcctggagcctcatctccatgtcaagcaggagggtaaagaagggaactaagagcaggtctttcaagccacacccccacctgcggatggatgggtttctctgtaggccatgcaggcctttgtcgcagcaaaccttcccagcagcccttgagccaagtaaaaccagcacaaccagccaccagtggttggtgaggcagtgcccacaaggctcatgttgtatgcctttgataaggccatcttggctttgagtagcagtgttcctcgtcacccatttccccctcaggattacaacacctgctatcaaatcatctaagctgaaaacatgagatgcgcttggaaaggcctagtcagaagccatttcctcttatcatttccctctcctatgcaccagtaaggcccgtccagagccccagcagggagtgggccctgagtccacactgtccctgagtgatccaggaggctgcccacatccccacatgtgcactgtggttccagtgtagctgctgtgagcccactgccactgcctcagaagggagccactgtgaacctctcgagtggctccaaagagcagtggctttttgagaatggcccatacttctggcccggctggatgaagggaatgccgaccctttggcctctccccctccttccatctcttctctctcttgccctatctctctttctacttcagaaaaaaaaaaaaaaaaaaaaaaagcctgtcattcactttttaacactttatcccaaataagatccctgtgtaattctgaagctggtgatccacttggaattgtagatagtttcaggaagctcctgcagggctgtccaccgttggtgtgtgcctcagtatttggacttccgaaactgaaagtgaaagtgtctttataggagagaaacgcatgctgctctttggctctttctgtccaacttttctagaaatgactcaaagtccattaagatttgtgaatattgtataaattagctatggaaagtagcaggtcagatggaaaattcttttccacagccctgctctccgcctccctccatcttaggagcgcctgcctcaattcctcgtcaactgctttgctccactccatcccacaggtgtgagtgggggaagtttttcattaggaatacagtctgcgtgacatggagaatggatggagggagctttgctactctgctcttggcatgactccaggatttttttctggaatccaacctctgtcctcttaggagaaggaacctgtccttggttcagatggctgggcatgaggaggaaaatttccattagtgtagaaaagtgctggacagaatccggtttggaaaattacaaatccagttggtcaaaataggccatttcctatgtgtgacctattcgtggtatgccaactggactgcttcctaaacaggacgaggaaagtgaggaatatttttatatgaaagccttagcctgtctggcacccatgaaaaaaactatttatgcactcctactttcaccgtctttttgcattctctatttgtagcacaacagagttgaatgccacaaaacaccccgtttatagtgagctgttttcagtgaccaatatcagaaggaggcttgcttctggactagcctcactaattgccagcagccaccattttccatggaatggccttgggacagatgtcacctctgttatggggctctaataggaaagagaatgttttttcccttcctatgatcaatactgcaaattattgctgctcacagcttttataggattctcccaactgaaagttgcaggctttttctgtccctgtgcatcagtactaacaaaagacagcctcaccaagtctgtatatttgaacagaggcaagttaattcatccccccgtgtcagagccacaggcatgttgagggggttgatacgtagcactggaccagggcgcaaagcccagatagttccagccatgagaggagagcacaagaatgctctgcactctgcactcagcaccaccttgggtctgctttgcccagatgagggaccactaacaaccttctcagcacatgtgaatgtggactggttttaaaatgcattcattctgctaggattgggctggaagctggaacagtgagagtactttttctgctcctagtcatctccctttctcagcgtgacatcctcctgcagcaagcctagtatcactagcagtagttcctgcgactcttagcaacacaacccgaatatttgctccctgcatctgggtcctccaccaggatgggcctgcgcatctgcattgctgtacagacaaacaggccttttaatttacatcctcctttaattctcattaaaatcgcagggtttttgtttgaaagacagtcctttttttatttattttgaaaaaggaatgagttagggacccctttataactctcttggctcagactcgaaccccatggtaaagtcaccctttccgcatctatcttcaggagttgctgggacttgttactgtgtagctgcgtggggattctggtctgctcttggaccactggctggtatcctttgtgtgtttcttaagcagctcaaagatagaatgttgctggtctgctatgggttagtggagcataactcagccccaactggactccacgggtggctgaaccattagtagttgctaggggtacaactgaattcaactgccttcagaaacagggaacaaaaccagcctgacttgattcctggttgggtcagtatcagacactaggaagttgacatctgctgcttttctttgccacgtgtgatttggttaggcctgtccctggcagataaggtccttgaagcctatgcttgcctagccagggaaggcaggacagaaatggccaaataggggcaggtggcccctgggaaggtctgagctgagggatacaggggacctcccaccattgccggataccctgttcttgacaagaagatccttttccccagtgccaagccccttggatccatcagagaaatagcctcgggccttgtcctttttcacaaccccacttcaaaatcatgtcatctccctggcctgatcccgctctaagctactttgaacaactaggaattatttttctcagaggctttttgggcattatgaaatacatcctgatacatccagggcagtatacccagagctccaggcagagagtgatggaatcacctcttgtcactcactagccttaggcccttctgcaggttagcctctcagtctcttccttagcttccttagctaccacccagggattgtagtaacgtccctggcacctcttgtgggggttagctggtgcccagagcctggtaggcagcaggcctggtgtcatgggggctgctgataccacataacatcatctgggttacatgggctcctctgccatcatgattgataggaacagaacctcagccaaaaagcttcctgagctgtaggggctttccctgaggcccaggttcacctggcccctttcttccttggtcatctctgcctttgcccacagtgaactctgacttggttgttcagtgctgaatatttctttcttaatgttttgaataggtaatccattcatgtggttcacaaatcataaagtagttaaaagcctttcttgagttcctgatgcctagcaagctccgctcctcactccatgaatacctactattggtttgttccttgggtatccttccagagatcatttatgcatgtacacacatgtgtatgtgtgtctatataatttttctccttttctactcatgtgataccagacaagtgtattcaaggaacgctcctactaatgtgggaagagccatcccagaaatcagaatacaaaatgtgaacccagaattgggggatgtttttgcaatcacactcctgttgagtaagacatattttcattttattgcaacatactgaaattttagttttctgtacaaatcagaatctgcagtccctcccttaccccaaatgcccagctaatccaagagcacaaccagatttttctgattgactttctatctgcgacaggatgctcaagatcaggctctgtagctgacagcagtggcacaggcctctcccagctctgagcagcctctgcaggtgcctggacagctgctggcccctcccctaccttggccagttccaagtgaggaccagtggtgatgtgtggctgcaactgttgtggtcacttaggcaagctcttgtgtctttgatgcaggagtttgagcagcagcaactgaaggcttctattttgtggggcagacatcttagctactgagcaagtgcacagtgagtctcatgtggatatgcctgaatgtccagcgtcagttcatggagctactccctttccctcccaacttttcgttgttgttgagacagggtcttgttacccagactggagtgcagtggcaccattgtagctcactgcagcctcaacttcctggactcaagtgatcctcccgcctcagtctgtagctgcgtctacaggtgcacaccagcacacctggctaattttcgtaattatttttttgtagagacaggtctcaactcactatgttgcccaggctggcctcctcactctgtgcacacactttgaaaagaaaatgcttctggtcgggcgcgatggctcacgcctgtaatcccaacatcccagcactttgggaggccgaggcaggcggatcaccttaggtcaagagttcaagaccagcctgaccaatatggtgaaaccccctctactaaaaatacaaaaatttgccgggtgtggtgacgcatgcctgtaatcccagccactcaggaggctgggacaggagaattgattgaacccgggagacagaagttgcagtgagccaagatccccactgcactccagcctgggcaacagagcgagactccgtctcaaaaaaacacacaagaaaagaaaatgcttcctacagaattttccctttatgccttgttttccatttgacaacagaaattaccccaacaattttttttttttttttttttttttttttttttgagacggagtctcgctctgtcacccaggctggaatgcagtggcacgatcttggcccactgcaagctccgcctcccaggttcacgcyattctcccgcctcgggagctgggacaacaggtgcccgccaccacgctcggctaattttttgtatttttagtacagacggagtttcaccgtgttagccaggatggtctcgatctcctgacctcgtgatgcacctgccttgacctcccaaagtgctgggattacaggcgtgagccactgcgcccggccaataatttttttagtttaagttcatttttgtccccgctgatgaaagttagagctgcttcctccaggcagccctgggagtaggggcacagacttgtgcctcgcttcccagcagctgcccagtgcctctgtccacacccacctccctggtgtacttgccccctacagcagcagcccagatcctcccctggattaaaattgcaactggtgccctaacccaaaacttgagaaaaaattctctatcacatccactcttctggcatttgtagaatctctggccctgggtgtgtcttttcctgtagctgttacagatttcttaagcagatttcttaagcagatggacatgtccagattcatgcctaaatatccagttgataactggaaaatgcyggttcacggttctttagtaaagattaataagggatccccatgtgctggggagtgtgcttccatttgagtggggatatcagaagaaaaagaggggcttgtgtagtaaaccttactttgccaattcagctgtagagcccaaattgttacaagatgcaaagatgtactccactttttgaccaagcatcagcacctttggcttaccatccagtccttacttctgtgactgtaagggccccaccagtgtcagcagacttgtttgtgctttgggggaactctcttctcagctccctttgccagkcccaagcctsgtggatctgcatctcaygcccactgcacaccgttcctctccatctgcccttccctcccaggcccccggtcgggggagcaggtgtggcaagtgttaggaactcccttctggtgacagctggtcttcctagagtgttgctggtaactrycgcctcttggtcttctgacatcattgccaggaacggggcactttttcgtcttvtagtttggccctygggtttcctcactaggtattgtgtaactccctcaaaaaaaggtttatgaaatgctgaacctcaggtttcatagacgtctttgtacactaaaaattctgcagcagaatatttttaaacattcgcagttttttgtaagctatatttttgtatatttaattgctattttaaaattttaatgcattttgctaatcactcctcaaaaataaaacatgcatgtaattgactcaaacgtgtaaataaaagcaaattttgaaaaatagtgttgtgcatatgcctttgaacmgagggaacatccatgtgccacttacgcaagcaccttcagcaagacttggaaactcaaggtgagtaattctatcagagctggtaactagtactgagtgattgtgatggaagcccctgcccttcctgtggcatagtgtgcaagcgggggtggggtcagtggtgaagagtgtgtcaggccaccacagccagagaacagagaatcctggaatgcagagtacagtggagtctgaagccccctggcctccctgagctctgcaaacagctggatacagataagcagtcttccacgtgaacgccagcaccagggtgacctgaaatagcggattttttttttttttttttttttgagacagtcttgctgtcacccaggctggagtgcagtgcagcaatctcggctcactgcagcaacctctgcctcccaggttcaagcaactgtctgcctcagcctctcgagtacctgggattacaggcacgcaccaccattcccggctaattatttttgtattttcagtagagacggggtttcaccatgttgtccaggctggtcttgaactcctgacctcaggtgatccacccgccttggccttccaaagtgctgggattacaggcatgagccattgcacctggccaaagtagtggaactgagcctgtttcctccacaggccacaccaccctgcaaagagttgcccccaccccaagcccctagctatatcccaggcctggaaataactagtgtcaggagaaaaaacgtccaaagccttcctgtgtggccgttgctgctctcctcaccacccctcactaggaccgagtggcttcccagcttccatcaaggccagccacgatcttgcaaccaattgtgggcaacctcaattcagatgcctagagagctcctcttctcagtcccctgagccacaggcccctggccagcctctccctgagcagtcgttttctttgcagcttcctccgtcactgctcaactctcggttatttttctcaccctaccttagaactcatgaaatcccccttgctttgcccacctacatgcatatcattctcagctctgtatctccaacccaaatacccagtgcttatttggagtctcaaaatcacgtagtccacaaatgagcccaggtgccctcttgtatctctcctccctcccctgtatccagtcaccacttcccaacacagccctctaagcatctctccattctggccatccacttctcccctctccattctggccacccacctcccatcttagttcaggccttcctttctcacctggaccacggtcacagcccccttcatggccactagtggagggcagactgaaagggacagctgctaagacagggaagtggcaatggtaacagcagagtttatgggcacctcacaacctgaaggtggtgagacggcagtaagctgggatgaggatgtgggcactgctgcacagagatcaacaaatgcagagagaaggcagtgtctcggggctggagctcagaggtaaggggtggttgaagtgttccctggaaatcagtcaaggtgatgctaatgactgcttggggagacccaggactgaggctgaggacagccacagctaactgtcagcagagaatgaaccagaacattagtagcctgggtggcaggacaggcaagagggctctgctgagtgagaactgagatgaggctgtgaaatgaatgccagattcggtggcatgggattcactggtggcctatcaagaaccctgctgtgagccgggcgcaggggctcacacctgtattcccagcactttgggaggccaaggcaggcggatcacctggggtctggagttcgagaccagcctggccatcatggtgaaaccccatctctactaaaaatataaaaattagccagccatggtggcacatgcctgtagtctcagctacgcaggaggctaaggcaggagaattgcttgagcctggaaggcagaggttgcagtgagctgagatcgccccactgcactccacctgggtgacacagcgagactgtctcaaaaaccctgctgtggagtgacagggtttactgagcacaaggtggaacatgagggaatggactagtttctctagagtagggggagggcccacggaggaggaagctcaaagcgaggcagaaggggacatcaacagcgtcttcccaactcaggcaccagagacagacagtcccgggtttgagtccagctctactcttttccagctgagtgaccctgggcagccttactcatccgttcagtttccttttctgttaaattgtgggaacagcaagggctgcatggtgacccacgtcgagcagtggacaacctcctgaacgcagcacagcagaggcagcaggaccacaaaacaggggcctcagaggggcaggccctggcctcggtctccatgggaagtgagcaagttcacaggagttggcccagggagcagcaccctgtggtacaagcaggaggatggtggtgccatctttggtgcctgggtactggaggagggtgaggccaccaacagcgctgctggcagcagaggagggcagaggaactcaggatcagggcgtcagaggtagtataggccaggagcctgcaaacagcagcagcagggaagagggtcaccaatcactctccaggggacaaaattaccctccacgcagcagccatcctgctctgcacccacacaaggtcccaatgcagcagcacccatatttcctaagtgccaaggcccatgtgcagaggtggccacgcctagtggaacagcccacagcccacatatcagttccccttgccccagctggaacacgggtgtctctgctgcctccatgcggctggcaccctgcccatccctccctgaccacagccttaaacggaggggagcagggaggctgcagagccttggggttttccctcctggtccaaggctgctttgtacaggcccatccttgccttcaacagcaatatgggcaccacttaagacctcagatataaaaggtgcattctctccttgggaaaggcttttgaaattattctgcaaagcagaaagaaaagcttcagcccctaccaagagcacctgcagcctggcactctcctcaggcagtcttctgagactcacctcccaagtgccacagtgccctgaaggaccccccactccccatgagttctttgacagacacttcagttcttccttttctacttagcctgaaagaaaaaccagattctccctgatcccctgagggggtgtcaattctagtggccctgctgactcatgttagtcctccagattgtgctgcttctgccagtgtacccacttgcatcagaacagtccgcccactacccaaggaaattctgccaagaaaagaagccctgtctctccagacattcattcccaggatttagtgtaaagtaacgtggaactgcccttccaaaaactgcttgttaagtttcaggtacacaattaacctgcccaattaattttgcagaaccttgaaataaaacatgttttacagtaagttcacacacaggcttaatgcaaaccagagtaatgcacagatgattgccaagaccatattgacaaattgtgattagattataacgcatagtagcctgccttacattcagcaagttcaaacaggacacaaaaccagtcaactgaacacagagcagctctcttcagaagcacttccaatgagtgatgcagagatttcaaaaatacaaagcaggcaacttatatacagcaaatcctcacactgcctggacatgtgccacttttttgttgtttttaatatatttttccttcctggttgctaatttagactgaattcttaaggatttatcttgatgacttagaaaaatacacctgtcctttctcactttgtttcaggtagtacagtcatgaaattgagtaagtctcttaaaaaaatgaaagtccacagatcccattgtggaaggtttcaggaacccctccccaggtaatgatcacgggatcttcaacagctcaaggagtgctccaacagctccaaaataaccctgaaagaaaatacaccaaaaataagtgcaattttccttagacttattcaaatcaccttacacatgatgactagtgttaaagccaaccactgcccacacacagcatacccatttcctgagcaccccagaagggccaaggccagcctgggagcagagacgccctaaggagtccctgtctggggagggggctggatgtcctagactatccaagcacttcagaccactgtgataagaggaaaaccaaacccgcagtgagggcgacaggagctatgaggccagcagcagctcagttacctctggtaagagacagaacctgactgtttctggggaatgaggtgagaagcagcagaggcctggagcatttccagacaactaaggaatgaaggcgaggtcggatgcaaagtgcaatgaaacaggtgaagttgtgaggtgggtcacagagggtgagagcccgactgagctgggagagggagggagagtaagagataagatggattcaagattcacccctaacagaggacaggacagcaggagggggcagcatccccgagaaaggggacacaggagtaagaggtgtggagagcaaggccggtgggtgagttccctacaggacatgggaagctgaggtgcccacagcagccaagcagctgtgcccgggtggtcaccagacacctggatcactggcccagaagcaggcggcacaggaatgaaaaccaccacccaaaggtaacgtgaagagaggtacagaacaaagagcaaagcctgaggaagcacggaggctcccgagggagggcagccctcagccctcctgagacacagaagcagcagctgagagacgacaagcactgtactgtctccagaagcagtcaggtcacatgcaaccaagaactcaaaaccaaaacacaggaatagcacattagagaaaacggggcaaaccccataatgacagaaaagagaacactagcaagaatcagaggcaaatcctaaaacgatgcagaatccatcagggtctccaacctgtaaggtaagatatcagactactttttaaaagaaataactaaaaaaggaatgagaagatcctgaaagacttgtgtatggattttttaaaagtctctgaaacataaataactaccactctatctttcacgaaaagcttcttcaagaaacctgatcaaacgagaggccaaaggctttcttgtcacactctagttggcaatttaaaagaaaggcatattggctgggcgcagtggctcacaggtaacccagcacttcgggaggccaaggcaggtggatcacttgaggtctggagctcaagaccagcctggccaatatggcaaaccccgtgtctctactaaaaatacaaaaattagccaggtgcggtggcacgtgcctgtagtcccatctactcaggaggcttagacaagagaatcacttgaacccaggaggcagaagttaaagtgagccgagactgcgccactgcactccagcctggctgacagagtaagaccccatctcaaaaaacaaaaaaaagaaaggcatattgaccatctttggttttggtgtgtataaataaaataaaggcagccacaccaatctgtgatgtgaggcggccagcagctacaggacaaggcacagctgaaatacagaggcaaggctgtttgtcttaatagttcactatacagtttgttttaggcagctttctgtaccttttattttataataaaaatatagaagatacagttaaccattatatatatatatggggggggtccactgaagactaggatgctactatcaagacagaaacaggtggttataaactacaacgtgctaagatgagaataaaggatcaaagaggaaacgcttgagagaatctatacgaagctttcacaacaaaagttaaagtgacttcaatgtgagggcaagaaaatatttcaaggctcagagaggctaaaataatcaaagttctgaactgaacaatgagaacacttggacacaggaaggggaacatcccacaccagggcctgccatggggtggggggaggggggagggatagcattaggagatatacttaatgtaaatgacgagttaatgggtgcagcacaccaacatggcacatgtatacgtatgtaacaaacctgcgcgttgtgcacatgtatcctagaacttaaataaaaaaataaaataaaataatcatcaaagttccacaagggcagagatgcacacaagagtcaaaggcctgaatgcaaatggaaaacacag

SEQ ID NO: 96834 - DNA, 15577 bp, Homo sapiens
aggttttgaatttgttccttgtgtagatgcaagattgttgttgttgttgttcttatcctccagttaaactaatcctgactagccgcttatgcatacactctggttttcctgagatagataatgtagttaacacaacacaattattctttgggcatgaaaatcagtatgcagtatatatctccccaggtattttctccccaggtatttcaggcaagagttgaataataaatttatttatctaactacataggcaactataaatgttcagcatgttgtacttcttgttattttttatttctcttaacctaatcttgattagtttgattgcattttaaaccctaattaaaccaaaaagtttttaaaaacctttatattgtatactaaacacatagttcctaaacactataatgggaataattgatgattactaaaaatttatgtcaaagaacagactttaaggtaagattatcttaaagtctgtccttatattttataatgaattttggctctttagcaagttctttttaaaaatgttaacaattgacttatagtaagtcacaaccccaagaggccaaggaggctcgatttgacttttccatgaacatgcttaatacatatcatggcttatctttgaaacttggctcctgatgttaacttcagggataagaatgggacttacttagatatctgtatatgtccttcattaggtcctgggtatgttctgttctgttgcattaatctttttgctaattaacatgtccccattgctcccgtctaaagggatttgacaccggatataaatagaatgtgattgtctgtgcttctcccatctgttgtctggtgcgagatttttctagcagtgtattttggggctaccatagtgtgaggttcttgtagggggaaacagtatgaggtcccaggcgagtcaatgatggagttatagggaatgtaggttgtgtgtgaccctgttggaagactagtgaaaatgcttagagttttagaatattatttttgatgttgactttaagtccatgaaattgagtcaggcctgcctgcctatgccttagattcctttggaaacctagattcagataatcagtgtagaaaggttattggaggcttggcctgaagaaaggagagagtgattctagcctgttcaagtgattaagtgagatagactacccttccttaataagaaaataactttatttaacaaaatattattaactttattaacgaaataataatttcaaagcatatgaatcataaattataaaagattcatacatttactgttaataagtttccaaaaaataacaaacacatatctgtgttcaaagtacctgttttaggctgggcacagtggctcaggcctgtaatcctggcactctgggaggctgaggcaggtggatcatttgagcccaggagtttgagaccagccttggcaacatggtaaaaccctgtctctacaaaaatacaaaaattagcctggcatggtggcacacacctgtagtcccagctactcgggaggctgaggtgggaggatcacttgagcccaggagttcgaggctgctgtgagccataatcttgccactgtactccagcctgggtgacagagctagaccctgtctcaaaaaaaaaaaaaatatatatatatatatatatacacacacacacatatatatacacacacacacagaatgccttttctataactgttaagtatattaaagtaaacacacaactgctagaatttttgcttttagtaacctttaatttcttatgtactttcaacttctgttttgtgagagttacacaatttgaaacagctgcattcttatcccaatttaaatcacctattccagaatggcatttttgttaacttctaggatgatagaaaagtgtttgtcaattgttttcatgtcttagccacatagagaatatttacgtagcatgccagggtaaaggaatactgggggacaaagctgcctgaggctggctctgaatggcccagactccttgaaggatgacatgtctgttgggaagctaggatccaaattttttttttttgtaatctcaccaactgagtcaaaattaaatgagtaaattagatagactaaacctgagataaaattgttgagtgtacaattttccagaatagaagagtaggataaattaagatgatggatatggtaattacactgatttgatcattatactgtaatacatgcattgaaacatcacattgtaccccatcagtatatatagttactgtgtgtcaattataaataaaaaagaaaagtcagaaagaaacattatgtcctagaatagccagtaagcatataactatcacattaaaaggtaaggttttcaaacctgaatcatttcagatggaatgtttttttttctctttgttgttcaaattgatttaatggcttagagcttattgttctccaacccaccaagccttcctgcaactcattgccccacctcctgggtctcctcagtttgacattcagggctttctctggatccaagacccccatggagatccaacttagtttagcttagagcagccaggcggtgctgctgttctctcctgactgcccagggcattaaatgcctcctccttcaaagtcatcctcaatccttccccacccacagctggctgtaacatttgtgaaatgttcttccattcaatcaggggttacccgttggtgaggggcagcctatatacagagtggtttggttgtccagaatagtgtatttaaaaagacttggttcatagtgtctatcttcttatacctgcttggttcatctatttatagtgggttctctgtagacttttggctttgtgaccactttctaaattaatattttcctgtattatgtcacatttgaaaagtaggaaattcttaattatatccttgtctcttgtgaagacttttgactagctgctaattattagtctaagaatatctgattatagaagcaaggcctaattttgaggtcctttggtaataaatgtcctatctattcactgtaaaatcacttttttccttccaggtcttggtggtaatatcagaatgtttctatgtgccacttccaaggcatttatctgagcgttctggtaagtacgataagctcctgtgatctagagtgtttttggaattctgtgatgtgcctttttgtgctcatatagatagtgggttttctctgtgatttactaggtgaccaaataatcactaccaaatttcttaaaatgtgttttctaggtagatttgaacaaaattatttttctccctttcttaaattaggaaatatttcattttggcaattgctttttctttttaagtatgtgctcttcattaatcagtgtcatattttcctttattctaactagaactagaagggaagaagggaaactcaatatatattgcttctgctgtgtgctagtaactcttctaagtcctttaaaagcagtcttcccaaatccttgcactgctccacacttcttctggggccaggtgcctctggatttgcatgtctttattccagactatttttgagactgcataaagatgttcatgagactttctaattgttgaattttatgtgggagtttaaataagctcatgtttctttttagttcttgaagtttttgaggctttgagacttccattgataatttgaaaatatgattcttagatttcttaaaagtaatagaaacccaatatcaaggattttaggaaaacaaatgaaaatttattagctcacataactgaaaagcccagggacattctagcttcaagcacggcccaagtgatgttaggtttctctgtctgtgtggcttattcataagagctgttgatagtccttgcgcattttctctgtttaaaaatccctgaagaaaaagaggctgtttctcctgactctggcccagaacctctgtggagtactttgagtggcttagcatgtcacatttctgaaccaatcaccatgaccaatagggtcactgagctttctacaagacacaaaataccgagcgtaaaggaccctttgcccttgctgcccacatgccctgctgaagtcattatggtccatgaaatctccagagacaggtggagaagccctaaatggggctaggatgccaaccagagaatctgtcctatatgaccatagtttcaagatagaaaaaactgtcacttaccctctatttttatttcacagctaaacacactcaattgattaccgaattaccattgtttattcagaggatattcctctttcttccctccatagagcagaatcggagatcagaggaggctcatagagctgaacagttgcaggatgcggaggaggaaaaagatgattcaaatgaagaagaaaacaaagacagccttgtagatgatgaagaagagaaagaagatcttggcgatgaggatgaagcagaggaagaagaggaggaggacaacttggctgctggtgtggatgaggagagaagtgaggccaatgatcaggggcccccaggagaggacggtgtgacccgggaggaagtagagcctgaggaggctgaagaaggcatctctgagcaaccctgcccagctgacacagaggtggtggaagactccttgaggcagcgtaaaagtcagcatgctgacaagggactgtagatttaatgatgcgttttcaagaatacacaccaaaacaatatgtcagcttccctttggcctgcagtttgtaccaaatccttaatttttcctgaatgagcaagcttctcttaaaagatgctctctagtcatttggtctcatggcagtaagcctcatgtatactaaggagagtcttccaggtgtgacaatcaggatatagaaaaacaaacgtagtgttgggatctgtttggagactgggatgggaacaagttcatttacttaggggtcagagagtctcgaccagaggaggccattcccagtcctaatcagcaccttccagagacaaggctgcaggccctgtgaaatgaaagccaagcaggagccttggctcctgagcatccccaaagtgtaacgtagaagccttgcatccttttcttgtgtaaagtatttatttttgtcaaattgcaggaaacatcaggcaccacagtgcatgaaaaatctttcacagctagaaattgaaagggccttgggtatagagagcagctcagaagtcatcccagccctctgaatctcctgtgctatgttttatttcttacctttaatttttccagcatttccaccatgggcattcaggctctccacactcttcactattatctcttggtcagaggactccaataacagccaggtttacatgaactgtgtttgttcattctgacctaaggggtttagataatcagtaaccataacccctgaagctgtgactgccaaacatctcaaatgaaatgttgtggccatcagagactcaaaaggaagtaaggattttacaagacagattaaaaaaaaattgttttgtccaaaatatagttgttgttgatttttttttaagttttctaagcaatatttttcaagccagaagtcctctaagtcttgccagtacaaggtagtcttgtgaagaaaagttgaatactgttttgttttcatctcaaggggttccctgggtcttgaactactttaataataactaaaaaaccacttctgattttccttcagtgatgtgcttttggtgaaagaattaatgaactccagtacctgaaagtgaaagatttgattttgtttccatcttctgtaatcttccaaagaattatatctttgtaaatctctcaatactcaatctactgtaagtacccagggaggctaatttccttaaaaaaaaaaaatctatccatctacttctctcttacctgatttatgtgttagaataaattcatgaaattcgattccaagcatacgaaagatgcctaaagttgattctatgctccttagatccagacagaataatgagtacaggtttatgaaattctaaaagtttctgtcgtctttaaaaaggaacgtgcagtatatttctatctggctgtttagataaccctttccttgtattaattgtgagcayggagctcactkgtgggggaggttctgaaactctctgccctcctgtggttgaatgaagatgttgcaagacttgcacaaaggaggttattcttctgacagcatcaacttttagagatggttctttttcatctttccaattcagttacttgacagtctccttccccagtatgctgaagtttgttaagagtcaccagtaattgtgcttttcagacagtagtgcagcttcaaaatcgaggccatcactgggctgatgggctgggagaaccttgccatgtgcctgcctgtttcctgcccccttagtcactgcccatttcctgcccccttggtcgctgacacaccttcacccaaagtgccatggttctgatggtggcagttccatctccctgacatcaggaagcttttctcgatcagagcagagcggggcctgcctgccctcgtgtcactggatttctttctcttataatcagctgaaacagagttctcaaagaacagtaaactcaggttcagaggtattatggaataagaatggtttcatagtttggcttttctatataatkcctccctctcaaactgaaatattcatttttttagtggagtatttgaytagagagaaggtaaggcagaaatacagtctacactggcttttaaaaatgtaaagccaatttccaaccggaccccaaatagtacaggttgaacattccgttccaacaatccaaaaccccaaatgctccaaaatcttaaactttgagttccagcattccgtcagaagtggaaaattttacacctgacctcatttgacaggtggcagttacagtgcaatcaaaactttgttccatgcccaagattattaaaaatattggataaaattaccttcaagctatgttgtataaggtgtatataaaacaaatgaattttgtgtttagacttgggtctactcccaagatacctcattatatatatacaaaaatccccaaatccaaaaacatttgaaacacttctggtcccacacattttggataagggatatttgacctatatctaattatataataagaaaaatgtattttcttttttttttttttttgagatggagtttcactcttgttgtcgcccaggctgcaatggcacaatcttggcttactacaacctccgcctccctagttcaagggattctcctgcctcagcctcccaggtagctgggattacaggcatgtgccaccatgcctggctaattttgtatttttagtagagacggggtttcgccatgttggtcagactggtcttgaactcctgacctcaggtgatccgcccgcctcagcctcccaacgtgctgggattacaggtgtgagccaccgtacctggcagaaaatgtactttctttctcagaaatacttttaaaaaaaattgaagggtgaggagaaaaacatcttggagaagaggacccattaaaactttaaatatctgtgggaaccatttttcctgattttcccttttttaacatcatggcaaagatgggtttttttccaacaaaatttaatttaatatctttccacttgaagattttaggtttgttttcaatacttaatgaatataaaactaaaggagaaaagccaacctgaaataatttaaactttatatgaacatttcgataagagtttgtggattttttctgtagataatatatttgatccrgaactcaagtgcatggaaacatgattttgatttttaaaatctaaaaaaaaaaaaaattaaaatcatgcttccctctattgcagtatcagttatttagtcacagaatggtattttatgtaaattaaaattaggtgaatgcaatgcaggtaactggttttggaatgggaatgtgcagtgctttatgtttggggagttggagcagggtatcttttcatcaattagaaggaaagtttgaaacttctgattacctttatgttggtttctcttattatttgtctcttgctagatctgctaaaccaacccagcttgctcagagatctcatattgaagcaacatacaggcaatccacatctttctttccctttgaagtatagtcattggatgggatgagggacagggcctgttgggttcacagggccttgcactgcatgggcacatacttaaaagctcttgtgcatggaatccctgtctgttagccacaggcctctttagctctatacattcaaaataactactgtagtagaaaatagataagcttcagctgagttggcttttgatagtggaaaaaaaacaaaatttgactttttatggccaaaattccttgttgacagctgtgatgttctaatatgatttgggaatatgtcagtctacagaacctgcatcctgtaaaaacacctttggggtagacgataaaagtcatttttaaggcaaatacttaccatgtgactttttattaccaaatgcatcagyagtggagctggtatgttgtttcataggatggaaacattagaagtccagagaaaaataaattttaaaaaaaggtggaaaagttacggcaaacctgagatttcagcataaaatctttagtatgaagtgagagaaagaagagggaggctsgttctgttgctcgtatcaataggttatctgtgtccctcatcttggtgttacagtgttatttctgtcagtattatgaatatgtggttgacccatcctgtcaaatgtaccaacattttcgaaagaattcattcaaatctcttatgccaacagaaaagttccttcttgtttaatatctctttacctcagtcctacattttgattctctggaggagattttagcttgtcttaaaaagccaaatttggagtcatcaagcctgctgaacctgatggggcagctttttgaacagctttctggaagtaagaacttcagttgaaaagccctttgatcgcttcagcccgggacatgcccttcagatggcttattctcagtaaagctttatgtagactgtgacactgtatatgtgtgactcgtacaactttgacgtgtttctgaagtggtttaatcgtatttgttattagcttctttgtggaaatgcaatttttatactaaaaacattgcttatttgcaatgcaatatgttataaatttgttgtttatattactggtattagtcttagcctaatgaacctaattatttttctttctgtattctttgcttcctcaaatagcatctgcagcaattggaatgagaaatccagatatgtgtttcaagtagtacattgcctgaatcacaaatcacttgatcacagtattgtatataatccctgatcctatttgtttcattttattgtaaattcccatttgcatcaaaacctaatgatagtgattggtaagtaaaaacaaatggtgtattgcttttcatacaagtgttttcacaaaagccatttgcctaggcagcaaaaaatattaatttgttaaaaaaaattttccttcgtgtccatcctccatctagtctgttcattcattctctctctttctcccttcctgactcggtgaaactcagaccatgtgccctttagttgctctggaaagtgcacaaaaccaaggcagggtccaaagatccaaggctcttccagccagtgtgttgccatcagaaacctctggggtctccctctgtcctgaggtcttggggtagccagatggcaagggatgctactaatcccccaagacactgtggattggtcttgtctttggggctttcagaaaactcccttctacacctaactctccccaccactatagtggaaaagcatcaaggtggtaaggtgggtccttgaaacaccctcagagactgaaacaatggagattggatttttgtcttttggaagatggtgggggatgtgtgtagtgagaagacagttactaaacctgcataccaccaaggccctccctcagagatactggctcagaatgcttatttgcctatacagagaaaaatgtctgtcgtgctgtctgcctagatgactttggttattcatccttgcctatagcaaaatgcagctttcaagccaacaacactgaattacaaatttaaccccctgctttgctctagtcttgaatgctctttggaacatatttcacagtaatagaaattctttcttggaacatgtgagcttcttgagattgataactgtattacgacagtccagcctgtgctaacagacccgcaaatctcgggggctttaagaacaagaattgtattactgattcacatagcccaggccaggcatcccaggcaggctctgtcccatgcaggtttttctgggcctcaaggtcaagggaggctttgctgtttaacatgtggctgctgggccgggcatggtggctcacgcctgtaatcccagcactttgggaggccgagggaggtggatcacctgagatcaagagtttgagaccagccttagtaacatggcgaaaccctgtctctactaaaaatacaaaaataagccaggcgtaatggcaggtgcgtataatcccagctactcaggaggctgaggcaggagaattaattgaactcgggaggcagagattacagtgagccgagatcatgcctttgcactccagccttggcaacagtgcgagactccatctcaaaacaaacaaccaaaaaaacgtggctgctaaggtggctgtgatcatttccatcccagtcagtcagaggagtaagagatggaggaacattgctgagagattttaaagcgaggctgccacacgtgcatcatttatgttcacatttcctgtgagaggacttagtcacagggtcatacctaacttaaaggaagactaggatgtgtaatcttgctgtgtgcttaagaacaaagggaacttgagagctagcaatctcttgccacagtgactttttcttgcccacctttgtgagcctaggaccttctatagagtaagctcctgggacatagtatgaatgcacatatggcaggagagggcagagtacatatggccccagtgctggaggtcttcctgctggacttgaccactgtggctcttcaaggtaccagagttttcaaactgagaattgtcatttcatggagtttgtattttacttgggaaggtgaatattagcaggaaaagagttacaagtgaaaaagttaacaaatgctatatgagtttataaaaaggaacctgacctaggttgagggtgtagatggtatgtgtgaccaggagggctaattaggggctgtggaggctgaggtggtgtgggaccccttaggcacacacaaccaaactgtaagcagcatgtatggaaacagaagatagcatgtatctcaaagagaatgtcatggtagattcttgccctcattttcttttttttgagggagggatggaggcacagtttcttactaatctttgcatgagctttttctcatttcaatatctttgatatcccaatcagtaggctgggcacagtggctcagccctgtgatcccagcactttggaaggctgaggtgggtggattgtttgagttcaggagttcaagaccagcctgggcagcatgacgaaactccgtctctacaagggatacaaaaattagccgggcttggtggtgcctgacctttaaaaggctaatcatgtgaatctccaaggataagtttagtttctagcatttccaaacttacttgaaaagtgatattgtgaaatacattatttgaaaaccatcccactacaaaaactagaaatgctggctaaaatataaccagtatctttttaaagatagaactgagctcaaaagagagtaagaaaaattcacaaagccaaaaaccaagaggtcaataaatatgaccggatattggaactgccaccagtggtggtggagagagcagctgctcccttaggtaaccagagagagtatgttttattgtccgtgtaggtataggatgcaaaagccttgactatagccaagttagaaagctggaactgaaacataaaattcccagctacatccttggtgaaataaaaaaatctcactagaacatagacacttcaagaaaccttttctgtcttggcctggtctatgtgttgaaaaataatagacttccctaagaaatcacaatcaatggtctgaccttacacaacttggagtttgaatttacagtagcttcatagtctcaaaaggacctaaaccaaaacaattctcataaaaaggctaatggggtcggcgggatgtgtacatggtggggcggcggggtggatatactagcagaagcaagcacagagctgctcttgaaaacaccctcagtctggcttaaagattcccatagatgaagtctcacttaaaataaacttgtaattcaaagttacaaatcacacaaggaaactgtttatcagatagcaaggtgagacttgcctaaatcctttggataaaactgttaaatagaagttttaaattaaaggaaaaataagcatgtaacacataacacaaaagaattaggcactttttttccctcaaaatagtgtattttaggttcatccatcttgcatgtgtcagtagttcaattctttttattagtgtgtagtatttcattgtataaatattcaatgtgttgcttataccttccactgttgacagacacagagagagtttctagttcttagctggtcctttgaatattttgattgtgaggcattccctggactattttactaaatctttgggagaaatgccaaaatgttagaaatatattcctcaggattttccaagatttgttcttgtatcatcagaaagcaacatatattaccctagcaaggagcagatgtttgagaacacaaacactagaacgagtcttcctggggttggatcccaggaagactctgggatctgccacttgccagcggtgtgaacttgagtaagttacccaacttctctgtgcctcatatttgcaatggggataataaaagacttccacatccactaatgaaggtctagacgattttaaccacctctcccaatgaagacaactaggaaagctgaatttaaaatatatgtatagctacacacttgaaggcatcaaagtatacaagatgatgaaggatatcaggccaagatctaggagaaattgtaaggtcaggaatgtgatcctgttgtttggggctgtttttctcctgagggcatttactgttcctggagtaggggtaaggggtgtgttgagaggctgagtgatggttatgagggctttgtcttctgaggggacagggattggctaaggatgggagggcctgtgaaggactcacattaggaataaggatgaaccataagtcagcagaccccacagacactgaaactcagccttggtctatccaacttctgaaatcagaatgatgtaatcctggaagtaagtgtaaatgctgggggaagttaactggtagaggttgagttcctaggttggatggtgggttttctacctttttttgctatgagatagaaagccatagttttagtaaatcctgaggttcataaagctttatcattgtggactatcgcattcaaaggactgtaatctagctatcaaaagtgaaaattgactccttatttttctttcattctttgcctcttttagtccccaaagctatcctcctgctccacttcccctctttttgtttttatgcctgaaatttctctagggtgtttccaaagtgcaaacactaattgttctcttttcctaaccactctcctcttacctactactcctccgtctttactcctgagagaaagctcctttctccacagttcccttctaacagatatcccatctctgcttataagattcttctcactgcataataaagccatggagctccaggaaagtagtaaataccaaaatggcattgccagaattttccttgactggggaggaggtgggtgggaggccatgaatatccatgtgtcaaaaagagctgagcctatgtgtctattacactttacatctgctgccccccaacttctctaatgtatactgggtagatcaaaattcctgtcaggcacttcgcaaagaagttcaagcttagcttcctccaccaaaattcatcattgtcctctctgcaaacattgtaggcagagaatgggagaactccctgatggccaacatattacatttaggatttaatgacactctccctcccccttccccatttggagactttctagtcctctcctccagtccccattcctcgggtaaagaaagatgatttagtattaaataccctcagggtggaaactatcactagatgctcctcttctccacgatagaagtaaacaccaatcatgtccagtcctcccagtttggctaggcagacaggggtgaccctcatgtggactcatccatgttgagttcttaaaatctctcattgcaggaaacctgcttgccctggaggcaaattggtgcccagtctccaagaagagctctctgtgggcccatgcttgggatttggatcctgcttatgttcacccttataaaaagactaacgaagatggagtgtctttactatgacttctagctccctaaatctgctcaaagcctccagtgtgagccccattagatggtcttggaggcgttacatttcattcattgtcctcctcaggttaggtcatcttcaccaataatgagaggtcatatgactcttgcttcaggattaaaacccagaaaatcatggcttgctcacccatctgctccaaccaggacatttgccaagcctccttccatcactcctggcagacattccaccttaggaattcttttagccacttacttcttatggctacatcctctcagaaacatctataacatgaatggcagcttttctagctttaactttataaattgcccctggtgtaggatagtaggtgctgcatttcttatttttgtgtccatacatcttataacattttagtgcaatgctcaaatcacaactcaaggttttttgatttggcccttccttggcctgttattttccacaaatttctcaagtttctgggagctattagcctgctgcaacagttccaaagcctggttgaagttgacttccatggcagcagccagatgcctttggaatgaatgtgctcagcacagtagggcaggcagcggatttgactgctccaagcaggattgacactggctgtctgcctctgttagggatgcaatgtatgttcttgagaaatgagagggccactgaagctgtcttaaacttaatgtcaagtttgcagtttcacaagggatatttttcttttaaagataatctcaattttactgcattatgtttgtttcataagtctgatattcaaattggaaccatgcgtctgtcctcctccctaccaaattacagtttttattttatcaaagcctcaaccacattgcttgggctttctggagttataagaactcactcttaatttctcatttatttattctgttgttccaagagtctggttttcat

SEQ ID NO: 96835 - DNA, 107800 bp, Homo sapiens
  misc_feature (1)...(107800): n = A,T,C or G
acctattcaacacatagactatgttctttctgcgacaggcactagaaatacaatagtgaaaaagataagcatcatcccttccttcaagcttatattcaggcagtagaaagacattaaataaatatgaaatcattataaatcttttttttttctttttgagacggagtcgcactctgtcgcccaggctggagtacagtggcatgatcttggctcactgcaacctccacctcccgggttcaagcggctctcctgcctcagcctcctgagtagctgggattataggcatgcaccaccacgcctggctaagttttgtatttttagtagagacgaggtttcaccatgttggtcaggctgttctcaaactcctgaccttgtgatctgcccacttcagccttccaaagtgctggcattacaggcgtgagccactgcgcccagccctgaaataattataaatcttaagaaatgtttcggcttggcacggtggctcatgcttgtaatcccagcactttgggaagccgaggtgggaggatcacctgaggtcaggagttcaagaccagcctggccaacgtggtgaaaccccatctctactaaaaatacaaaaattagccaggcatgctggtgggtgcctgtaatctcagcaactcaggaggctgaggctggagaaccacttgaacctgggaggcggagtttgcagtgagccgagatcgtgccattgcactccagcctgggcaacaagagcgaaactccatcttaaaaaaagaaatgtttcatacaagaagtagaaagctgtaacagatagggaaacagggagctacttcagctagggtggtcagggaaaacccctctgaaaaggtgacactgaagctgagacctgaagaatgaggaggagccaggcatgagatgagctggtgaaaaccattccagatacaaggaaaatagaagcacaaaggttctgagctgctctgcactcttctgaagatgcccctgctttattccctgtcctttcattttggctttctgaaacattctctaacttcactgattttaagcatcccttaattgagtactatcaataaattttataatgccctagtaaaccaatcacaaccactttttatattattcttctattttcttttcttttgttgaaacaggatctcactctgtcgcccagactggagtgcagtggcatgatctcggctcactcactgcagcctcagcctcccaggttcaagcgattctcccacttgagcctcctgagtaattgcattacaggcgcgtgccaccatgcccagctaatttttgtattttttttttagagagggggtttcaccatttggccagggtggtctcgaactcctaacctctggtgatctgcctgtctcggcctcccaaagtgccgggattacaggtgtgagccaccacatctggcctattctactattttctatattattcatttagtatacatggggtgcttaccatgtatcgcacaagtgctatcaacacaaaaacaaaaataatatatggtacgagccctggaggaactcacaacctgcccagggtgacagatgaatatagagacaacagcaaaaccatgtgttaacctaggagagacacatggaaatgctatgggagcagaagagtggctaatgtacactgggaaggaaaactgataaagtaccttcacagacactgtgtaatttcatccaaattaaaattcttttaagacagtaggttaggaagactgtatttcatagataattgaaacccagataaggttaaatattttctccagtttcgtaagagtaggcaagccagtatttgaacccaggccttacaaccaatctatgctgtttccacattaaaagctaaaaggccaccacccagattatctcatacatgaagagaaaaccaaaaaagctaggcaactagtcacacacatggctagtaacaaggcctgaagtagaatcttgtctcctgatccccaaggcagggattcgccatgttggccaggcaggtcttgaactcctggccttgtataccattctgtatctagagcagggtttcttaacctagagtccatgtatcccctgaaatatatgcaacatgagtgtattcttctgtggaaggagtctaaagcttttatcagatgctcaaaggactgagacctcctaaaaaggacagctggtctataacactttcactttcatccccatctgagtaccaatgatcatgtatttccagctcttggtttactctctggagggacagtgtcattcaaaaggagggtcctcaagacctcatagtcctaaagccaggaaggagctctcaagtcatacaagacggaattccgactagaaataaaaactttatacgtagtcattactgtggtaaaataataatttttttaaaataaaaactttagaaatcctttcagatggactcttaagtcactagccctttcatatgagttcgggtgtcagaggctatggtactgtgtaatgtagaggttcaatttagagtcagaagattttaccactaagcactgtaagatagaaaggtactttactctcagggctatagttttgttgatccaaataaaagcacttattatggttaatggtattcagtagatgtccagtaaatatcacttgaaggtatgaaccccaatctttatattaaattaaaacgtgaatgcttgtaattagatgttttcctctatacttttacatcttcaattgaaagagctgtagttgaaaatatcatttttttctgttacttttatactcttttacttagtttattcagaaattctggggttatttaaagagacagtgatgattgttgagaaaattatagagctgctgcatacaaaaaacacagtgtaacaagctagctttacaaataacaggtatgcaataaatgttagttctttcccttctcaaccagtttcctcaaagcattcattactacttcaatgaatgctttgaggaaactcaaatcctcttcttggctctcattgagctggatcattagggtctcagtaggttttctccccccttcaaaaagatctcatctctctgatctcaatctgctagtctcaaggctcttggtaagggttgtcgcactgcacacagcacagggtggcctcatcgtcagctataattctgaaattacagattatgctatcattttctttaaatgactcagtaagactcacactctgatttgacgaataggtccatatttcccaaatatatcatacatttcttcagctgtgattttgtatggcaaatttcttatatacaatatccgatttacttcaggtggaagtcgaatctaaaatgagaaatacgtattgttattataattaggggcattctaaaaaattataatttaaatgcccctataattaggggcattttaaaaaattcttaatgatacgtaataataaaaagccaagaataagaggtataatttgatgtttctgaaaatgggcagatctttgaaaaagcaacagaggctgggtgcagtggctggtccctataatcccagcactttgggaggcaaagtgggaggatcacttgagcccaggagtttgagaccagcctggacaacatagtgagacccccatctctacaaaaattttaaaaaattagccaggcatggtggtgggtgtaggcctttgcaaaccttaccaccatcactcctgctaacacctgagttgggctgtaccctcttccctgcccatcccaggagatgaccctgattcttgtttcttggagaaaatagacatgaccaattgaaatacttttcatctatatccaactactttccctctattactacgccaaccttcatctactcaaaaccttcacttctaaactcaacctatctttcttccatatcatgtttcgcacactctgctggattgctcccattggcataaagatacacctatatcacacatcttttaaaaagtcaactatctggccgggtgcggtggctcatgcctgtaatcccagcgttttgggaggccaaggcaggtggatcacttgaggtcaggagtttgagaccagcctggccaacacggagaaaccctgtctctactaaaaatacaaaaattagccgggcatggtggtgggcacctgtaatcccagctactcaagaggctgaggcaggagaattgcttgaactcaggagacagaggttgcagtgagccaagactgtgccactgcactccagcctgggtgacagagtgagagtccatctcaaaaaaaaaagtcaactatcatccaatttccctacttcctatttaaatgagaactcatggacagagtgtctttgctgtttccattttctcaacttccaccatcttttcaccccactgcaatcaagttttcatccactgaaatgattcctatcatcaaggtcaccaaaagtctccatttacatatacaatggtcaattgcttgtcttttctttctttctttctttctgtttttttttttttttttgagtcagggtcttgctctgtctcctgggctgaagtgctgcgcagtggcacaatcatggctcaaggcagccttgaattcctgggctcaagcaatcctcccacctcagcctccaaaagtgcggggattacaggcatgagccacctcactcggcctaacttcatcttacacctctaagcgttttactgttgactaatctcttttttgagttttttttttttaaaagtttccgtaacactgtactctcaaacactagaatgtaagcagaaggacttgttttattcactgctgtattcccaatacgtaagactagtgtctggcacatagtagctattcaataaatataattgatgaattatgtcccacatggcaagcagaatacatagtaggtgctcaaaaaatattgttttaattaatgtgttaatgaaggatccgaaaagcaccatgatctgaggggaatcccaggtcctagttgttggtgaaccattaagttagttgaggactcttctgagatatcgactttaagtcaaggagataatcctaacgccaggtccttaggtgcgggtcaagcaaagaggctataggggtaacactatcactgacactagggtagagactgaggaactctcaaaaggggtggggacagaaatgtggctcaaggagcatatctctgaggatggggccggatagtgtcttcgctgacaggataggaattctggagttctccgctctggggacggaggaggagcaagaatgctccgatccacgccgctaagaaagtcaaacccgaagttctcccaccctccgcagaacacccgatactcacgttcgccctcttggccgcttgcatcgccatcttggcgggctgatgaagttaccgtagcagatactgaaattcctccggagctcgctcggcttcgggggttacaccgcgttagatgcaggacatcaacatccaggacccgccggaagctgttacagcggaatagcgccgtcttacgctgagacgcgctgacgtagcagcccccttcgaatagactccggggtaaaaccgagcctgagcgagactcgaggccggaagatggaaaggcgagagtccaagacacttccgggctctgtaccgtaaagggcggggcgtagcctccaaaaggcgagatgttccggtcggggaggccctgagcagaggaacccgggtggagagggcggggcctgaggagggcggagagctggggcgggtctcaggtgagtaactggggagcggaggaggcggggcttgagcagggttatgacaggtagggcgggacccaggtgagtagcgggagggggcggggcctgaggagggtgcggagagctggggtggggcccaagtgagtatccgggagggagccgggcctgagcaaggcggtgagctggggcgggacccaagtgagtaatggaaggggcggggcctgaggagggtggtggcggtggggcggggcccagatgtgtagcgggaggtggtggggcctgaggagggtggcgagaggtggggtggggcccaggtgagtagcgggcgaaggcggggcctgaggaggactgagctggggcgggacccaggtgagtagcggaagggatcggggcctgaggagggtggtggaggtgcggcggggcccagaagtgtagcaggaggtggttggggctgaggaaagtggtggaggtggggcggggctcagatgtgtagcgggaggtggtggggcctgaggagggcggcgagaggtggggtggggcccaggtgagtagcgggcagggctggggcctgctgtggtgcccactggttgcggggcgcgcgggcaggtgccggaggtggtgggcctgggcctctagctgtgcgcaaggcggaatatgtggggttctggcggcttgtgtcacggctgacgctgtaactatacccagaatctccgtccctggaggggccctcaggttgagcgtcagctgatcgggcctcagtartccccgctgcgacgcccgtccggactcccacctcaaccccgccgcggcggccccagtccgcgtgccacccttccagttcactctttatttcctcatatcagctttaaacggctctggaggaagcaccgggtttcttggcctgtctattgtgaatcttctccaggtttgctctggaaaggcctggggtggccrcgtcctgtcctgccccatcctccttcactggggcagttccaggacgatcttgcctatgttcttgttggcctccatgtacttatgggcctcctggatttcggtcactgggtagattctgtccagaaccggcagcagacgytgggggccctccgtggagaagtgaggcagaatttgctccgtgaaagcattcaccagcatttgcttgtactaagacaagggaaaggagatcatcagcctggggagagagcctcaccctgccctcctcatcctcctcagccttcttgctctctctgaagccacgtatctgaaaaagcasacagggacacttaacccctcacttcctagcatgtgtgtgaaatacccttgaaggagtcatgtgccatctcagaatatgtccgataggtatattgttaattttgaggtgaaagcattggagaaattgtagtttcagaaaaggctagctgacctgtctcttcttgcatgtagcaagtcataaagattcctctgrgaggggtaccctccccatactagggcaaaaagcccttatcaccagagactggaaacggggctgcaatggaactgaataaatacacttaaggaagtaacccttatcttccactagttttacacmccccacccccatatatctcctagtgacttccctagaaatttactatccctagccagattttgtcttatttcttctcaaatttattgttctytgtctaaaaattacaaaagcatcttactttggccgaatcacttgagcctgggagtttgagatcagcctgggcaacatggtgaaaacctgtctctataaaaaatacaagccaggcatggtggtatgccttcagtcttagctacccaggaggctgattgtgccattgcactccagcctgggtgacagagtaagaccctgtctccataaaaaaaaaaaaaaaaaaaaaaagtacatgcttttctcctgtcaatctgctggtatcaatttggtttctagagccagctgaagagaccacataggagctaaaggggggttacaggtgatctctggctcccttgtacctccaaatgtgtaacttctgttctgtaccagataaagactgaagcctggagtaaaatgttagtgtcactgacagcctaagaattgtttttaaataaagtgtctttacccaggaggcagccacagataggactcatataggcttagtgaaaaaaggatgcttaagctctcctgtccctcagctggtgcaaaaccctatggtggaaacattcccaaagstggtacctgctagactgccagatggaatatttcaggagcatataatctttttttttttgagatgaggttttgctatgttgctcaggctggggtacagtggctatgcacaggtgcaatcatagctcactgcagccttgaaactcctggactcaagcaatcctctgcctcagccttccaagtagctgggactacaagcaagtgccactgtgcccggcatggaacctataatctgttgaaggccaaggcttacttatttttttactcacctaagagactttctagcacactgagatgaattctgcctttgaaaacaaagtcttggaactactcgaaatacttcctaatatagtcagtgctttcttcattctgttagaatgttcagataacctgtgaagtatcagctacacttcttttcatgatactgaagcttctatcaaccaatctgaatcagttctctgaaatcgggttccctctttatcttcagagggggaggtttcttcatagaaactaacctccgtaatctaaggtagagcttcctttctyggggtaatgtaaatgaaccacacttttctgggttaaatcacatgttttcttttcattcatcactcaccttattgtccctagacctcagcaaactggtgatcagacttcctcgcttaaaaagtagctttgaaaacaggggcccattgatgtcacctcctcccatcagaccatagagaacccatcgaccatcaagagccaggcagttgacgttcttctcccagtaggatccgcctatgcagtctagaataagattaactccagcaccttccataggaaacagatttgtgatgctagtcagcttggtgctaaataagataccatggtatatttggggattatggatataaatacagatgcaagtggtaaatctataggttggaattagaaacactgcttgaagaactgttgtaaatggagtttagatagcagaactctatgatagcatgtatgaagttcaccatttatgaggcctagctacagcaagagggaaatggggcaccatgacctagcgtctcctgtcatgccaaaataagtacagtcccactgacacccaggcacgattgagaacagaatacaggaggcccaacctaggctagttgttcacatagaagttaggaagtgtccgcactaggttattggaatcataggctttctagctttggtttcatctctccttttctactcacataaaaaatggaggccaggcatggtggctcatgcctgtaatcccagtactttgggaggctgaggcaggtggatcacctgaggtcaggagttcgagaccagcctggccaacatagtgaaagcccgtctctactaaaaatacaaaaattagctgggcgtggtggtgcgcctgtgatctcagctactcaggaggctaaggctggagaatcacttgaacctgggaggcggaggttgcagcgagcygagatcaagccactgcacgccatcctcagtgacagagtgagactccatctcaaaaaaaaaaaagaaagagaaacggaaagggatgagccaaaaatagacacgtctggctttggaatacagaggtgtgcacatctacttactcatttagggtgctaccacccaaccctaccatggctggctccaaactggtctctgcctccaagcctcctgttaactaagtgtggaatggctggttgggaagaaaaggtgctggataattccagaccaagtctgcatggtctaaagtgtggatgaatcttatctcttgcaagaatgcacatggaaaccatcttagatttaaatatgactgcctgtctccagtggtcaaataccatagtactagaatttggccagggcagctgttgtgcacttagcagaggtaagactgatacacagcactggcaactttgagactggtggggcttttatttaatcatctcttaaattcctgctgaactgtagaagcagttgtttacctttggtgaatttcagcgttgcttcagagaaatcctcttttttgtaattgaatccagcagctgctccaagcttttctgccatttgaagcttcttctgggagccagctgtgaccagaggaatagctccagccatccgggtgagttggatagcagctgtgcccacaccactcagtcctgcatggattagcacatagtctccagcctgaacatttcctgtgacagaaagtacagggttctctttactttgcaactgctacacattccccacacaggcatattctatcaagatcacctggccgttgcaccaaatgccaaatcaatcttttgcttttccttttttatttggtggggtgggggtgggctggtgggggtgggacgctgtgactcaaatacaaaccatcttgttctttggagaaagaaaaagagcatattgacgaccttttctgtcttattgcctctggctaaagtggaaaacagccttttgaaacagggctataagcagccacatccataatctctattttacctataacaccaaaatgcacatctctgacctacacctgaataagtaagaacaactaccattcccatggtcaccaccgaaagccagtccttctagagtctgaaactggcctccagctggtcttcctgatccaggcaacacacagccaccaggctcctcttcctaagatggcacttgcattatgttacttcctcctcaaaatgtaaagtgcttctccattggcttttgcattgagtccagacagcttgatattcaaggacaccatgatctggctccagcctcatttttcacaaatcacaatagtcatccttcactactgagtgcagtggctggtctcaccttgatactgttttttttttttttttgagacggagtctcactctgtcacccaggctggagtgcagtggcgcaatcttggctcactgcaagctctgccccaccccccctgcgttcatgccattctcttgcctcagcttcctgagtagctgggactacaggtgcccaccaccacgcccagctaattttttgtatttttagtagagatgaagtttcaccgtgttagccaggatggtctcgatctcctgacctcatgatccacccacctcagccgcccaaagtgctgggattacaggcgtgagccaccacgcccagcctactctttctttttctttgagacagagtctcactctactgcccaggctggagtgcagtggcatgatcatggctcactgcagccttgaccttcctgggctcaggtgatcctcccaactcagcctcctgagtaactgagacaacaggcatgcaccatcatgcctggttaatttttgtattttttgtagaaacagggtttcgccatgttgcccaggctgatcttgaactcctgggctcgtgatctgtcttccaaagtgctacgattataggtgtgagccaccttgcctggctgatactctttcttaggccaccttggcatgccttatgtccttcacaagtctacccacccttcaaagccttccaaaaagccttctgactacccttgtccacaccatctttactcatctccagcttctatcatagacagggctatccttctaaactctatggtcatctgatcttatgcatatgttgccttctcagttacactgcactgtctaaaggcaaggaccaagtcttcttagattcccttatgtgagttcttgactggcctctgtgggattgaggaggaataaatgagtcaattggtcccttctgttgcactgggaccccagagagaagctcagtatgattctaagaagctgggactkctgctgggcgtccggtgttaacatgtacataggcctcctatctagtgttatccagaccctctatctgctaaccatgattctcagcctcaacattaaacccttctaacatggtttgaggacctgacaatacaggtgatacaggaaggcctgggagtgccctgggggattgctgggattcaagttggctgatttatgaaggtgttgagccacattgtgtggagtgagcatggaggcctcctcacccacaagatgtaacagctggaaggcggtgagccaggcctctgggatggctgcagcctgggtcagggtcaatccctctgggataggcatgaggagcccttcggggacagtgacrtactgagcctggcccccaccggggagcagagccatggctgtgtccccgatcttccagtgtccctggcagccaggycccagctctgccacatgtccagatgcctcaagtcccaaaatgttgctggctcctggaggtgggtcatactggccttgtctctgcagagaaagaagtgcactaagtggtgagcatgatcagaaatctgtatgtcactacccctggccccccttccaagatcccctcttttttttttcaaaaataaatttcagaatgaagtcaggtttttgtaagtaaggagaagaaaaaggagaggccattagttttatgcaaataaactggaggtcacatgatcagtggatgttataactggtagagtccttagctatttacctcatctgaaccccttgctttacagatggagaaactgagtcccagacgggaaataatagtagtgggattaggaaccttgacgatggttcccatgcatcaagcgctaggctctgtgctcactcaccccagtcctcagaagctgtagagcagagggacttaaccaggagtgtgtggcagaaccacctgaggagtatttcaaagtacacgtgcctgggcccccatcacgtttcttttgtgccccgggggattctgatgcacatttctgaatgaccccaaccaatgcagctggcccaggtcagtaaatcagcatcagacagaagaaaattcttaagagtactgcccgctgtcagctccgggactctcagagtggaaagagttaagaggtctttggagccacaaagacctcagcttgaatcccagctcttctgattgctagtgtcacggccttgggcgtactgcttaacctcactgaacttcagtttccttatctgtagaattaagatggcgaacagggtagcctggggagtaagtgtgcccacaccccacaacaatgttagttccgccctcatctggaggcctgagtggctatggattagctcggggtggattctgctttacaagtactcccccttgttttgcatgaacaaagagggcgccctgggtttaggtctgggaagccccagcgcagctgcctgctgggtgtggagcggtgcacgccttcacgtctggtcaatgtccactgagtgctgttgagagggaggctctggagtcccgcccgccccggcgcggctgagccctgggtacctgcattaagtccgcccggttcagggcgctggccgccaccttcaggaggacttcaccctcccccgggctcggcttggccacctccttcacgtagaggttttccggtcctcccggcttgtcaaagtgcacggctaacatattgtctgaggacacagggcagggcagggcaggrcaggacaggrcagggcaggrcaggacaggacaggrcagggcagsrcaggacagggcaggggccgctgtatcctcgcggagcagcccagcctcaggctggcaccgcagcgccccctgccggccagcgcctcgctgccctggtctgccgcggacccggcctccgccccgagctcctgcctgggaagtcctcggccgcctccagaccgatcccacccggaacacagatgggaacggcgggaaktgggatggcggtacagggctggatgcggcagagcaggacaacgccgaagaggatcaggcaaatcacactccctctgagttggaagcccccagcccgacccgggtccccggcgcccgtatgagttacttactcctggcccggctcccctcccatgcaccaggcggcgccgagtggttctggctcctgcgggtcccggtgacaaagcccgagmcccagagccccaggactgcctctgcctccaccggaatggacggctggacctggggtagccggaggggtggggctaagcagaaccaccctccccctctttcctttcctccttccccctttaaaacgcaaagttagaagcaagcaaatcagattttcttgtccttttagcctctggaaaagagtctttctctcagcttgacagaaagtgcgattctagctctcacttcaaggagaggaaacttccttctctctagggaacgagacccaacctcttggcgggcggattggtccattttccaggcatggccaggcttttggcacatttatgtaacaggctggcatcccgcccatcttgagcatgggtgggcaagctgggtgctgctaagagaagagaaaggagccgttgggagtgggggtggggaaggaaggcaaaacgcagtcctgggayccttatcactcgcctcctcctgacagtcctgggggagaggttcagccccaggagaaggatgctggcgattgggtaaaagctgtatccgtaagctacatgaaggtttctcaatctcggcgctattgacattttggactagctagttcgttattgtaggagatcgtcctgtgcatcgtaggatgtttagcagcatccctggcctccccccactacatatccgtagcactccttgtaaattcctgttttagtaagaacctcccatccttgacatctgatcaccctcaatatctcatcctccaccatcccccaagtgatatccgaccaccctggcctgtcttcagtgagaatcctgttaggtcagtttagatagaatcccccttacccctgatgcctcttaccaattttccatccactgaccccctacactgctccttggctatacattcccacttgtccgtgatgcattcagagttgatcccaacctgtctcctccactgcaagaactcattgcagtggtccctaaacctgtagcgatggtgctaaataaagtcttccttaatgtgctttaacaagtatcattgaataattatttctttaacacaacagagcaaaagcctatagagatggaaataataaaatgatgggacttaaggaaaaattcaggagaccctgctatgagaataacaggaattttaggccgggcgcggtggctcacgcctgtaatcccagaactttgggaggccaaggcgggcggatcacgaggtcaggagatcgagaccatcctggctaacacggtgaaaccccgtctctactaaaaatacaaaaaattagccgggcgtggtggcgggcgcctgtagtcccagctattcgggaggctgaggcaggagaatggcgtgaacccgggagggggagcttgcagtgagccgagatcgcaccactgcactccagcctggacgacagagtgagactccgtctcaaaaaaaaaaaaaaaaaaggaattttagaaggaggaagaggaatggatgaagaagattcaatagttaaccaaataaaagaatacagttttcctaaattctaccagattatacggattgaaaacattcactaaaggatggattcataagaacaaaaatgcatgcctatattttataaaatttcaggttctaacaagtgtggaaagaataagttactcacaattggttaaaaaaaatggcttccttctctccctccctccctccttccttccttccctccttccccaccccctctttctctctctctcttttttgtagtgtaggggtctcattatgttgcccaggctggtctcaaactcctggactcaagcaatcctcctgcctcagcctcccaaagtgctaggattacaagtatgagccactgtgcccagcaagtttctatctgcaatctggaagctagaagagagtagactagcgtctattgactagaagaaaagcactgtaactcaatataccccattaagatataattcacttgttagggcaaaaaacatgtctgaggatgtataaggattcagagacacatcatccggatacrcatctgtccaaaatcgaggaaaggtttgaaccaaataaatatcctagaacagagacagatggaaaggaaatagttgtaaataacaaactttgcaaaaatcgacactaaaactgattggattaagaaaatggaatggattaagatagatgaggaatgtgtaatgtaagtgctaaataagaacttttaagatgcaaggagtaactttaaaaaaaatctaataataccaaccactaagtatactaaagtatcccagtaaaactagtagttgaaagtgcctaagattttatcttagtgagcccttggtcgatgtaatcttgcagtgtgtaataagaaatatatatttttggtctttgtcctgggttcctacaatagcactcctaaaacctttgttatttgctgaataaacatctctttctttcttttgtttttaactagatatacggtcttgctacgttgcccaggctgatcatgaactcctggactcaagcaattctcccacctcagcctgtaaagtactggaattataggcatgagccactctgcctggccaataagtatcttttattatattttgttctcctgcagagctcctaaaacccttggaatttcgtatgtgatagaagtgactttttatattaataacaaacccttataagcacactcgagtttatgctaatatgacttagggtgggggccctagatagcttcaggatgagctggtcaccagaaagaccctgggaaggggaagcagggactggagattacacgctataagaattcttttttgttgttgttgttgaaactgagtctcactctgttgcccaggctggagtgcagtggcctgacctcagttcactgcaacctccacctcctaggttcaagcgattctcctgcctcagcctcccgagtagctgggactacaggtgtgagccaccacaccagggtaattttttttttttttttttttttgagacagagtctcactctgtcacccaggcgatctcggctccctgcaatcctctcaagtagctgggactatagatgcacgctgccaygcccagctaattttttgtattttagtagagacagggtttcaccagcccagggttttgcaacagtccaggctsgtcgcaaactcctgagcttaggcaatccacctgcctcrgccttccaaagtgctgggattacaggcgtgagccactgggtccggcccatttttgtggttttagtagaaatgggatttctccatgttggccaggctggtcttgaactccttacctcaggttatccatttgcctaggcctccaaaagtgctgggattagaggtgtgagccactgcgcctggccctaaaaactcttgaacaaagaaatgtggtgagcttcccagctggtgaacacatccaccatgggaagatggtgtggtgtaccccaactccatggggacagagactcctgcacttgggatccttctggacctcattctacatacctcttcacctggctgttcatccctttattatatatatatawctttttttgaggcagagtctggctctgtcgcctaggctggaatgcagtggggtgatctcggctcactgcaatctctgtctcctgggtttacgtgattctcctgcctcagcctcccaagtagctgggattacaggcatgcaccaccaagcmcggctaatttttgcatatttagtagagacagggtttcgccatgttggccaggctggtcttgaacttttgggctcaagagatccacctgcttcggcctcccaaagtgttgcgattacaggcgtgagccaccgcgcccggcctataatattctttatcataaactagtaaacgtaagtgtttccctgagttttatgaaggattctagcaaattatcaaatccaaggagggagtcatgagaatccctgatttatacagccagttggtcagaagtgtaggaggcttggatttgcagttggcatctttaatgggggcaaccttgygggactgagcccttaatctgtgggatctgacactaactccaggtagagagtgtcagaattgaattgtggaacacccagcctatgtcagagaattgattgatgtgggaataaaacctgcatatctagtgtcagaaacgaagtgttctgtgtgagrktagaaacagtgtggtttcccagatatggggaaatagattatatttagtagaaatgtatccaattatgaaagttgagaaatgggctgggtgctgtggctcatacctataatcccagcactttgggaggctgagaggggtggatcacttgaggtcaggagttcaaggccagcctggccagcatgatgaaaccccatctctactaaaaatgcaaaaattagctgggtgtggtggtggttgcctgtagtcccagcttgttctttataaaaaccagtaacatgaatgaaatgtattgtgagttacagctgggaaacaagaaatagccaaggtctgaaagactgggaatgagaaaggagatacaaccacagatataggagtgattaaaacaaaaataaattaaattatgtgaaattctacagcaacaagtagtaaaatctagaaaaaaaaaggaagatttttttagcaaaattactccattctacccaatgggtagagtattttcgcctcattctgttgatgttgggtttggccctgtctcttactttggtcaatgatgagtgagaaaggcatggtcagtttccatcagtccccttaccttcctgccacccacagatagcctctatttcagcttgtccctgagtgagaaatactcagggtagccctgaatccaacctattgtcttgggaccagcctagcagagtcacaaccgaggaagaaataaacatttgtttttgtaagctgttgttgttgtaagctgttaagatttggggatagtttatttttgcagcaaaggcttgttaataaagataaacatttctttaaaaaattagcaagtatacaaaattagccaggtgtggtggcgcatccctgtaatctcagctactcgggaggctgaggcaggagaatcactcgaggcagaggttgtggtgagccgagattgtgccattgcactccagcctggggaacaagagcaaaactccgtctaaaaaaaaagaaaaaaaaaaaaaaaacgccgggcgcagtgactcacgcctgtaatcccagcactttgggaggccaaggcgggcggatcacgaggtcaggagatggagaccatcctggctaacatggtgtatttctctactaaaaatacaaaaaattagccggggtggtggctggcgcctgtagtcccagttactcgggaggttgaagcaggagaatggcgtgaacccgggaggcggagcttgcagtgagccgagattgcgccactgcactccagcctgggctacagagtgagactccgtctcaaaaacaaacaaacaaacaaaaaaattagcaaggactggcacggtggctcaaccctgtaatcccagcactttgagaggccaaggggggagcagaacagttgaggtcaggagttcaagaccagcctggccaacatggtgaaaccccaactctactaaaaatacaaaaattagctgggcgtggtggtgcacgcctgtagtcccaggtacctgcgaggctgaggcaggaggaggttgcagtgagctgtgattgcaccactgcactccagccttggtgacagagagagcctcccatctcaaaaaaaaaaaaaaaaaaaaaaaggaaatggagttcagcaacttatattccctatgattatacaaaatcaatattgggaagtctatcaatacaaccccaaaacatcaacaaattaaaggagaaaacaccatatgagccaatcaatagaggccaaaaaggcattgattaaacgtagaagccattcattataaaacctccaagcaaaataaggataaaaggaaagtatttatagtagactttttttaaaagacaagktctcattctgttgcccatgctggagtgcagtgttgtgatcacagctcactgcagccttgatatggctcaawtgaacctcccacctcagcctcctcagyagctaggactacaggcttgagccaccacacccagatagtttttgtttgtttgyttatygtttgttttgtagatacgaggttatgccatgttgcccaagctgacattattatttaacattaattcggaagttttagtcaatacaataagataaaaaacgaggtaattgataataaatactggaaaagtgataaaacagcctccttttgttgttgatatgattgtagacttagaaaacgcaagagatgcgctgggtgccatggctcacgcctgtaatcccagcactttgggaggcggatgacgaggtcaggagatcgagaccatcctggctaacacggtgaaaccccgcctctactaaaaatacaaaaaattagccgggcgtggtggcgggcgccagtagtcccagctacttgggaggctgaggcaggagaatggcgtgaacccgggaggcggagcttgcagtgagccgagatcgccactgcactccagcctgggcaacagagtgagattccgtctcaaaacaaaaacaaaaacaaaaaacaaacaaatacaaaaaaccacaagagatgctaattttaaaaatgaagcaaacatttttgtttgagataatgagataatttgtaaaagctgtccagatgaaagctacatacaccagaatcaatagctttattctacttcagttaagcaactagaaatattaataaaaatggggaaaataacacttttaccatagcagtacaagttgtaaaagcataaggaatgtatttaacaaggaagatacaaaaattatataatgaagactgtaaaactatatcaaagaacagaaacaagatctgaacaaatgaaacagtaccatgtttttagatgagaatacagtacccaaaatgtcagttttaccaaattagtatacaaattcattataaatttggttataatgccaacagtatattttttgattggataaagtggtgttagagtgtatgtggaagaacaaatccccccaaatgaccaataaatatatgaaaaagaatagtagggttgggagtgttggctcacatctgtaatcccagcactttgggaggccgaggtgggcagatcacttgaactcaggagttcaagaccagcctgggcaacatagcaaaaccccatccctacaaaaaattagccaggcatggtggcatgtgcctgtagttcyagctacttgggaggctgggagatggaaagatcacatgggcctggcaggcagaggttgcattgatcataccactgcactccagcctgggtgacagagtaagactctgtctcaaaaaaaaaaaaaaaaaaaaaaaaaggaatagtagtaggaaagacttatattaccagatgtcagaaaataaatcagccaagcatagtggctcakgcctgtaatctcaccactttgggaggccaaggtgtgtggattatttgaggtcagaagttctagaccagcctggccaacatggtgaaaccccatctctactaaaaatacaaaaattagctgggtagtggtggcatgtgcctgtaatcccagctattcgggaggcggggcaggagactcgcttgagcctgggaggcagaggttgcagtgagccgagatcgcgccctgcactccagcctgggtgacagagtgagaccctgtctccataaaaaaaagaaagaaagaaaataaatcatagcgatagtaacaatgacagtatgaaacttacttctaaggagtttgtcctgtagaaataaaacacaccaattatacagatgtatgtacagagatgtttatttcagccttgatcatagtaacaaaaatttagaaacaaagtagatcccatcactaagggaatggctgcataaattgtgaattctatgcatccacttgaaaaatgaactagagctatagcagttgacatcaagggatttctgtgaagcgtttgtttaatcagagtaaaattatggtaaaacaatgacaaaatacccccatacacatatacatgattttatgcacacacacacacacacacacacacacacacacacacacacaccatgtacagaggctacctgcctctgccatcttcctggccacccaccaccatggctcagggctcaaggcgtttctccttactccaggtggtagtctgcacacatttttattctgaaataggcaaaaagcatgtcccaaaactatgtgtcccctctcactttttatttttatttttattttattttactttaagttctgggatacatgtgttgaargtgcaggtttgttacgtaggcatacatgtgccatggtggtttactacacctatcagcctgtcatctaggctttaagcccctcatgcatcaggtgtttgtcctaatgctctccctccccttgcccctagccccccaacaggccccggtgtgtgatgtycccctccgtgtgtccacgtgttctcattgttcatctcccacttatgagtgagaacatgcgctatttggttttctcttcctgtgttagtttgctgaggatgatggtttccagcttcatccatgtccctgcaaaggacatgaactcactcttttttatggctgcatagtattccatggtgtatatgtatcatattttctttatccactctatcattgatgggcatttgggttggttcggtgtctttgctattgtaaacagtgctgcaataaacatatgtgtgcatttttttttttttgagacagaatcttgctgtgtcacccaggctgaagtgcagtggcacaatcttggctcactgcaacctcctcctcctgggttcaagcgattctcctgccttagcctcccaagtagcttgggactacaggggcccaccacctagcctggctaattttttttgtatttttaatagagacgggtttcaccatattggccaggctggtcttgaactcctgaccttgtgatctgcccacctcagactcccaaagtgctgggattacaggtatgagccaccgctcctggctgcatgtgtctttgtagtggaatgatttataaacctttgggtatatacccagtaatgggattgctgggtcaaatggtatttctggttctagatccctgaggaatcgccacatacttttttttttttttttttttttttttttaagacagggtcttgctgtgtcacccaggctggagtgcagtggcaccatcatagcttactgcagtgttgacctcttggattcaagtgatcctcctgccccagcctcctgaataactgggccttggcctcccgagtagtctcatgtgcctgggactgcaggcacatgccaccacacctggctactttttaaagttttggtagagacaagatctttcatgttgctcaggctggtcttcaactcctgggcttaagtgatcttcctgcctccatctaccaaagtacagagattacaggtgtgagccactgtgcctagcctcctctcacatttttaagttgatatctaaaattattcacctgaaatataaatagtttaaaagataaggatttcttatttcttttaatactgacattttaaactcttaaaacaggctttttccccctcccgagagacagagtcttgttctgttgctgaggccggagtaaaatgttgtgatcataactcactgtaacctcaaactcctgaactcaaggaatcctaccacctcagtcttcctagtagctgggactataggcacatgacaccatgcctggctaatttttctgtttttcgtagagacagtctcactatgttgcctcagctggtcttgaactcttggcctcaagggatcctccttccttggcctctctaagtgctgagtttacaggcatgagccactttgcccagcctacatcaggcttttaaatatatcaattgggccgggtgcggtgactcacacctgtaatcctggcattttaggaggccgaggtgcgcagatcacttgagttcaggagttggagaccagcctggccaacatggtgaaaccccatctctactaaaaataccaaaaaaattagcctggcrtggtggcacacactcatagtccyagctactcccaagggtgaggcaggagaatcacttgaacctgggatgcagaggttgcagtcagccaagattgcgccactgcactccagccttatattagagcaatttgatatttattaatataatcatccactaagaaagacccaaactcttctttaacagttaaaagtttaacaaccggaacagctccagtctgyagctcccagcgtgatcgacgcagaagacaggtgatttctgcatttccgactgaggtaactgattcatctcactgggactggtttgacagtgggtgcagcccacggatggggagctgaagcagggcagggcgtcacctcaccctggaagtgcaaggggtcaggggatttccctttcctagccaagggaagcmgtgacagactacctggaaaaatgggacactcctgcccaaatactgcacttttcccaagatcttagccaccggcagacaaggagattctctcccatgcctggctcggygggttccacacccacggagccttgctcactgctagtgcagcagtctgagatcgaactgtgaggcggcagcctggctgggggaggggcgtccgctgttgctgaggcttgagtaggtaaacaaagcagccgggaagttcgaactgggcagagcccactgcagctcagtaaggcctactgcctctagactccatctctgtggccagggcatagctgaacaaaaggcagcagacaacttttgcagacttaaaggtccctgtctgacagctctgaagagagcattggttctctcagcacggtgtttgagctctgagaacggacagactgcctccttaagtgggtccctcacccccatgtagcctaactaggagatacctcccaggaggggccgacagacacctcatataggcacctgcctctctgggacgaagcttccagaggaaggatcaggaagtagtatttgctgttctgcaatatttgctgttctgcagcctccgctggtgatacccaggaaaacagggtctggggtggacctccagcaaactccaaccgacctgcagctgagggacctgacagttagaaggaaaactgaaaaacagaaaggaatagcatcaacatcaccaaaaaggtcatctacaccaaaaccccatctgtaggtcaccaacatcaaagaccaaaggtagataaaaccacaaagatggggagaaaccagagcagaaaagctgaaaattctaaaaatcagagtgcctcttctcctccaaaggatcgcaactcctcgccagcaaagagacaaagctggatggagaatgactttgacaagtcgacagaagtaggcttcagaaggttggtaaaaacaaacttctccgagctaaaggaggacgtttgaacccatcgcaaggaagtaaaacccttgaaaaaagattagacgaatggctaactggaataaacagtgtagagaataccttaaatgacctgatggagctgaaaaccacggcacaagaacttcgtgacrcatgcacaaccttcaatagccgattcgatcaagtggaagaaagggtatcagtgattgaagatcaaattaatgaaataaagcaaataagacaaggttayaggaaaaagagtaaaaagacatgaacaaagcctccaagacaaatgggactatgtgaaaagaccaaatctatgtttgattggtgtacctggaagtgatggggagaatggaaccaacttggaaaacactcttcaggatattatccaggagaacttccccaacctagcaaggcaggccaacattcaaattcagaaaatacagagaacaccacaaagatactccttgagaagagcaaccccaagacacataattgtcagattcaccaaggttgaaatgaaggaaaaagtgttaagggcagccaaagagaaaggttgagttacccacaaagggacgcccatcagactaacagtggatctctctgcagaaaccctacaagaagagagtgggggccaatattcaacattcttaaagaattttcaacccagaatttcatatctagccaaactaagcttcataagtaaaggaaaaataaaatcctttacagacaagcaaatgctgagagattttgtcaccaccaggcctgccttacgagagctcctaaaggaagcactaaacatggaaaggaacaactggtaccagccactgcaaaaacatgccaaattgtaaagaccatcgatgctatgaagaaactgcatgaattaacgggcaaaataaccagcgaacatcataatgacaggatcaaattcacacataacgatattaaccttaaatgtaaatgggctaaatgccccaattaaaagacacagactggcaaattggataaagagtcaagacccatcaatgtgctgtattcaggagacccagctcatgtgcaaagacacacatagactaaaataaagggatggaggaagatataccaagcaaatggaaagcaaaaaaaaaaaaaaaaaaaagcaggggttgcaatcctattctctgataaaacagactttaaaccaacaaagatcaaaagagacaaggccattacataatggtaaagggatcaattcgccaagaagagctaactatcctaaatatatatgcacccaatacaggagcacccagattcataaagcaagtcctttgagacctacaaagaracttagacttgcacacaataataatgggagactttaacaccccactgtcaatattagacagatcaacgagacagaaggttaacaaggatatccaggacttgaactcagccctgcaacaagcagacctaatagacatctacataactctccaccccaaatcaatagaatatacattcttctcagcatcacatcacacttattctaaaattgaccacataattggaagtaaagcactcctcagcaaatgtaaaagaacagaaatcacaacaaactgtctctcagaccacagtgcaatcaaattagaactcaggattaagaaactcactcaaatccacacaactacatggaaactgaacaacctgctcctgaatgactactggatacataacgaaatgaaggcagaaataaagatgttctttgaaaccaatgagaacaaagacacaacgtaccagaatctctgggacacgtttaaagcagtgtgtagagggaaatttatagcactaaacacccacaagagaaagcaggaaagatctaaaattgacaccctaaaatcacaattaaaagaactaaagaagcaagagcaaacaaattcaaaagctagcagaaggcaagaaataactgagatcagagcagagatgaaagagatagagacacgaaaacccttcaaaaaaatcaaggagtccaggagctggttttttgaaaagatcaacaaaattgatagactgctagcaagactaataaagaagaagagagaagaatcaaatagatgcaataaaaaatgataaaggggatatcaccaccaatcccacagaaatacaaactaccatcagagaatactataaacacttctttgcaaataaactagaaaatctagaagaaatggataaattcctggaaacatacacccacccaagactaaaccaggaagaagttgaacctctgaatagaccaataacaggctctgaaattgaggcaataattaatagcctaccaaccaaaaaaagtccaggaccagatagattcacagccaaattctaccagaggtacaaagaggagctggtaccattccttctgaaactattccaatcaatagaaaaagagggaatcctccctaactcatttcatgaggccaacatcatccttatrccaaagcctggcagagacacaacaaaaaaagagaattttagaccaatatccctgatgaacatcaatgcgaaaatcctcartaaaatactggcaaaccaaatccagcagcacatcaaaaagcttatcaaccatgatcaagttggcttcatccctgggatgcaaggctggttcaacatacacaaatcaataaatgtaattcatcacataaagagaaccaatgacaaaaaccacatgattatctcaatagatgcaggaaaggccttcaacaaaattcaacagtgcttcatgctaaaaactctcaataaactaaatattcatggagtgtatctcaaaataataagagctatttatgacaacccmcagccaatatcatactgaatggggaaaaactggaagcattccctttgaaaactggcataagacaaggattccactcctacgcaacatagtgttggaagttctggccagggcaatcaggcaagagaaggaaataaagggtattcaatcaggaaatgaggaagtcaaattgtccctgtttgcagatgacatgattgtatatttagaaaaccccatcgtctcagcccaaaatctccttaagctgataagcaacttcagcaaagtctcaggatacaaaatyartgtgcaaaaatcacaagcattcctatacrccattaacagacagagagccaaattatgagtgaactcccagtcacaattgctacaaagagaataaaatacctaggaatccaacttacaagggatgtgaaggacctcttcaaggagaactacaaaccactgctcaacgaaataaaagaggacacaaacaaatggaagaatatttcattctcatggataggaagaatcaatatcatgaaaatggccacactgcccaaagtatttatagattcaatgccatccccatcaagctaccaatgactttcttcacagaattggaaaaaactactttaaagatcatatggaaccaaaaaagaaccccccattaccaagacaatcctaagcaaaaagaacaaagctggaggcatcaagctacctgacttcaaactatactacaaggctacagtaaccaaaacagcayggtactggtaccaaaacagatacatagaccaatggaacagaaaagaggcctcagaaataacaccacacatctacaaccatctgatctttgacaaacctgacaaayacaagcaatggggaaaggattccctatttaataaatggtgctgggaaaactggctagccatatgtagaaagctgagactggatcccttccttacaccttataaaaaattaattcaagatggattaaagacttaaatgttagacctaaaaccataaaaaccctagaagaaaacctaggcaataccattcaggacgtaggcatgggcaaggacttcatgactaaaacaccaaarrcaatggcaacaaaagccaaaattgacaaaagggatctaattaaacgaaagagcttctgcatggcaaaagaaactaccatcagagtgaacaggcaacctacagaatgggagaaaatttttgcaatctgcccatctgacaaagggctaatatccagaatctacaaataactcaaacaaatttacaagaaaaaaaatcccatcaaaaagtgggtgaaggatatgaacagacacttctcaaaagaagacatccatgcagccaacagacacatgaaaaaatgctcatcatcactggtcatcagagaaatgcaaatcaaaaccacaatgagataccatcttgtgccagttaaaatggcaatcattaaaaagtcaggaaacaacagatgctggagaggatgtggagaaataggaatgcttttacactgttggtgggagtgtaaattagttcaaccattgtggaaggcagtgtggcaattcctcaaggatctagaactagaattatcatttgacccagcaatcccattactgggtatatacccaaaggatcataaatcatgctactataaagacatatgcacacgtatgtttattgtggcactattcacaatagcaaagacttggaaccaacccaaatgtccatcaatgatagactggaataagaaaatgtggcacatatacaccatggaatactatgcagccataaaaaaggatgagttcatgtcctttgcagggacatggacgaaggtggaaaccatcattctcagtaagttatcacaaggacwgaaaaccaaatagtgcatgttttcactcataggtgggaattgtacaatgagatcacttggacacagggtggggaacatcacacaccagggcctgttggggggttgggggctggtggagggatagcattacaagaaatacctaatgtaaatgatgagttgatgggtgcagcaaaccaacatggcacatgtatacctatgtatcaaacctgcacattgtgtacatgtaccctagaacttaaagtataataataaaaaaagttttacaaccttatttttcttctactactcatattttcattccactgttttcattgaatcatattctgctatattttatgctttactgatcattcttatctgcaggaaaaatatgtatgtaaattgacattaatttaaaaaattattttctgtgaccacagggctactataagtgttaaatttcttttggatttattattatgatattattagtccacaattgatcaaaacaatatgtattattttaaataataattattaaacataaaacgtaattggaaatatattcttaatgatggtagggctgaatttttcccaacatttatatatgtggatgaatattacttattgctagaattggactgagttcgaaattagttctcttcctagtttttattattttattttatttttttattattttttaaagacggggtctcgcactttcgcccacgatggagtgcactggcgcgatctcagctcactgcaagctccgcctcccagattcacgccattcttccacctcagcctcttgagtagctgggactacaagcgctcaccaccatgcctggctaattttttgtatttttagtagataccgggtttcaccgtgttagccaggatggtctctatttcttgactttgtgatctgcccgccttggcttcccaaagcgctgggattacaggcgtgagctaccgcgcccggtccctattttttatttttatagacaagctctgagaaatctagtttgcataaattagatgggaaaaaaatttcatcataggaatgccagccgattctttgaatacctctgaattatataataaaaaccatataatgatctatcatcaaaagttgttttcaatgctctattagctgacaacttaattagatcttgcttcagttttgttgaaagtaaagacttggaaaccacccaatctgttactcagtcacaagtgtcactcaagttctcagtttctggaattataccagcaaagctttctgaagacttatcaaatgcttattaattatatctgctattttttcacttagaggcaccttgtttcaattgatatgctcaggaaagattcgggaagtaaaaatgttaattttaatacatttttgctaaattttttggatcaaatccttttaccctatctcatgttttaaatgtattttcaggctgggagtggtggctcacgcctgtaattccagcactttggaagcccaaggcaggcggatcagctgaggtcaggaatttaagaccagtctggctaacatggcaaaaccctgtctctattagaagtacaaaaattagctgggtatggtggcaggtgcctgtagtcccagctactcrggaggctgaggcaggagaatcgcttgaaccctggaggtggaggttgcagtgagctgagatcatgccattgcactccagcctgggcaacagagtgagactctgtctcaaaaaagaaaccaaaaaacaaaataaatgtattttcattaacatatcggagctgcagacttaactcatttatggaaaacatctgtgacattcttattggcaaaagcagtcctcactgttaaactaatcagccaaatcaaattactttgtatcagaaaaagtttctcattttttaattcaataatcatgttaatatgtrccttgtaacaatcattttgcttctgaaccttaagaaatatagatggacaaggcatgcagccctcctttcctggatgaattatgatacaaaagtgttcactgtttctcactgatactttttttgctttactctcatgggactctccttcacatatgatgcatttttgaacaatggaggatgaaagaaatcatgcaatttaaaatatttagaattttctcttcctttggcaccttacagttcttttgctccaagccaggctcaaaggctcaaagggctgtgtgagcgtgagcccttttgtatactgggtgaagggaggctggggagggaggccagaaagtagctttgacatcagtcctcaactacagcagatctttttcaggaaagtacgtatggaagttgagaacctgggaaaaaggaaccccttaaatccattcatgcctgtgtgccccttctaatggctttgtgaaccatcaggacataaagttctctcatttggagacctctgttacaaaagattgcctgctccctgggcacctccacaggtgctgtatagctaccaccaaagggtcacttgtgtgggtctctctgcgtagctggacccagttggaagtttgtaatgagaattataggaggcaactggaatgctctacagaggaggctccagacagttattgccttgaggaagtttatgaaaaaggctyccactaggcacccagcaatgcagcgggtgtgtttaggaaaggctggccggccaggaggtgagctgccaagaggcttcaccaggcctgcagaacttcagagaatcgctatagtccaggtcagactccctgcctgtcggtatgtggagcgcgggtctacagctcacagaactgagttcttaaatccaggtatcagtgtgctaatttgtaagaagaaattattggcatgggggctgaaccccaaaatctacaggcaaatctatgtggaatgtcaaatggtaagccaggactcaggacaagatgggacgattgagatgaattgggggtggggccgagatagtggactagaggcagctcatgtgtgctgctgttttggagaagaaacaaaaggactagcaaacactgagctgcaggccgatcatctgaaaaaccaygttgggacccatcagggcagtagaggaacacagagtgcagaaaggartgaagccaggcaccagctgtttgggctcagcatggagccaggagaacctctccagcacaggacagggtgagtgagtgagagcccccagggtgattcatgctctccacagggacctgtgcaagactgggaataggagaatcccactgggccccacacccacccatcgtgtttctagactgaggcagagagccactcagacgtwttayagggccaactctcgagtccaaggggacctctataagccttgggccctggggcagaccagccagcgccgaagccccagcaaaggctgcagttgccatgcatgggagcagtaaggttgctccacccacccatgctgggtaggactcaacaccagcctctagcccagtagtctcacttcagcctgaactcggccagccactccacccacccccaccactggtagccaggcgggcaacacctgctagagcttccagcctaatagccctgcttctgtgtgaactcagctagagggtgcrgctttctgttgtcctgggaaacacccgaacagcagagtaagtgactctacctaccctgccactggtagccagttgggtaacaactgctagagctcctggcccagcagctctgcttctgtgtggattcaactggtgggtgcagcctcctgttgtcataggaagcacccaaatggcaaggcacatgaccatacccacccttgccactgacagccaggtggataacacctgctagagcttctggcccagcagtcctgcttctgtgtgaactcagccaacaaatgcagccttctgttgtcccaggaagcacagacaccagagaaggcattcccaccaacmccagccactggtagccaggcaagccacacctgccagagctggcccagtggctctacttctacctgaatttgtcaagggacgcagcctcctgttgcactggaaacacccagacagcagggcagccaactgcatccacccacccccrcgtcctgtagccagatgggccacacccagtagtttccaatccagtggtcctgattctgcctgaactctgcaggcagggacaacctcgtgtttccccaggaagcacacagacagcagattggagctgacctggcaaggttacagcttgtctgccacctgtggcccttgcctaagggagctccatggaccagaacaccccaaaaaagaaatgcaaatagggagacagtaattggaaggggctcctccaagacctaggagtggactagaattgaaagcagttaaccaaacccaccttggtttggtttgccctgtagtcaaacccccaagggcatcaaagaagaaaaaagcaaaaacaaaaaatttcatccaaaggacagcaacttcaaagattgaaggaacatcagcctacacaaatgagacagaactagcacaaaaactctggcaaatcaaaaagccagagtgtcttctttcctccaaatgaccacactagttccccagcaagggttcttaactgggctggaatgactgaaatgacagaaatagaattcagaatatggataggaatgaagatcatcaagattcaggagaattcaaaacccaatccaaggaagctaataatcacaataaaacaatacaggagctgacagatgaaatagcctctataaaaaagaacccaactgatctgatacagctgaaaaacacactacaagaattgcacattctaactgcaagtattaacagcggaatagaccaagctgagtaaagaatcccagagcttgaagactagctctctgaaataacccattcagacaagaataaagaaaaaagaataaaaaagagtgaacaaaacctcagagaaatatgggattatgtaatgagatcaaatctatgactcatgggcatccctgaaagagacagggagaaagcaagcaacttggaaaacatattttaggataatgttcatgaaaatttcctgaagcttgttagagaggccaacattcaaatccaggaaatgcagagaaccctgagagatattactcaagaccatccccaagacacataatcatcagattctccaaagtttacatgaaagaaaaaatgtcaaaggcagctagagagaaagggcaggttacctacaaagggaactccatcagrctaacagcagatctttcaacagaaaccctaaaagccagaagagactggtggcctatattcagcattcttttttttttttttttttttttgagacagagttttgctctgttgcccaggctgagtgcagtggcatgatctcagctcactgcaacctctacctcctgggttcaagtgattcttctgtctcagcctcccaagtagcagggattacaggcacccgccacyatgaccagctaatttttgtatttttagtagagacagggttttgctgtgttggccaggctggtttcaaactcctgacctcaggtgatctgcctgcctcagcctcccaaagtgctgggattacaggtatgagccaccttacctggcctcatttcattcttaaagaagaaaatttccaactaagaatttcatatctggccaaactaagcttcatatgtgaaggagaaataagatgattttccgacaagcaaatgctgaggggatttttttttttccaccagatctgccttatgagcagtcctgagaggagtagcaaatatggatgggaaagaccatgactagccattacaaaaacacacttaactagacagactagtgacactataaatcaaccacactaacaagtctgcataataaccagctaacatgatgacaggatcaaatctgcacatatcaatactaaccttgaatgtaaatcagctaaatacctcaatcaaaaggcacagagtggcaagctggataaaaaagcaagacccaatagtatgctgtcttcaagagacccatctcacatgtaatgacatctataggctcaaaataaaaggatggagaaaaatctacaaagcaaacagaaaacagaaaaaaagcaggggttgcaatcataatttcagacaaaatggactttaacctaacaaagataaaaaaagataaacagggcattatataatagtaaagggtacaattcaacaagaagacctaactatcctaaatatatacacactcaacacaggagcacccagattcataaaacaagttcttagagacctatgaagagatttagattcccacacaataataatgggagacttcaacaccccactgacagtattagacagatcattgaggcagaaaattaacaaagctattcaggacctgaactgaacacttgaccaaagtaacctgatagacatctacagagtgctccacctaaaaacaacagaatatacattcttcttatcaccaaatggcacatactccaaaatcaaccagacaatcagacataaaacaatactcagcaaaataaaaaaacctgaaatcataccaaccacattctcagaccacagtgcaataaaaatagaaatcaatactaagaaaatcattgaaatcacacaattacatggaaattaaacaacctgctccaaaatgacttttgggtaaataacgaaattaggtcagaaataaaaaaattcttccaaactaatgagaacaaagatatgacatacaagaatctctgggacacagctaaggcagtgttaatagggaagtttatagcactaaatgcccacatgaaacagacagatcccaaattaacaacctaatattacaactagaagacctaggaatgcatgagcaaaccaaccccaaagctattggaagacaagaaataaccaaaatcagagctgaactaaaggaaattgagacacaaaaaccatacaaaagatcaacaaatccagaaatcggttctttgaaagaaattaatcagatagatagatcactagctagactaataaagaaaaaacgagagaagatccaaataaatacaattagaaattacaaagaggaggttaccactggccccacagaaatacaaaacacctttagagactactttgaatacctctatgcacacaaactagaaaatctagaagtggataaattcctggacacatacagcttcctaagactgaaccaggaataaactgaatccctgaacagaccaataatgagttctgaaattgaattagtaataaaaagcccaccaaccaaaacaaacaaacaaacaaacaaaaaaggtccaggaccagagggattctcagccaaattctacctgatgtataaagaaaagctggtaccattccaacagaaactattacaaaaaattgaggaggagggactcctccccaactcattctatgaggccagcatcattctgataccaaaacctgtcagagacacaacaacaacaaaaataaaaagaaaagaaaaattcaggctgatatttttgatgaacatagatgcacaaattctcaacaaaatgctagcaaactgaatccaacagcacatgcaaagttggtttaacatatgcaaattggccgggcacagtggctcatgcctgtaatcccagcactttgggaggcctagacgggcagatcacgaggtcatgagatcgagaccatcctrgctaacacggtgaaaccctgtctctactaaaaatacaaaaaattagctgggtgtggtggtgggtacctgtagtcccagccacttggaaggctgaggcaggagaatggcatgaacctgggaggcggagcttgcagtgagccgagattgcgccactgcattccagcctggctgacagagcaagagtccgtctcaaaaaaaaaaaaaaaagaaaaagctattttgaaattcatatggaaccaaaaaagagctcgaatagctaaggcaaccctaagcaaagctgaaggcatcaccttacccaacttcaaactatatactacagggctacagtaaccaaaacagcatggtactggtacaaaaacagacatatagaccaatggaacagtagagagagcccagaaataatgccatacacctataaccatctgatcttcaacaaagttgacaaaaaaaaagagtaatggcaaaaaaaaaaaaaaaaagcaatggaaagtactccttattcaataaatggtgctagaataaatggctagccacatgcagaagattgaaatttgaccccttccttacaccatatacaaaatcaactcaagatggattaaagacttatgtgtaaaaactcaaactataaaaacactggaagataacctaggacatgccattctggacataggacttggtgaagatttcataatgaagacaccaaaagcaattgcaacgaaacaaaaattgacaaatggcatgtaattaaattaaagagcttctgcgcagcaaaagaaactatcaacagagtaaacagacaacctaagagagaaaatatttgcaaactatacatctgacaaaggtctaatatccagaatctataaggaacttaaacaaatttacaagcaaaagcaaccccatcaaaaagtgggcaaagaacatgaacagacacttttcaaaagaagacatatatgcagccaaaaagcatatgaaaaatgctcaacatcactaaccattagagaaatgcaaatgaaaactacaagataccatctcacaccattcagaatggctattattaaaaagtcaaaaaataatagatgttggcgaggttgtggagtaaaagagaatgcttatcacagtgctgatgggagtgtaaattagttcagccattgtagaaataagtgtggcaactcctcagtgaacttaaaacagaattaccatttgacccagcaatcccattactgggtatatacccaaaagaatataaatcattctaccataaagatacatccatgcatatgtccactgcagcctattcacaatagtaaagacacataatcaacctaaatgcctatcaatggtagacaggataaagaaaatgtggtatatatacatcatggaatattatgcagccataaaaagaatgagatcatgtcctttgcagcaacatggatagaggtggaggcattatccttagcaaactaagacagggacagaaaaccaaataccacctgttctcacttgtaagtgggagctaaacaaggagaacacgtggatactaggagggaaacaacagacactggggcctgcttgagagtggagggtgggaggagggaggggatcagaaaaaacacctatcagtcacccatttctgggatgggggataggtactagatagcttcagggcaggggctggtcaccagaagaaccaaccctgtgattagagggctggaacttttagcttcatctcctgacttctggggaggaaaagtgagtggggattgagttcaatcatatagccgatgattcagtcaattatgcctacataacagaagcccatataaaaaccctggaacaacaaggtttggagagagagcttctgggctggcgaacacctccatgtgctgggaggcgcatgtgtctggagaggtgtggaagttctgtgcccccgccctatacatctccatttggctattcctgacttgcatcctttataagaaaactgcaatcgtaagtgcagtgtagccttttcatgagttctgtagtcattccagcaaattatcatgagtcatgggactccccccccaaatctgtagccaggtcagacagaagtgtgggtagtgcgggtagcctggggacctggractcgtgtttggcatctgtagtggggacaggcttgtgggaactgagctccttaacctgtgaggtctacactaactccagttagctagtgtcaaattgaatcgtaggacacttggtcaaagaattattgttggaaactaccagggtacttaaattgtttgctcataaaccctcccactttgaatgggcccaaccaacatttactccagtgactcttatctgagcttcctggctgatctttttttttttgaaacagagtctcgccgtgtcacctaggctagaatatagtggcatgatcatagctcagtgtaacctgaaactcttgggctcaagcaacccttctgcctcagcctcctgagtagttgggactacaggggtgtgccaccatgcccagctatttttgcattttttgtagagacaagatcttgctatgttgcccaggctgatttcgaactcctgggctcaggcaatccacctgctttagcctcccgagtgctgggattataggcatgagccaccgcacctggccccacttccattttttttgtggttacacattccttctacacacatatcaatatgttcacatgttcaagtcttgcaggcttgagagccattctttgcatatctctgctcctgtccattctgttttgatgacacagcctaattttagcctgaagtattgatagctcagtctttgtttagctttgggccttggcatccctgtcctcttttggagttgtggctagaagtcctcaaatgcttcctggcttgtcgtgcaaacctcacaagtatctttatattgtacatctctggactgcagaggtgtgactgtccaacatcaccatgatttagcactaactggaatttaaagagtaacctgcttctccagtctctgactcagctagttcaaatgtctgcagtatttcctctcatcctcacccactgggacactaagactgcttcggactcaccccacaagcagagggggctgataaattagagctgaattacatacaactcccatctgccaaaaaaaacccctcaactgcatgttacaagctatggtgtaaaattccttccttgtaagagacaaaacaaaaactccagagagccataaacttgctcaaattctgaccctgaaattccacttccagacctaaggaaataatcagagatacaaagaattatgtaaaagttctaaactgtaatattacttacaaagtgaaaaagtagaaataatctaaatatctaacaaagaacaatataatgtttatatgatatgcagcgatttaaaatgtttttgaagcaatttaaagacattcaaggtctcatagcatcatgctaaatgaacatagtggaatgtcaactctatgcattaaggctaggtaaggttaaaatgtatatattaygtgcatcaaaagagacctgaagaaaatctcaaaaccatcaccagaagctttcatctttttttttttttttttttttgaggtggagtttcgctcttgtcgcccagggtagagtgccgtggcgcgatcttggctcactgcaacctccgcctcctgggttcaagcgattcttgtgcctcagcctcctgagtagctaggattacaggcacctgctatgacgcccagctcatttttgtattttttagtagagatggggttttgccatgttggccagtctggtctcaaactcctgacctcagctgatccgccagcctcagtctcccaaagtgctgggattatgggcatgagccaccatgccgggcccagaaattttcacttaatgtgaaattatgactaacttattttcccaagttataaaagtgagtgtatattacttttgtaatcckaatttaatagttttctaaaagtactgtctaccccacagcactgcttgatgtcttctgagtgactccaaggagagtagccttttctattttggctctatccatcttcccattttcattgatcactgtctcccacgtactgctttccagccacatggaacctctcaccattctttccacacaacaggccttttcatcactctgtgccttggcatttggtgctccttcagcctggaatrctctttactctcttccatactcactcttcttccaaatgcacttcaaatgctagtttcaggttcctgaagacacagttagtcytcaggwctgtgctctgtagttgttttacacctgctccagcatttatcatgtggtcatgtgactcatttacaacttgccttccccactaaattgtgagcctgtcttggggtagatgtattatttactgttgtatcattactacctagcacaaagccgactatgtgctaggtagtggtgatacaacagtaaacaatacatctaaatacacttatttaacgttcttattacaaagaatgctaaataagttaatttaaaatttactgttatctcttttcaaaaagaatcaaaggccagatgcagtgtctcgctcttgtaatctcagtactttgggaggccgaggcagaacgattgcttgagcccaggagttctagaccagcctgtgcaacatggtgagaccccatctttacaaaaaatttaaaaattarctgcacgtggcatgtgcctataaccctagctactcgggaggctgaagtggaagcatcgcttgagcttaggagattgaggctgtagttaactgtgatcacaccactgcactccagcctgggttatggagtgagaccctgtttcaaaacaaaaataaaaacaaaaaacaggscgggcacagtggctgaggcctgtaatcccaccactttgggaggcggaggcgggtggatcacctgaggtcaggagttcgaggccagcctgaccaacatggcaaaaccccgtctctactaaaaatacaaaaattagctaggtgtagtagtgggtgcctgtaatcccagctacttggggggctgaggcaggagattcacttgaaacctggaggtggaggttgcagtgagccgagattgcaccattgcacgccagcctgggtgacaagagcaaaactctgtctcaaaacaaacaacaacaacaaaacccccaaaagaatcaaactactgactaaataatggatgaacggactagtggcaaggcnaccaatcaaaaacaaaaacaaaaacaaaaaaacaaatctgtggtacttggccatccaagctcagaaaaggaatgatgttggaagtaagttctgtgtaaggctattatacagagctgaaaatgagataattttgtaaataccagcaaaagacatcctgccctagatggcatgtctttggaattttgaattctgtacctcactgcctgattacaactataaaggacctaagatttgattttacttgacttacaaaggctagtaagttagggtttgccacaaggagatgctgaatctgggggacaaaaagaacatgaaagggctcccgtttcccaatctcctgagatcgaatgtgttccctctccaggtgctagggtctccgtggccatgcagttggtgtgtcccatcccagtagccatgtctrtactttttctccaatcgtgccctacttgcttccagacatcttgtctggaagggtcagatgtaagagggacaggggcatttttgmaaaattaaagagaaccattatatcctatcttggcctgtgtagaaccctgtagagggatctagagaacagtgtacttaactaagtagtcattatcgtcatgatataggaccatgttagtccaatctagctgaaccagaattaaatttgaattccctaggctgtctttttttaagtagtcgaaggtggtctctccccagggacatctgaagggtataccaaccaggctggcctgaggatgttgtcagggaaaaaaagatgcatyatgtttagcaatagtcagtgtagaatcttgaattttcaaaataggttctatagctctccacccttatggtccagattatcacctaggagaccaagaggagatgaactctttcyggggaagggtgcatttagtgaccatactgccttactaaggtgtgcagtgagagttagggttagagtcagaaatctttttgagttgatttttgagaaggcctttccaatgttcaaaatgataccagatacctgcaaatgggagtgtgaaatgtcmattgaataccttgactagtggtccattgttgaatggcctttgcaatcccttctcccaagtctcacmggggtgatgtgagccagacagatgtcacacatgcagggagttgtattacaggaggggtaacactgagctcagggactccactgcttttatagcaaacagtaagcaagcttgctctctgtcctgatgggagacatcccttcatttttcaaggttgcttgctgcaacctaaccctgagaaatgtcttggataaagagtggtgagagccttgcattcttggcatacttagcaaggtgtgtaggagtacaagagcctcacagaaaggagcctcccaatagatatgctctgtgaaatgatcagtgctctctcattccatgccgatgaccaacacttattaaaaaacagttgatcaagtaattccagtgaaagaagaggatctctggaagtaataaaaattgctcccttaattcattcttcttttttagtgccttctgtctagtgttttttcaaccataaaatattttttctttaggctcttcaattttcttctaaaataataaaaktgtctttcatgggcctctgatgacttaacttcctttttttcttaggtagtctcctgaaagcaaacacagcatggttattatttatgagctgcaaattatcactacaaatgattcattcatccatttattattccacaaacattgccaggtgactgccatgtgctaggcactgtgctaggtactggagaaacaagggtgactggatagttgaaacacagttcctgccctcatggagttcactgtctagtaggggatataggcacacacaaacatcaattctatttcatggtaataagtgccatagtagaggtatttgagttgtcctggagtatgaattgggttcccatgcaaaaaaaaaaaaaaaaaggatgaataatgcatatggctgggcaaagggaacagggtgagagagggctcaggagaataaaagaaactgctgccctcctctcctatatgtattctatgacctagacttaaaactgattacggccaagtgtggtggctcatatctgtaatcccagcactttgggaggccgaggtgggttgatcatgaggtcaggagatcgagaccatcctggctaacatggtgaaaattcatctctactaaaaatacaaaaaattagccaggcatggtggcatgctcctgtagtcccagctacttgggaggctgaggcaggagaattgcttgaacccgggaggcagaggttgcaatgagctgacatcccaccacagcactccagcctgagcgacagagcgaaattctgtctccaaaacaaaacaaaacctgattacagcacttgatgtactcacgttttaaagatggggtctcactatgttgcccacactgggctcaaactcctgggctcagttgatcctcctgcctcagcctcttgagtagctagggctacaggtgcactccaccatgccaggtagcacttcatttttttttatacagagtcttgcagaataagtcacaacgtatgcttaagattcttttttcaacctgaggacctggccgggtgcagtggctcacgcctataatcccagcactttgggaggctgaggcgggcagatcacttgaagtcaggagttcgagaccagcctggctaacatggtgaaaccccgtctctactaaaaatacaaacattagcctgtgtggtggcaggcacctgtagtcccagctacttgggaggctgaggcaggagaatctcttgaacctgggaggctgaatcttgaatctcttgaacctggaagttgcagggagccaatatcacaccactgcactttagcctggctgatagaatgaaactgtgtctcaaaaaaaaaaaagaaaaagaaaaacagaaacacaaaataaacaaaaaacaactaaggacctagaattaaagatgctaacattttaccaatgttacaaatgtgactctctaatatatttattttaaaaacaatcctgcatttttttttttttttttttgagacagagtctcgctctgtcatccaggctggagtgcagtggcacgatctcggctcaccgcaacctctgcctctccgttcaagtgattctcctgtttcagcctcccaagtagctgggattacaggyacctaccaccacacctggtctaatttatgtatttttggtagaaatggggtttcaccatgttttccaggctggtctcaaactcctgtcgtcaaatgatctacccaccttggcctcccaaagtggtgggattacaggcgtgagccactgcacaaacctgattaatttgtgtgacagaagtagcatagcatccttttcctgtctatttaaaggttttctttaattaatattcatgcccctagaatctttcataatacaatttttaaatggtcatagttcttcttcttctttttttttttttctcgagacagagtctcgctgtgacgcccaggctggagtgcaatggygctattttggctcactgcaacctccacctcctgggttcaggtgattctcctgcctcagcctcctgagcagcagggattacaggtacccaccaccacacccagctaatttttgtatttttagtaaagacaggattttgccatgttggccaggctggtcctgaactcctgacctcaagtgatacacctgcctcggcctcccaaagtgctgagattacaggtgtgagccaccccatctggcctgtaattctttacttcccaaattttctacaatgatcacgtataattttttagatagagaaaaatatttttttaaaaaggagtaaaggaaacaaaagtcagtcataagacaactggctcctgagtggatatcagccttgtccatccttcctgatcatacgaccatttccaagatagctgtcccttcccagagcagtgggatattaatggcgtgatgccagcagtgcacttctaaccagggcacattctttggagtctgtggagttttttgtggccctaagcaagaatactaacctttagtgccagccacatgacctacattacagtagtcaggcaatttatctggtctcctctggggaattagccctgagccctagctgacagggtaagagcctggcttcctgacagccaaattgcccatctttctaatctcatattctggttattttaattagataattaacctggctctctatgtctctgttctgctctctgctcctgccctacaattctgaaatggagcctccttcaaatcctgacatctgttcaggaagggtccaataatgcaaaatgcaataaaatgaggcatatctgtacataggtatatagtttctgtgataaacttaatttctcaattggccctttaagattcagctctctggcgccttccctgactctgctaggccgaagtaattcattgayttattcatcaaacatgtactaattgcctacccaacatcagacactgtgttaggtaatggagaaaaagaaggattaagacaagacaaatgccttccagggattcacaatctagataaacaaagaactgtaatggggataatcataaaggtatgcataaaatacataccacaatggatagaagcctgagatctgacttggttctttaatgatgattaggaatttgcagaatagatgtgagggacaggaaggaaacagaaaatattttaggcagatagaacagcatgtacagaggcatggaaggcagaagctatatcttaaccagctctgcttccctaatttatctaggatagtgcagggcacatggtaagtacctctgaatgtttgttgaatgaatgaatgaatgaatgagtggctgcttttgttactagaggcttctgtttcaaaggagtgtttatgcaactccagtaaactttttaaaatttaaatttagattttgaaaaatctaaacacaaacacaatttaccatttattaagctcaactctcaccgatataatacccaagctagttctctatgagatctttattcaaaaatgtatagacacggagggggaatgcagtatataccaacaaagtggctgcctgactcacagtaattccttttcctgtaaaatgtctctttatatagggtagacccccagcagccacatctctgcctttttaccctgctgtctcccccctcccctatcctgccccacctacatagctgactgatacaggggtaaaccatatgacctgaaacttgccaaatcagggtcctaagagaaattaaggggtattatgggaggcttggccatgatatcagccaggaaaggaaacagtttgctatgagacagaacaaagctgactcatttagaagtcaagacagaatsctagcagtgttccagtccctgaatctaccttccccatggctcwgctgcaccctgtccttccagtggctatgtaaataacctcagcatccttccaataaattcctcctttctgccctagctggtttgagttggatctctgttactcgtagtcggaagacccaactaacatagggaatgaagacaggaactaggaggccaacttacccaggctctctgtggcttccacacagatgctaggatacatgccctcagtgtaagttgcyaccagaagatacagatgggtcttcacracaaccacaccagtgttctcctgtataaagaatataagagaatattctgctcttggttctaatcacaggaccagtggtcatgctccagctacgtttttcaccatttcctgatttccatatgtttggaatatatatggaatatacatattccgtatatattttccatatgtttatatatctgtttttggactgtccactcttttccaccaatttagttgcctttcctcaaaaagtttcagactgttataataatggtagatggattttgaaaaagttctgcaattgattatcatataccccatcccaattagaacaactgatgtaggccgggtgcagtggctcccgcctgtaatcccagcactttgggaggccaaggcagaaagatcacctgaggttggaagtttgagaccagcctggccaacatggtgaaaccccatctctactaaaaatacaaaaattagccaggcgtggtggcaggcgcctgtaaccccagctactcggtaagctgaggcaggagaatctcttgaacccaggaggtggaggttgcagtgagccgagatcgtgccattgcactccagcctgggcgacaaaagtgaaactcgtctcaaaaaaaaamaacaacaacaaaacaaaacaaaacaaaacaaaactgatgtaatggaaaggtcgtacattttggaattggacagctctgggcttgaattctagtgcctccttttctgctgcatgagtaagggttatttaaccttgttaagcctcagtgtcctcatctgtaaaatgagattatttagtttataatgtggatgaagcagcatgcctaacccataatatagggcatccaatgaatgattttcatctctttcattccttataagcaacagagagctgattttttttwaaattttttttttgagatggaatttcgctcttgttgcccaagccggagtgcaatggcacgatctyggctcactgcaacctctgccttctggattcaagaaattctcctgcctcagcctcccaagtagctgggattacaagggcgcaccacacctggctaattttcttgtatttttagtagaaacagggtttcaccatgttagctaggctggtcttgaactcctgacctcagcctcccaaagtgctgggattacaggtgtgagccactgtgcctggccactgagaaatgttttaagcacagaaatgattatctcttttttttttttttttaaaggaggatgtagagtatgaaggtgggactgtattggaaagagttcaggcaaggctcagttaatagattctggaatgaacatttctcaaaaccaggctcttgataggactttctttcacatatgtcttcctggcactagactgctatctcaagacaatggctcaagacattaatggatttaatctgttttacagaaaggatcaggcagagcaaggaaatttggaggcaaattcttttcttttactcagctctcttcaaatcttgagcactcacatttttggcataaagagaatattcatckgcccggacacatctgtaatcttttcccttgaaatacagtccttctcttcgggcttgcaaagggttcttggcaaatccattcaccagtgttcggacatcactgggcgttacctggagaggttacatggttagagcaggagtcagccaactatggctggtggccagccaaatttagcccactacctgttttttatggcctgcaagctaagaatggttttcatgtttttaaatggttggggaaaaaaaatcaaaagaataacacttcgtgacacttacaaattatatgaaattcaaacttcagtatccataaatataaaattttattggaacacagtcacattcattcttttatgtatggctgtttttcctctacaattgcagagttgagtggttgtgacagagactctacggccctgtgctatagtttgaatctcatgttgaaatctgattcccagcgttttcggtggggcctaatgggaggtatttggatcatgaatagactgatgccctccctgcgagctgggggaagctgtgagttttcactgtatttgttccaggagagctggctsttagaaagagcctggcacctctccacttgctctctcttgcttcctctcccccactgtgatctctgcacatgctggctccccttcacctctgccatgagtggaagcagcctgaggctttcacagatgaccagtcttccaggcagtagaactgtgagccaaataaacctcttttctttataaattacccagcttcaggtattcctttatatcaacagtaaaaagactaagcctagaaacctaaaatatttatgtagctctttacagaaaaagttcatttaaaagtcaygtctgggctgggcacggtggctcatgcctgtaatcccagcactttgggaggccgaggcaggtggatcacctgaggttaggagtttgagactagcctgaccaacatggtaaaacaccatctctactaaaaatacaaaaattagccgggcctggtagcgcactcctgtaatcccagctactcgggaggctaaggctcaagaatcgcttgagaggcggaggttgcagtgagctgagatcatgccattgcatcccaggctaagcaacaagagtgaaattccgtctcaaaaaaaaaaaaaagtcatgtctgcttcattttttggaagaatagaaataataagtaaatcaagtcttaggtccaaacttgttttttcttacattgaaacctggtgatgctacacacaagctccgctcctggattttgatgagggctgcactgtccacatgcttggttcccaagagggtgtctaacaataagctctgcaaatggctcatgttccctcaactctgaaagggaaagtgcagttgaagccattgactctggctagcttttaaaaggcatgtgaatacaaatgtccttaagacactgcagacagttctaagatcagcaagtgtactttgaaaaggtacagggtgaaaacggtggtccatsattcagggcccaccagtacccaaagaggaaaacagaatcatagaaaaatcacagctcacacagaataggttatgaagctgagtttggaaaatcacagcctggtgattttctggctatgtcaatggtttacatcaggattatctgsgatttaaaaacaaacattacacactgagaaaaactctgtaaaataaaaaataaaaacaaaaaacaaaacccagccaggatggagagctaccctgctaagttaaacacgactaaaagagattatgcgtggccataaacccacacattcccttcccggtgacctgcatcagcgccagctatgaacgctgatcaacatcccaatggactaaaaacaccttgaaggcacttaaacccacatttcccgcacaagtccccaagccttggacccccctcatcaggacctccggcacaggcgcccgtttcccgccactgccttccagtggtttggtccccgagcaggacccaaggcggggcagggggtggtgagcggtgaattccctggcaccgaggactcgagggagcggacgccaccccgctctgtggtgcccgcaaggacccggcgaccaaggacccgaccgtcaacggacgcggttgcgggtgggtggcggcggcaggattggccgggccacgcgccggtcaccgagaagcagcgactccagccccttccgcaaaccaagacccgccacctagagccgccgcccaatcccctttgggcctgaagccgtcctccgccgccccggcaccgcccgcgcggactcgctgtggaacccgcggcgcagggggcggagtgctcgcgcggcgctgcgtccgggagacggtgggcgccaacattcgcgcgttccgcagacgcgggcgggctcccttccagccgcagtcggacggctccggggtcgtcgggccgggcccgagtgtgtagcaggacggccgcgggcctgctggccttgggagggcagagaggtgcctgtcgcggccggcgacctccccgccaggccgggcggtccccgcgcacgacgcgcctgcgcgggaggcccccggcccggggctggcgtggaggccgcaggcgcccggcctagtgggtgggaggaagggccgggagtgggcgcgatgagcgagagcgggtgcggacgcctacgacatccccgtcgcacccgtgcctcggggaggacttcgagccgctcagagctcgaagactcgcgcagtatgaccgaaagcccctccctgccttctctaagcagctcagcctgtgtttctgtggccagaaagttgcagttcttcccactcgaggccaccaaagtcagaaaagtgttgcaaatgggactccgagaggccaggctgaagctgccacactggctggaatgggctgccttggagggggacgtgggaatccattccaagggacgggggattctttcaaagagcatctcgcctgcttataaaggaggctggctctgaagccgtcatctggagtctgtagtgaaggcctcttgttagggaaactggatggttmgtgttcaaaatccattttgcgtgtgtgcaaggacacaggtggtattaaacagaagagaaaatcagatgactgtgaaatgttcaatactaaataagatgatttttagtttttccaggggcattgttatttgtgaccacaatgaaaaatgtagacagtgatgatctggtaactggcacacttcccaagctcaagagctcaaaagaatggttggagcccaagcccctttgttttatggaggtatatatcaaatagtgtgggatttggagatttttttacttggatcgttgcagtaggaagtggcttgtgctaaatatattgttttttctattgtttgtttttatttcattctgtttattattcccttcactttactaactttgtatattcactttgctgtttttttctaacatcttaaggtggaatcataggtcattgattatataccttttaaaatgtaacatagctataagtttctcttgaggtactgccttagctgcatcacccaaattttgatatgatgtatttatttatttatttatatttgagacagggtcttgctatgtttcctcctggaatcaagccatccttccactccctagtagctggaagtataggcgcacgccaccatgtctggctaatttttgtattttctgtagagatacaaaaaatctctacactgtgtcgcctaggctggtccccaactcctgagctcaagcaatccacctaccgtggtgttccaaaatgctgggattatagctgtgagcccttgcgcccagccagttatattgtttttagattgtagtttcttttttctaaacagctttattaagatgtaattgwtatacagtaaactgcatatatttaaagtgtgtgtctggcactgtgcctcatgcctgtaatcccagcacgttgggaggctgaggtgggagggtcgcttgagcccaggagttctatctagaccaggcagagcaatatactgagaccctgtctccacaaacgaacraacaataatagccaggtgtggtagcatacacctatagtcccagctgcttgagaggctgaggcaggaggattgcttgaccccaggaatttgaggctgcagtgagctgtgattgtgccactgcatccccacctgggtgacagaataagaccctgtctcaaataaagtgtacaaacttggtaagttttgacatgtatacacacgaaaacatcaccacaatcaagatggtggacatattcagtactcccaaagcttccttaatattctgttgtaatccctccctcacatccccccaccactgcttttctttctttctctttctttcattctttctctctctttccttttctttttcttttctttctttcgctctatcactcagccaggaaaacactggcgtgatctcggctcaatgcaacctctacctcccgggttcaagtgatcctcctacctcagcctcctgagtagctaggattacaggcctgcgccaccacacctggctaatttttttggatttttagtagagacggggtttcaccatgttggccaggctggtctcaaactcctgacctcaagtgatctgcccgcctcggcctcccaaagtgctgagattataggtgtgagccactgcgcccagcctgctttgctttctgtcactctagtttgcattttaaaaattgtatacaaatggaatcttacagtatatatttcttttccttctgtttgtcttctttcactcatcataattattttgccactcacccatgttgtatgtatcaatacttcattccttttttggttgaatgctattcccttatctggatatatcccaatttgttcatcctgtttatggacatttgggttgattccagtttggggctattacaaataaagctgttatgaacattcatgtgtgtgtctttgtatggacgtatgctttcatttctcttgggtagatatttagttgtggagtgactgggtcatatggtaaatgaatttaactttatgaagctgccaaactagtttccaaagtcattgaattattttacattcccactagtagtgtgtgagagttccagttgtttcataatctagccaacatttggaatagttttatttatactgatttattgtatggcctttttaactcaagacattttaaaaagatgtatagtgacatctcattgtggttttaatttgcatttccttaatgactgattatgagcatcttttcaagtcttacttgccatttatctatcttctttggcaaagtgtttgttcaaatcttttgcccactttaaaattggcaattttaagttgggttgtttgtattcttactgttggactcttcctattgagatataatttacatgccataagattcactacttttttttttttttttgagacagagtcttgctctgtcgcccagactggaacgcagtggcgtgatctcagctcactgcaaactctgcctccccggttcacgccattctcctgcctcagcctcccaagtagctgggactacaggtgcctgccaccacacctggctaatttttgtttttgtatttttacaaaaaaaaagtagagaggggtttcaccacgttagccaggatggtctcgatctcctgacttcatgatctgcccgcctcggcctcccaaagtgctgggattacaggcgtgagccaccgggcgcccggccaagattcactactytaaagtgtacaattcagtgttttttatttttttttaaattcagaatttttattttcagtgttttttagtatattcacaaatccgtgcaactgtcaccactatctaattccagaacatttcatcacccccaaaaagaaacttcacaccttttagcagtcaccccccattcccctccctctctggctcctggcaacactgatctacttcctgtctaaacagatttgtctactctggacattttatacaaatggtatcatacaatatgtggtccttagtgactgctttcacttagtataatgttttcaaggtttgtccgtgtcagagcataagcagtactttattccttttgatgaccaaataatattccattgtctcagtatcacattttgtttatcccttcatcagtggatggacttttgggttgtttctgtttttttgctgttatgaataatgctgctatgaacattttgtgtaactttttaggtaacatgattgcagttctcttgggtatgtaacctaggagtggaattgtttgttgggtcatatggtaactatatgtttaactttttgaggaactgctgaactgtttcccacagcagtgataccgttttaaattttcatagcaatgtatgaaagttacaatttctccactgctcagagttcattgaacttcttgtatctgtgggtttatagtttctgacaaatctggaaaattttcagccattatttcttttttttttttcagctgagtctcactctatcacccgggttgcagtgcagtggcatgatctcagcttactccaacctccgcctcccgggttcaagcaattcttgtgcctaagcctcccgagtagctgggattacagatgtgcaccaccatgcccagctaatttttgtatttttagaagagttgaggtttcaccatgttggccaagctgatcttgaactcctggcctcaagtgatccgcctgccttggcctcccaaagtgatggaattacgggcatgagtcactgtgcctggcctatttcttaaattattttttctattccctccatcttttgggaaatacaactgtatgtacaataacctgcttgaarttgtcctgtagctcactgatattctggtaattttcttcagtttttcccccgtgcatttcattttggaaagctgctgttgctatgcttttaagttcactaacyttctgtaatgtctaatctgctaataaacctacctagcatatttttatctcaagtataatttgtgtccctagaagttttatctggattcttttgtttcgttttttgttggtttgttgctgttgttgttgttgttgagacgggatctctctatgtagcccaggctggtcttgaactcctggcctcaagtgatcctcctaccttggcctcccaaagcactgggattacaggtgtgagccatcatgcctggcccttagctctttttcaaacatttttttctgtctcaacatgtctagtcttctagcttccctaacttatgaactacaggaataataacttttaatgtcctggtttaataattatagtgtctttgtcattttgggggcagttttggttaattttccttcttattattggttaaattttcctatttctttgtatacctggygattattggttaaattttcctatttctttgtatgcctgatgatttttgattaaatgcaagactgtgaattttaaccatattgagtactagatatttttgatttgctataaatactcttttttttttaagtacaagtgcacagatttcccataaatatttttcatttttccccttggattcagttaagttacttggacacagcaggattctttcaggtcttgcctccgagttttgcttgacaggaccacagcagtatctaccgtagggccaattttgtttcagtactgatacaaaacctctccaaatactctactctatgcacttcaaactatgggaatttttttttttttcctctggctgatgctaaagggaacaaacactcctgggactgtgtgacctctagggattgattccctaattcttgcaggtgtttctttgcccattgttcctttgggcatgtagtgtttacgatcagctgaagactcaaggggacctctgcggttgaccctttgcagttctccagagctccatctttcttgtagctctcctccctctagtactctaacctatgaactccaactgctctggcctctccagactcccatccccactcctcaattcaggcagacagttgggctgtttgttttctatttctcaggggccactgttcttctttgcctgatgttcgatatcttggaaactgttgtttcatctattttatcttttttttttttttttagttgtttcaggtgggagagtaagtctgtttcctgctactctgtcttgttcaaaagtgaaagttctcatccagacattattttttcaaacagttgtttcctgctccattcttttactcctcacttctgcaactctatccatttgctgaatcgtttgatattgtctcataggtcactatgactctgtttattattttctaatctttattcttccttttttttcagattgggtaatttctaatggtctgtcttcaagttcactgactatttttatgtcatctctaatctgctactaacccattgaggtttgtttatttctcaaatttaagaactgtattttccacttggttttttatcatttctattctctgctaagattttctattcattaattataagcatatttttaagcatagctatcataactgtcctcaaatccttgtcttctttttttcagattttcatgtcaatataattttctttttatttttcttattttactttaagttctgagatacaagtgcaggacgtgcaggtttgttacataggtatatatatgccatggtggtttgctatcaacctgtcatctaggttttaagccctgcatgcattagctgtttgtcctaatgctcwcctcccctcacccccagccctcgactggccctgatgtgtgttgttcccctccctgggtccatgtgttctcattgttcagctcccasttatgagtgagaacatgcggtgtttggttttctggttcctgtgttagtttgctgagtatgatggctttcagcttcatctatgtccctgcaaaggacatgatctcattcccttttatggctgcatagtattccatggtgtatatgtacattttstttatccagtctatcattgatgggcatttgggttggttacatatctttgctattgtaaatagtgctgcaataaacatacatgtgcagatgtctttatagtagaatgatttatattcctttaggtacatacccagaaatgggattgctgsgtcaaatggtatttttggttctaatatccttgaggaatcgccacactgtcttccacaatggttgaactaatttacattcccactaacagtgtaaaagtgctcctgtttctccacagcctcacaagcatgtattgtttcttgactttaataatcactattctgactggcatgagatggtatctcattatggttttcatttgcattgctctaatgatcagtgatgttgagatttttttcatgtgtttgttggccatgtaaatgtcttcttttgagaagcatctgttcatatcctttgcccactttttgatttttttttcttgtaaacttgtttgttttttgtaggttctggatattagagctttgtcagatgggtagattgcaaaaattttctcccattctgtaggtttcctgttcattccaatgatagtttcttttgctgtatagaagctctttagattaattagatcacatttgtcaattttggcttttgttgcaattgcttttggcatttttgtcatgaagtctttgcccatgccctgaatgttattgcctatgttttcttctagggtttttatggttttgggttttacatttaagtctttaatccatcttgagttaatttttgtatacagtgtaaggaaagggtccagtttcagttttctgcatatggctagccagttttcccagcaccatttattaaatagggaatgcttttattaaaggaattctttattaaaggggaatcttttccccattgcttgtttttgtctggtttgtcgaagatcagatggttgtaaatgtatggtgttatttctgaggtctccattctgttccattggtctatatgtctgttttggtaccagtaccatgctgttgtgattactgtagccttgtagtataktttaaagttaggtagcgtgatgcctccagctttsttctttttgcttaggattgtctgggctatatgggctcttttttggtttcatataaaatttgaagtagttttctctaattctatgaagaatgtcaatggtagattggtgagaataccattgaatctataaattactttgggtagtgtggccattttcatgatattgattcttcctatccatgagcatggaatgtttttccgtttgtttctgtcctctcttatttccttgagcagtggtttgtagttctcctggaagaggtccttcacatcccttgttagctatattcctaggtattttattttctttatagcaattgtgaatgagagtttattaatgatttggctttctacttgtctgttgttgatgtatagggaatgtttgtgatttttgcacatcgattttgtattcggaggctttgctgaagttgcttatcagcttcaggagcttttggcctgagatgatggggttttctaaatatagaatcatgtcatctgcaaacagagacaatttgacttcatctcttcctatttgaatacactttatttatttctgttgcctgattgccctggccagaacttccagtaatatgttgaataggaattgtgagagagggcatccttgtcttgtgctggttttcaaaggaaatgcttccagcttttgcccattcagtatgatattggctgtgggtttgtcataaatggctcttattattttgagatatgttccatcaatacctagtttattgaaagtttttaacatgaagggatgttgaattttattgaaggccttttctgtatctattgagatgatcatgtggtttttgtcattgattctgtttatgtgatggattatgtttattgatttgcatatgtggaaccagccttgcaacgcagggatgaagccaacttgatggtggtggataagctttttgatgtgctgctggattcagtttgccagtattttattgacaattttcgcattgtacttcaacagggatattggcctgaagtttcctttttttgttgtatctctgccagattttggtaccaggatgatggcctcatacaatgagttagggaggagtccctccttttcaatttttgaaatagtttcagaaggaatggtacgagcccttctttgtatctctagtagaatccagccatgaatccctctggtcctgggattgttttttttttttggttgataggctattaattactgcctcaatttcagaacttgttattagtctattcagggattcgacttcttcctcgtttagtcttgggagggtgtatgtgtccaggaatttatccatttcttctagattccaacatatgggtcatttcagagttggtctccattgattgtttttttcttaagtgtggatcacatttttctgtttctttatatatctagtaattctagattacattttggacattatgaatgatacattgtggagggtctggattctgttatattcctctgaagaatattgagcttttgttttaggaagcagttatctttgctgaactcaatctccaaacttgtctttcctgaagttggcagcagatgaagtcacggtttagtctttttttatcttaagctgggctacatggagtctgccttatgcatatacagttcaagagtttgccagatatttggtcagagttcttttgcagaatttgtggcatcctttctttggctccctcttttccagtatttttcctctcaccttccagctcccatgcttaccccaaactctgtcttctaattcctgaaccagttaggccgcatgtttctatctgagttttagccacctcctttacctcagactaaggccctttctcaggcaagttaataaaaaactggaaattcatctagtgctgtttttttttcttggtgttgaatagcattcagtaacttcctgctttttgatcactctccagtgtcttcaggttgttgttttttatattttttatctggaatgttaattcactaccccctatctgagtacagactttccaggaagggcaactctatgaggcaaaaataacaaagaaaacaaactagagtagactcatttgagttttctatgcttctagttgttgcttagctcccatgagccttggcttctttggatgttaatggggaaggacagttcttagataatgagattttactcatctgtcctggaaataaaagcagtgggactgaagacaactactttcactgacagttaacttgagaatattttatttgtatgtaattacatgaggatctcaaaggcaattctgtgctagaaatcaactgyttccattttctggcaggtatttaataattgtggaacatttgttataaaartggaaaaattaatgctgtcataattttgtcactaatatcactgttccctaaagattgtgttatttcaaaatctgaaaatgtgacttgtatataaaaataggatttgactgggcatgatggtggctcatgcttgtaatcctagcactttgggaggctgaggtagaagcattgcttgagctcaggagtttgagggtacagtgcgctatgatcatactactacactctagcctaagtgacagagcaagactgtctccaaaataagtacattaaaaataaaatttattaatatttatttgatagccatattcactaatgataaataaatttgttccaattatatttatgtcaatactgtctaagaaatttgtttcagtcttttgggtaatttgtcaattgtcatggaaaaattaaatgaatatgtttccttttattttaataagagctttcattttgagaagatctaattacttgtttaattataattttacattttatagacagttgtgagttaatggataaaaatataactcatttccttgatttattatatccataggcttatgtttcagtaattttcaaaaacaaaattagtgggtgaattcattatggaagaacacgaaaaagaacaggagattgaatagaaagtctttctaagaccttgtattattgttcactagtgacatttcttctatgtatagagtttgccttaggtggcactaagcttttagtgaaactgttgacatattcttaactagttctgtaagaatcaaggctggaagattagtatgtcttgcatagtcaaaaagcctcaaatagaggcctaatttaatctattttaacccagaaaagtaaaagcattttataggaagtgaaaaaagatggattgtaactaccatgtgactctggaaaagacatttgaacattttgggactcaaartgtctgtgagctgagttatattttggtgtagccaagagcagacagatcgaaatactgtttaaaaagcacttgatgggctgggcacagtggctcaggcctgtaatcccagcactttgggaggctgaggcaggcagatcacttgaggccaggagtttgagaccagcgaggccaacatggcaaaaccccgtctctatcaaaaacacaaaaattagtcaggcatgtgttgcacacctgtaatcccagctacttgggaggctgaggcacaagaatcgcttgaaccctggaagtggaggttgtagtgagccgagatggtgctggtgcactccagcagcctaggcgacagaacaagactctgtctcaaagaaacaaacaaaaaaaagcactcgatgatatgatttggaggaaacaaactgcatgcatagagaactttccagggatatgtctgtcatgctaaatataatgattccagatagcactaatagtttttaaagattttcttttcaaagtttaattctgtcctttcaggttttagctaaasaagatactgaggcagctattcaatcaatattatacaaagaaaattctgtaattaaggtaagaattggctacaaaatgcatctcagttaaaaattaaatgtagtttttcctttttatatgtagcatattctataaaaactatttagaaaatatggaaaamagaattaaaagaacactcccttgcacctggaattaaccttaagggatctctgaaattgctctaatggacttcctcccttcctatactttgtgggaattcctttgcagagaggcacagaaattttcctctactcacttgtttctttgtcttagtgggtttcagcagtcactataaatgagctaayccttaagagctgttagcagaacacactgactaattattactcagatatacatagaacagggtttaactgagccaggatgggcttaatgtgacaagaagaacatccatgtgaagtgtactaaacaccagggacactggagtgggtaacctgtttttatttttaagaaatttctttagagctctttaaaaaggaaaggaactaacattgggaatggctgaagtgtgctatggccagaggttagggagggactcggcctagcagacctctcagggttcttaatattttatttatttcattttgaatttcaygctcttcctagtagtcacatgactttatttgctatatgaaaggtgaatgagaaggtttagtgagaatgaattagtttgtagcctaatcaagcatcatctttgcaggctacttgccacttggattaggttatgccacacttctgcctctttactcttgcctttttttttttytgaaggtcagttrtagtgaagggttttttttttttttttttccawagaatgtttttcttcctctttttctgccatcccttctcttcctggataacccttctttttttttttttttttttttttttttgagacagggtctcactctgtcacccaggctagagtgcagtggcacaattacagctctctgcagccttggcctcctgggctcaagtgattctcctgcctcagcctcccaattagttgggattacaggtgtgagccacggagcctagctaagttttaatttttttttgaaacggagtcttacttctttgcccaggctggagtgcaatggtatgatctcggctcactgcaacttccacctcccgggttcaagcaattctgcctcaacctcccaagtagctgggattataggcacgtgccagcatgcccggctaacttttgtatttttagtagagacgtggtttcaccacattggccaggctggtctcacactccttacttcaagtgatctgcccacctcggcctcccaaagtgctgggattacaggcgtgggattgccactacgcctggccaagttttaatttttttgtagagacggagtctgactattttccccaggctagacttgaattcctgggctcatgtgatcctcctgccttggcctcctgaaatgctaggattaccggcgtgagccaccgcacctagtgtaaatcctcattcttaaaggcccagcccaaatgtctcccactttgggagtcttggctttgaaaaaaaattaatcatttttttcagtgtatgcgatataaaagtaaatatacacaatataaaatttgccattttaaccattttaagtgtaccattcggtgtcattaatcacattcataatgttgtgcaaccatcaccactatttccaaaactttttccttactccaaactgacagtttgtattcaataagcagtgactcctcatttctccctcccccaggcacttggtaacctctaatctaccttctggctctatgaattttggctattccagatagttcgtatatgtggaatcctgtactatttgtccatttgtgtctgacttatttcactttggcatactcttttcaaagtacatccatgttgtagcatgtttcagaacttcattcctttttgkggctgaataatattccatattacacatataaataaatgtggtatgtatataccacattttatctgttcatctcttgatggatacttggatcgtttccaccttttggctattgtgaataatgccgcaatgaacattggtgtacaagtatctatttgagcctggattttcattcatttgggtaggagtggaattgttgggtcttatggtaggtctgtttaaatttctgaggcccaccaaactgggaatcttttaagaatctagcaaatggtttttctctcctctgtcttcagttattttatttatagtatgccatacatatatccatcatatataaatatacatcttgctatattccccctcccactgtttgtgattttgtttgtttgtttcttagggatgggttttcactctgttacccaggctagagtgcagtgtcccagtcatggtgtactgcatccttgaagtcctgggctcaagtgattctctagcttcaccctcccaggtagctggaaatataggcaggcgccaccttgccttgcttttgatttgttctttagtctttctccccagggagagcaggcatgttgccccaaatacctgtgttttccttgtttgcagcagagtgtatgtcacatagtagaagttaaagccaaagaaacgattgaattaatgaatgtctctgtgggttattcttaggagtaatttaaacttatgaagtttaagttttggaaaattttagaayaagaaagctttaggataatatatttgtcttttctaccactgtttactaggaactagataagtatttacaacatcatgccttcttaaatgcaagaagaaaggagatgttatataaaagatgggttgactgtgtggcagatcytcttcagaagaaaattatagaaaaagtttgctcacataagaagattaaaaaaaggaggcaaggggaattagatggctttttaaaacatgtaaataaaaaggtactaagagatcatttgatgcttttttcagttgatttagacctaatgtcatctttgttcatttataatcattcagtcagtctgtccctgtcccctctacatatgtatcatctataccctgttacataatagcataaagtattcttaaacccaggacatttggaaaggagagaaaaggaagattagatttaattgtctacattagaaccatttttctgtgttttccccatgtggttattattattattattcgagatggagtttcactcttgtcacccagactggagtgcaatggcacgatcttggctcactgcaaacctccacctcacggcttcaagcaattctcctgccttagcctcccaagtagctggaattacaggcatgtgccaccacactggctaattttgtatttttagtagagacagggtttctccatgttggtcaggctggtctcgaactccctatttcaggtaatctgcctgcctcggcctcccaaagtgctgggattacaggtgtgagctactgtgcccagccctccccatgtaattattaattttaattatcaagttaaaaaatgtgggtgtgtggctcacacctgtaatcccagcactttgggaggccaaagcaggtggatcacctgaggttgggagttcgagaccagcctggtgataccccgtctctcctaaaaatacaaaattagccaggcatggtggtgggtgcctgtaatcccagctacttgggaggctgaggcaggagaatcacttgaacctgtgaggtgcagattgtagtgagccgagatcacacctctgtactccagcctgggtgatggagcaagactctgtctcaaaaaaaaaaaaaaattatacttacaaaataaataatttggactctagtttcaggacatatttttcttttgttctggaacttgattatttgcgaagctctaaaatatagctgttcttctagcatttttttaaaatctgagatgtttractagtaagcatttaaaaacaaattcccaaatcttttagtgttccaacattctttattaagatcttacaaattttaagtagattccttccttcactatacctgattgcttgaataaattaaatttaaaatgtagccttgtctttctttttgcatttgtcactgatgctgctttcaagcataagaatgatactatgtgtttgactctcaagtcctgatatgctcaaaattaactgtgcacctcttgttcttgtgtatcgttttatttccttgctatagggaaatgcatttatagaacattatgatccaaaagagtatgatcccttttatatgagcaagaargaccccaattttctgaaggtagggtagatttcttttttttaactttggtattatgtgtttggttgttttgagcagccctaatatatgagcagtccttaagcgattccctaaaagtgcagtaacattttaagcatagtttcccatcgcctgatcttagaaaggaacaaaaagccaaaggccaaagtaaattaaatctccataaaagtggaaaatactggataatgattgggtaataggtaacgtttaaaaattccatagacttttaaatttgttacaaaagtaacacattttcatgatagataaatgagaaaattgattttcaaattaagaaaataaaaaaccaaaattctattacccagaattaattcattatgttaactcattaacatttttctgtatatctatctagacttctttctatatgtgtgtatgtattcacatttttattttataagaatggagttacatttggttttataatgagcttcccctccctcaatagtttattatttgcttctttctcaaaatataagtatataattttcttcattgcatgatattctgttactaatagcagaattaattaaccttgcactgaaggattaaccaagtcttagggtttttttcacatttatttcacctttgctgctactgtgtgaggtaagtcacagatgagacaagtaagattcaggtcacttgtcaaagtcacccagctgtaaatagcagagcacagatgtggtgttttgttttgtttcgttttttcagagggagtctcactctgtcacccaggctggagtgcagtggcgcgatctctgctcattgcaacctctgcctcccgggttcaagagattctcccacctcagcctcctgagtagctgtgattacaggcgtgtgccatcatgctcggctaatttttgtatttttagtagagatgaggtttcaccatgttggccaggctggtctcaaactcctgacctcaagcgatttgtcctccttggcctcccaaagtgctgggattacaggcttgagccactgtgcctggccttatcttgtataaaatgttgttttgaaatatgtacacattgtggaatgactaaaccaattaacatacattgcatcacaaacaccagttttttctaagtaagaaacctaaaatcttctctctctgcaattttcaagaatacaataccttgttattaactatagccatcatattgtacaatagatctctagaaaaattttatggcagccgggcgcagtggctcatgcctgtaatcctagcactttgggaggccaaggcgggtggatcacctgaggtcaggagttcaagatcagcctggccaacatggtgaaatcctgtctctactaaaaatacaaaaattagccgggtgtggtggcatgcacctgtagtcctagctactcaggaggctgaggcaggagaatcacgtgaacccgggaggtggaggcagcagtaagccaagattgagtgtcactgcactccagcctgggcaacagagtgagtgagactctgtctaaaaaaaaaaaaagaaaaattttatggctgaaaaaatataattgcattgcattcaagtgaatttagtgacacaaattatttgttaataaggtttcttgcacrtataaaatagataccttttttttttttgacggagtctcactctgttgcccaggctggagtgcaatggcacratctcggctcctgcaacctccccatcctgggttcaagcgattctcctgcctcagcctcccgagtaactgggattacaggcacacgccaccaggcctggctaatttttgttttattttgttttgagacggagtcttgctctgtcacccaggttggagtgcagtggcgtgatcttggcttactgcaacctccgcctcccaggttcacaccattctcctgcttcagcctcctgagtagctgggactacatgcacccaccaccacgcctggctaatttttttgtatatttagtagagacggggtttcaccgtgttagccaggatggtctcaatctcctgacctcgtgatccacccgcctcgacctcccaaagtactgggattacaggcttgagccaccgcgcccggcctaatttttgtatttttagtagagacggggtttcaccatgttgatcaggctggtcttgaactcctgacctcgtgatccgcccgccttggcctcccaaagtgctgggattacaggtgtgagccaccgcgcctggcctagatactagtttttaaaatggtatttaggggataatttttaccctttttagagaggttttgttagaactggtattggccctcacatgtccaaatcagtgagaagtccaatattaattgtttttggaggtatccaaccttgagttgtacagtcatgctgtgggcttgtgtcatcctacaaagtggtcccacagcctcccaattcttggtggggcacatcactggtcccaggcccaggttgtactatgattgttattccttacggtcacatgctgtggctcaggtgctggccccatttgtagacccagcattggtaatccatgtcttcagatccaggtccttgcccatgtctggcagagactccacctgagagcgtctcgggtaggctctgcaggctgggttcctggcgccctgctctgtactctttatggacctggcacttcccagaccctgctcctgagctgctacagagtctgtaagcttgtccttattctcaattctgggttatcaagtggagatatccaacattatctcctttccccctttcaatttccccagtacagaaaaggttcatcttgcctcttatttcaacagtagggcttgagatggcccagagcacctggcttcagaccaacccaaatgaccctctctatcttcctttcctgggagtgggacagatctgactttaggaacatagaggcttgattccttcccttcagatggatcttcagcatttctttgcatgtgctttgtgcagctctacttaaaaattattaactttactaagtcttgctccttcaatacacatcttttagatgttctttgtgatgaaatgggagtatgcgaacagcacttctgctgcatactgaaatatggatgattgcttgaattgtgagctgaactggctgcttttttttcttccatgaaacaccatttttacttgaaagaatgacttacaaactatagttattaagtcttgggtatttggcggatattttctggaaaatgaatgaagtcagcttgtcactttgagaaaaactactgacaatatttgttgccaatgataaaaggtgagctttcaagcaaaacatttggaattttggaaaactcatattcaccatcagaagtgtgacagtagcccaatactcaaaagacctttctgatgaaattggtactgatattaatgaatgtgattctttgatattcagtaatgaaatgtacaaacatttggaagatcttgcataactccatgatccaattttcccccaaatgttacaaaattacgcgtgggaaaaagattcattcgaagtgcaagatagactaatggacttagtagaagagtatgaaaaattcatagatatggtttcagattccacatcataactaacctttaagaaactacctcttactgagtttgggtatagtatcaaaaacaaatatccacgatgatctaaaaaggctgttaaaatactcctacctttttcttttctttttttttcttttttggtttgtttttgtttttgagacagagtctcgctctgtcacccaggctggagtgcagtggcccaatctcggctcactgcaacctccgcctcccgggttcacaccattctcctgcctcagcctcccgagtagctgggacyacaggcgcycgccaccacgcccggctaattttgttgttgttgttgttgttgttttcagtagagatggggtttcatcgtgttrgccaggatggttttgatctcctgacctcgtgatccgcccgccttggcctcccaaaatgctgggattacaggcatgaaccatcatgcctggccactcctacttttttcaattacgtatctctatatggattttcttcatatatgacaactaaaacaacaaatctcaacagattgcttgcagaagcagatatgagaatccacctgtcttctattaagcaagacataaagaagtttacaaaaatgtaaaacagtgttactcttctcatttttttgtttcaggaaatagagttatttttcatagaaagatatgttaaacataacaggcatattattattattttaaaattaataagcaatttaaaattttctgttttaatttctaatatagtaaatatcaatagatctaagccatatacacaaaagttatttggatataacaacaatgttttgaaataaaatagtttcagctgggtgcggtggcttacgcctgtaatcccagctactcgggaggctgaggcagaagaattgcttgaacccaggaggcggaggttgcagtaagctgagattgtgccactgcactctaggcagcagtctccaaaaaaaaaaaaaaaaattagtttcagaaccactgggttacaatacctccatttatgatgtgtaagtgcttgtcagtagagataggtgtctccggacttataattgtcgataaaactttagattgttgtttgtttctatcttcaatttaaaatttaaaatttggtctgggcatggtggctcatgcctgtaatcccaccactttagaggctgaggtgggaggatgacttgaactcagcattcgagaccagcctgggmaacatagggagacctgtctctacaaaaaaaattaaaaactagctggacatggcgcacacctgtggtcccagccactcgggagktggaggtgggaggatggcctgagcctaggaggttgaagctgcggtgagccactgcactccagcctggacgacagagcgagaccctgtcggagagcttcaagatgactggcttgaggcatctgacatttacctcctccacagaagaaccaaaatagcgagtagaaaattgtacttggaacacgtcatctaagaggaacactggaattccacagagaagtgacaaggaaacatctaaggtgaggaaggagagggaggtgaggcagcctgctcggccctgagactaacacgggggctgcccggagatggagagggccgaggtgtgagcagctggcagcaaccttgctgacctcagcacaggggccacggctcactttcttgcacccagaggacaggccccacctgcagcatcacctaggctgaaacatacactccctaactgcctccctatgcctgctgccactgaaagcaaccccaccctccacagcagcaggtccacagcacagccaccagcacccccacccgagtactctgcagggggctaggggattgccctgccccatccaccaccattggcgagagcccacaagcctgctgctaccaccacagctggcaacctcctgcaygcgccaactggtggtctggagactggcccacccagcctgttgtagccactgccaacacccgtgtggaccactctggagacaaagggttgtctcgtcactgctactgccattgcccacaacatgaccagtgcccaggggttcaagaacctgcccatccacctggccraccgcagccactgcatgcacccaagcaagccacctggagacccaagaactggcccacctgaacccgtaacaccggtgccactgtatactgctctgaggaccaaggacaggcacccttggcctgccactgcttccgctgaggctggggactggcctgcccagtgtccccatcccccgcaaagcctcaccacagcctccaacaactgtaccctaagccaccaaggaaaacacagacaccactgacgctgtttgcagctgaagaaatatggagactatactgttgcacgcacccaggatcaaagccaaagtgtcctacccatccaacaccatagacacgtctccaggaaaaagtcctcccctacggaagcaatccagaaaacaggaagaagcctccattaccccagatgcacagatgtcaatgtaaggacacaagaaacgtgaaaaagcaaggctctgacacctccaaaggaacacaataactctccagcagcagagtccaatgtcatttaaaatttgatctgctcttcatatatgaataggtcacatacaaatacctgaaaatgatagtacctttttttgttcctttttttttttttttttgagacggagtcttgctctgtcgcccaagtggagtgcagtgtcgcaagctccacctcccgggttcatggcattctcctgccttggcctcccaagtagctgggactataggcgcccgccaccacgcctggctaaattttttgtatttttagtaaagacggggtttcaccatgttagccaggatggtctcaatctcctgaccttgtgatccgcctgcctcggcctcccaaagtgctgggattacaggcgtgagccactgcaccctgcctttttgttcctttttatagtgagttaatattttcttaatattttatgagtagcacttttcataacttctgtaaaagcaaaattatactgggcagtctgatcaccgtttaactctaatagtcatgatgtgtattgtaactacccctgaaaaactagcctgaygagcatgagaaagatacatgagtgaccttttaagcttgtggtagaatttcactgactaggcctaaatggtgaatgttgctgttcatgaatcctgttttcatatgtagaactgtcattttgatattgataatattggccattaacatagattcagtgcttccataccttggctcacaaatgatctatattttgaataacttggttaagttttgagtaatgttagttatgttgttgattatcaatgttagggattaagatgaatatatggatatattttttcttttgtgcatgggaaaggaatttttaaaatttgggaacatatggtaacaacaaaataatttttgaagattgaacccacactttgaaacaagagctaactttgtctctttgactggagggcctttaagagaggtattgatatacccccatctctttgtaatatattaaataaatataatggtaagcctgctatttgtaaataccatattatttaccctcccggcataagagccatccatatgtggatgcttagaatagactgaaaatgtttactactcagacttgcaactcagtgcttaaacaagtgcctctcttgtaggttaccatcccaccatttcatgaccctttgaaaaaagcmcaatrtgacaaggataaygaaaaaagaactcttcttcagtgtgagactggtacttagttcctaattgttatgtgatttcatagcccaagagcaatggcagatgcatttaaggatgttaatttagatttttattcttccttcaggcaaaatatattcaataaaggaattcaaagaagttgagaaggttcagctgcattccagattcccacaaatttctaattcaaggcactttataactccaaacgagtggctgaaactgcctacaagatacatagaaagtgaattttgtagaaggagaaggtaatggttaatatactagaaattatagaaccttttggactttgaaaattcttcagactgatataacatttttcatagttatgattttttaaaattatcatttttctttttttttgagacagagtctyactctgaaaatttcatttttcaatgaaaaatccataattcttatctttgtttctctgtatgtgatgtttcttttttcttgggtactttcaagattttctgtttctctttggttttcattagctagattatgatctgtttatatttgtttttttctgtctatcttaatgttctctgaggttctcatatgtgtggttttatgtcttttattattttggggaaatcctaggccattatcacttcaaatatttcttatttcctgttctgtctactttttttcttcctcctgagactccaattatatgtatattagatcacttgatgatgtctcacagtgccatagctcttactctgttctgattttccactctttttttccttatttgtttttcagttggatgatttctgacttgtttttaagttcactgcccttccttagctgtgtcctgtgcccatcaaaggaactcttcatctttgatatcatgattttcaaatttctagcattaccatttgaatttttagatagtttttatttattctgaaattcttcatctgttcatgcatgttgtccaccttttccactagattctttaccatattaataatttaaaactccctatctggtagttctaatgttagggtcatttatgaatctagttctcttgattgctttatctcttgacaatggcttgttttgccttgccttttttttttttttttgcatgtcttgtaattttttattgaatgccagatatttgatgtagaagaatggtgtacatggagtatttatgtctagaaatggatatgcctcttcttctgtcaagcattagtgtggaggattagccttatctagttggaattgagttgggtttgggtaatgttattgctattgttacctttagtgcatcacaggcttgaatacctccagtggttaggctgcttttccttgtgcttagagtgcgggtggggtgccagagggattttctcaagtgtttctgctccttcctcagttttcagctatccatgcaagctggcatcatagaagtggaggggtattctctccatgctcttccctctcccacgggagtataccactgttgcatgttgcttattgcaaggcttctagtggacgcagaggaatatcccatgtttttctcatggagcttcagttttagacaagccctatgtgcttaggcctcagaagcaggactttcctgaggttccttttccttatccttgtggcagccaaacttgaccttgtatctgtggttgttcttggatggcagtgtcctgtctgtcttccaacgacagcaagatttctgcttagtataggaataggagtcttgatacctttttttttaatttgtaaatttaatttttgtaggtacatagtaggtgtatatatttatgaggtacatgagatgttttgatacaggcatgcaattcataatagtcacataatgtaaaatgaggtatccatcccctcaatgatttattcttcatgttacaaagaatctaattatacccttttagttatttttaaatgtatgttaaagtgttattgactatagtccccttgttgtgctatcatatacgaggtcttattcattccttctatttttttgtccccattaaccccatccctacttaccctttaccctcccaatacacttcccagcctctggtaaccatccttccgctctgcatctccatgagttcgattgttttgatttttagatcccacaaataagtgataacatatgatgtttgtctttctgtgcatggtttatttcacttagcacaataacctccagttccatccatattgttgctaataacagggtctcattcttttttatggctgaatattactccattgygtgtaagtgcattttctttatccattcatctgttgatggacattgaggttgcttccaaatcttggctaatgtgaacaatgctgcagcaaacatgggagtgcagatatcttttcaatagactgatttcctttcttttgagtgtgtacacaacagtgggattgctgaatcacgtggtacgtctatttttagttttttgaggctcctccaaactgttctccatagtagttgtacccatttacattcccaccaacagtgtgcaagcattcccttttctctacgtctttgccagcatttgttattgcctgacttttggatataagccattttaactgggaagagatgataactcattgtagtttttttttcttcttctttttttgagacagagtcttgctttatcgcccaggtcagagtgcagtggcccccacctcccaggttcaagcaattctcctgtctcagcctcctgagtagctgtgactacaggcayatgccaccacacccagctgatttttgtatttttagtagagacggggtttcaccatattggtcaggctggtctcaaactcctgatctcaggtgatccacccacttcagcctcccaaagtgctgggattacaggtgtaagccactgcgcccggcttgttggttgatttgtaataaggcttttcttctctcaaaaatctaatgccatagtattggtttctgtgtgtattgggagtgtgagccactgcacctggcctgctttctttctttttattttttgtaaatctgttactggttttttgatttgcggttaccatgaggcttgtaaatgctatcttgtaacccattatttttaactgatgacaacttragactgattgcatatacaaacgcacaaaaagaaaactagtgaaaactttaaactttgtctccctgctttttaacttcttgttgttcctctttgtgtcttattatactattttttgaaaagttgttgtaattatttttkattggttcatcatttagtctttctatttaataagataagagtagtttgcacaccaccattgcagtgttatattattctgtgcttttctctgtgcttactatcaccagtgagttttgtatcttgagatgatttcttcttgctcattaacatccctttctttcagattaaagaactccctttagcatttcatataggatrggtttggtgttgatgaaatccctcagcttttgtttgtctggaaaggtctttatttctccttcatgcttgaaggatatttttttttctggataatactattctagggtaaaagtttttttctgtcagcactttatttctttattttattttattattatttttttgagacagagtctcactgtcacccaggctggagtgcagtggcataatctcggctcactgcaacctctgcctcccaggttccagtgattcttgtgcctcagcctcccaagtagctgggattacagctgtgcaccaccatacccagctaatttttgtatttttaatagcgatggggtttctccacattggcyaggctggtcttgaactcctgacctcaagtgatccacctgcttcagcctcccaaaatcctcggattacaggcatgagccaccatgtctggccatgtcagcactttaaatatgtcatgccactctctcctggcctgtaaggtttccactgaaaagtctgctgccagaygtggtggagctccattgtatgttatttgtttctttcctcttgatgcttttaggatcctttctttattcttgatctttaggtgtttgattattaaatgcctagaggtagtcttctttgggttaaatctgcttgatgttctattactttcttctacttgaatgttgatatctttctctagacttgggaagttctctgttattatccctttgaataaactttctacttctatatctatctcccctgtaaggccaataactcttagatttgcacttttgaggctatttcctgatcttacagatgtgcttcattgttttttattctttttttcttttgtctcctctgaatgtctattttcaaatagcctgtcttcaagctcactaatacatttttctgtttgataaattctgctattaaaagactctgatgtattcttcagcatgtcagttgcatttttcaactatagaatttctgcttgttttgttttttgttttttgtttttttttttgagacagagtcttgctctgtcacccagggtccatggagtgcagtggtgtgatcttggctcactgcaacctctgcctcttgggttaaggtgattctcatgcctcagcctcctgagtagctgggactacaggcacccaccaycacgtccggctaattttttgtatttttattagagatggggtttcaccatgttggccaggctggtctcaaactcctgacgtcaggtgatccacccgccttggcctcccaaagttctgggaatacaggcatgagccactgcacccggcctcattatgagaktttttggtgatttttttttttttttttagctcattagctatcattaatgttagtgtattttatgtgtttctgtgtggcccaagasaatttttttttttgagtcggagtcttgctctgtcccccaggctgcagtgcagtggtgcaatctcggctcactgtaacctcygcctcctgggttcaggcgattctcctgcctcagttccctgacttagctggtattgcaggcatgcaccatcacacctggctaatttttgtayttttatttttatttatttatttattttgagacagagtctcgctctgtcagccaggctggagtgcagtggcatgatctcagctcactgcaacctccctctcccggactcaagcaattctcctgcctcagcctcccgagtagctgggattacagatgtgtgccaccatgcctggctaatttttctatttttagtagagacagggtttcaccatgttggccaggctggtctcaatctcctgacctcaggtaatctgcctgcctcagcctcccaaagtgctgggattacaggcatgagccaccacgcccagacaattctttgtaattatttcaatttctttgttaaatttatctgatagaattctgaattccttctctgtgttatcatgaatttctttgagtttcttcagaatagctattttgaattctctgtttgaaaggtcatatatctctgtttctccaggattggtccctagtgccttgttcagttcatttggtatgtctrtattttcctggatggtgttgatgcttatagatattcatcagtgtctgagcattgaagagttaggtaatgtagtctttacattctgggtttgtccttcttgggaaggctttccaggtgtttgaagggatttgggccccaagcccaataatactgtggtttttgcagactcatagaggtattgcctttgtggactttgataagatccagaagagttatctggttactaggcagaractcctgatatttacccccaccttctcccaaacaaacagtctctctctctgtgctgagccacctggagctgggggtgtcatgatgcaagcacccctgtggccaccattrctggtgccgcattgggtcagacctgaagacgtctagtatagcaccgagtcttgcacaaggcccttcccttcagggtgtgagttccccaggtcccaggcatgtccagagatgctgtctgggagccagggcttgaagtaaaaaaaaccttagcagtttacctgatggtcttttctactgcagctcagctggcattcacaccacagtacaaaatccttcccactcttccctcccctttacacaggcagagaatcctctccctgtggccaccaccaccactggtctatggggattctgccaggtcaccaccgatgtttacttaaagcccaagagctcttcccttcagcttgtggtgaatgctgccaggcctgggactcacccttcagggcaatggactcccatttggttgagggcaggtccagaaatgcggtccaagagcccaggcccagactcagggacccaaaaagcctgcttgttgctctatcctactatgactgagctgggacctaaggtgcaaaacaaagttccctttcctctttcctctgtttttctcaaacagaaggcgtctttcaccatagccaccacagctaggaatgttctgggtcactgctgaagccagcacatctcagaatccagagcccccagtatactccctgggtatcgctgctgctggttttcagggcccaagggctccttagtcagcaggtgatgaatcctgccagggttgggtccttcccttcaaggcagcagattcccttttggcccagaatgtgtctagaaatgtcgtcccaaagctagggcctggaatggggaccgcaggaccctgcctgctattctatcctgctgtggctgagctggtatccgagatgcaggacaaagtcctctttattcttcactctcctccctttaagcagaaggaaggtgtcacctttggagttgctgcaagctgcactgcctggggttgggagagggatggtgcaagcactcccttagccatgccagctggtgtctccctaggtcacgtgccaccctagttttctggctctgagctcagcccaacaygaggaattgcctaggaattacagtccttgttcctagactgcctttcaaatttacctaggagcccagggtacttcagcccacaatggtgaggcttgtggagaaactcaagttccaatcactgggatgggcactttccctctggctaaggctggtccaaatgttggcttcctgagcgggtgctggctgagcccagcatggctttattctctgttgtgacagggcagaaccgaattcagcataagtcccctactcactgggctcaccctccccaaatgtacaaactctctctctgtaccacayggctatgactggggaataggagagaggtggcatcagtgattcaagactgtccctcctgctctcctcaatgcctcttttagtgatatgaagttaaaacgaggtactgtgattgctcacctgatttttggttttggtgatggtgcttttctgtgtgcagatagatgttcaaatttgttgttccagtgcggggaataaagggtgtaagcttctattctgccatcttgctctgcctccagcatcttttcatatgtttctttgccatatactattttcacatgtttttttgccatctgtctgtcttctttggtgaggtgtctgttgttcagatcatttgatcatttttaaaatgggttgtttgttttcttattgttgagtgttaagaatccttcgtatattttgaatgtaagtcccttatcaggtatatattttgcaaataatttctctcagcctatggcttatcttttcattctcttaacagtgtcttttgcagagcacacattttaaattttaataaagtccagctaatcatcaatgtttttctttttttatctgaggatgagagcatgagaggaaaaagagaagaagccaccctttcctctcatgttctaccaaaggcgaagcaggttttgtgtcctgcctctcgtgggagggacttgtctttggaattcagtttacttctttgccttgaaatctgatgggctcaataaaagttatgtttttgtagattatctggcctttttttgcccttggggtgagagcaccattatttctagagcatcattatttctattttaggatgctttctacatcccaaatggaagcagaactaaaatcatttcatttgttatttttaaaaagtggccacaaatggcattgtgaatgttacataagacagaaataaaccttaaaacagaatttcgaaacaatggctgttactttttttctttgtctactttgagcatcataatcctagctctagtaattaaataggttccatccaaaccaggagtctatttataataggtttaactctgatggtatattaagatgatgatatttagaatattgattttatagtgagcaattaatgggcatacagtgataataggtttaactctgatcatgtagtaagatgatatttagaatattgattttgtagtgagcaaatcacattaatgggcatacagtgagttccagtcacactgtttgtttccacccttacttacttattaatgaccaccattaatgactggtggtcattaatgtgataaagaaaatgtcctttttagatgattgtcagattatcttctatgacctcatacttctctagccttatgggggctggcgtgtttgcgggtgactggcttcttctatgagcccttttactgaatcttagtctttacacactaagcaagtgtgtgccagaagtcattgaagaccatgcatatatatatatatatatatatatatattttttttttttttttttttttttttgagatggattttcgcgcctgttgctcaggttggattgcagtggcctgatcttggctcactgcaacctctgcctccccagttcaagcaattctcctgcctcagcctcccgagcagctgggattacaggcatccgccaccacgcccggctaatttttgtatttttgttagagacagggtttcaccgtgttggccaggctggtctcgaactcctgacctcaggtgatccgctgccttggcctcccaaagtgctgggattacaggcgtgagccactgcacccggccaccatgctcatatttttatttcttatagaggaatttcctatatatcctatagaggaacagcttctcttcaatatatttttcaaattttgaagataattgtgatgccacttttcagtctccagcctgaacacttggggtccacatcccatagccttatgtagaaggtgctgatggggccaggagtctgagattgggaagaagctcaagtgcttaacgactaagacagttctggaatgctggaatgtcttcagaagactgtagcaagatgtgtgtgccttctgtgttccggtcacaaatattcaattgtctattttccacacataagtcaaattcaacctatccaaaagtgagcgagtcgtgcttgtcatcttttgcatctaacttgctttttttgtgttcctggttatgggaaatatcagggttcttctttattgctcattatccctttacttaatccagcactgggctctgtcatatccattcctaaatctccttctaatttgccccttctggccaggcgtggtggctcacacctgtaatcccagcattttgggaggctgaagcaggtagatcaccggaggtcaggagtttgagaccaacctggccaacatggtgaaatcccgtctctactaaaaatacaaaaaatcagccaggcatggtggcacaaaccagtgatcccagctactgtggaggctgaggcaggagaatcgcttgaaccctggaggcagaggttgcagtgagccgagatcgggccattgcactccagcctgggcaacaagagcaaaactccatctcaaaaataataaaaataataataatttgccccttcctaaacattcccataaaccaaattcccattctcatgtccaatctataataacatttattatttattgagctctgatgtaccagacactgttatacatttctttccccccccccccagctttttgtttcatttatcttttgtattttttgtttgtttgtttgtttcaatttcatttagttctgctctgatctctttatttctcttctgccgggtttgggtttggatggttcttgtttctcaggttctgtaaggtgtggacttagattgtctgtttgtgctctttcagtctttgtgatgtaggctttccttttagcacttctgctgtaccccagaggttatgataggttgtgtcactattatccttcagttcaaagactttttaaatttctatcttgatttcattgttgacccaatgattactcaggagcaggctatttagtttccatgtatttgcatggttttgagggttcctttyggagttgatttccaattttattccactgtggtctgagagagtacttgatataattttgattttcttaaatttactgacacttgttttgtggcctattatatggtctatcttggagaacattttatgtgctgatgaatagaatgagttatacacttcttaacatgtgctaattttgtttcatcttcacagaaattttatttggtaggtactattacacagatgacttaaggaccttttcaattttatagcagtatttttcagctttggctttatatcagaatatcatggaaagttaaaaaaaaaattctggccgggcatggtggctcacatctataatcccagcactctgggaggctgaggcgggtggatgacctgaggtcaggagtttgagaccagcctggcaaacatggtgaaacccagtctctactaaaaatacaaaaaatagccgggcctggtggtgcatgcctgtaattccagctactcaggagtctggggcaggagaattgcttgaacctgggaggcagaagttgcagtgagccgagatcacaccactgcactccagcctgggtaacagagtgagactctgtctcaaaaaaaaaaaaaattaatatcccaagccataccctagacaaatgaagtcagaatctctgagggtgggacctacacatcagtcttttttcaagatcctcagatgattcgaacacataccaggttgaaaaccacttatttatagccataaggcagtagattcagaaactgaactaaggtctctgactccacagcctacattctaaaacacagtgccacactttcccttatgttacatggtgctaccagggtgaaatgtggcatgtcatgttactgcccaacttaatctctttagtgattcctgtgtccctcagttaaaatgtgatctctttggaatgacatacaagattgggctgatttttccctcccttctactctgtactccaacaataccaggtcttccacaactacctgaatcaaccgtattcttcacatatgctgggctttctctctgaacctcctttttttttttttttttccaaaacattgttcccaagactctattaaaatgccgctttaaaacttcctctctgaagtcattccaggtggtcacctcctgtttacactaggccgtacagattagtctctcttttgtcccacgatgtactttttcatcgatcacacagtttgcacctgtttacttgtctgtgtaatgaatgaatggatgaccagtcactgattaagtctgtgaatctagcttgtagccattttgcaaagaaccttcaatactagctaaagagttgggagtttatcatgtagggaatggggagtcagtgaggatagctgaggagggggtgagatgctggagatggtgcttttagaaactttaatctgatgtgtgaggtatatgacagtttggatataggataggactggaggttggagatcactgaagagtttttttaaaaaataggaatccacatttttggtaataagagtctcagtcacgatggtggcaagaggagtgaaacagagatcgatatgatgacacaagggaattctagattttggtgactacatttggagggccagggagaactaagagtcagagaggagctcgaagttttgagaattgttatcctctgtattagtttcctgggcttgccataacaaagcactgcaaactgagcagcttgaaatgacaggaatctattctccacagtcctggaggctggaagactaacgtccaggtactggcagggccactctctctgaaggctccttgtctctttcctagctactgatggttgaagcaatccagcaatccttggtgttcctcggtttatagccttatctctgcagtctctgtctccatcttcacatggtcttctctctgtgtctgtgtccaaattcccctcttctgataaggacacctatcagtgggttagggtccaacaccctaatctactgttacctcattttaasctgataacatctgcaaagaccctatttccaaataaggtcaaattcacagatgccagggattaggatttgaagatatttttttgggtgcacgtaattcatcctataacattacattaattcattccatcaaagaatcatgtattgagttgtaattgcctttaaagcattcacaatcgaatagagaagacagatatttaagcagatcattctattacaatgtgatatgcacatattattaaggacacacaaagaagggtcatttaacctagcctaatagaaagcagacaaaggtagaacttggataaaaatagaaaaggaggaagaacagtttcttgggatttaaatcactcaatgctttgttttataattttattaatttaataaatgacctctagtttgggtacatccaagaggaaacatcccatctgaagttaccaataggagttcggtacagttctgtagcagatataggtatgggagacagctacaaagaggaaggaatccatatgcatcccrtccctctttccattttataccaaatttctgggatcattttccttttttctgaagtttggcctttacaattcaatgtttgtttacctttgaagataatttgccaagcacacgattctagattgacaattatttctcttaatgttttaaagacataattctcttgttatttggcttctattgttgtttttgagaagtctgctgtcactctgattttccgtcctttctctgtggctgctgctacgatcttctctttgtctttaggtgtcctgcattctcactgctggtgtctgggtatgggtttcttttcttttcatttttttttttttttttgagacagggtctcattttgtcacccagagtggagtgcagtggcgtgaccttggctaactgcagccttgatctcctgggctcaagtgattccccactccttggctccccaagtagatgggactacaggcatgcaccactacacccagctaatttttgtatttttagtagagatgaggtttcactgtgttgaccaggctggtctcgaactcctggactcaagcagtttacccacctcagactcccagagtgctgggattacaagcgtgagccactgcacccagctggatttctttttatttaacctactggtatatgttgtgcttcctggatctctgtattcatgtttatcatcagttcagaaaaatatacagcaatttttaaaattatcattttaaatattgctttttcttcattctttgcattctgcttctgggctcagattagatatatatattaggccttcttattatcttaatatcttttaatatgtcctttatattttccattttcctctttgtatatattttccagtttgctaattctttcttcgctgtgtttgatattaagattttaatttcttaaatttccttttttccccccaatatgcttgttcattcccaataggctcttattgctttcttatcttggtgattggttccttttcttcttcaagcatttcatacattgctgtactacattctatgttttctctgtgccagcaaaatttatgttctacgcagggccaatatcacccttccaatcaacccttgcatgggtgcaagattggaggactctaagatacctgtctgccaccccatggcaaaggactgggaagtggaatgtttggattctctctagggaaaagcattttatataatgcttataaatgacacaatttctgtggcttcttgttactttggagtttaagctcttagtggatagggagtactttaaactttgcttagctgatccttggttctcagtaaacagtaaatcaatctccatcatggtttcagaaactctaaaacaactgatttcatccaagaatgtataccagttggaataatgatgtttttgtctctatatttagcagtcagtgtataataatatttcctatataaatgtaagctagtattgctttcaaaacattctcataccgccaggcgtggaggctcatgcctatcatctcagcactttaggaggccgaggcaggaggatcacttgaggccaggagtttgagaccagcctgggmaacatgttgagaccccatctctacaaaaaataaaaataaatcccttggcatggtggtgcatgcctgtagtcctagctgcttcggagggtggctgaagtgggagagatcccttgaacccaggaggttgaggctgcagtgagctgtgattgcaccactgcaccacagcctgagcaacagagatcttgtctcaaaaaacaacaataaaaaagaacaaaaaaaccttctcacacttgttatcttgttaaaggttaaaggtgaaagtgaattttaatgactgtagttttgatttgaaacccttggcaagagctccttatcttttggaatcccaggaagaagaaaaaacagttatttacaagtaagtctgttcttccatagctttgctcttcttttgctaagatgctaggctgtgctgccatcccctgccatcctttcatgttgctgagacggtgctgaggcacacacaaagctccattgtggcaggacaccgggcatctcctaccactgtgtctggtgaggtggcaacacttcccaggcttttctggtcttaaagaacaagtaggctgggtgcggtggctcccgcctgtaatcccagcactttgggaggccgaggcgggcagatcacctgaggtcaggagtttgagaccagcctggtcaacatggtgaaaccctgtctctactaaaaatataaaaattagccaggcgtggtggtgggcaactataatcccagctatctggaaggctgaggcaggagaattgtttgaacccgggaggcagaagttgtagtgagccaagattgtgccactgcactccagcttgggcgacagagcaagactctgtctcaaaaacaaacaaacaaaaaaaccaaacagcaacaacaaaacaagtagctaatacagaaataacaaacacagaaatggaaaaaaaattgttaacaacttgtactaaagctaaaaggttaggagatttaaaattgaattggagtagtataaatggagtttgggactggtttgggtgggtagtagctgttacaatgttgtacctagagtgaaagatgttgttgtaaacagagaatggtacatactatcaaatactatgtatataatgtggggaatcatctcagctaactagttttagaattaagagatttctctacataattatgtatcttgtgactatctggttaaaagtcgtgctgcccctcagatattgctggagggaatgtaaaatggtgcagcaactttggaaggcagcttggcagtttctcaagatgttaaacattaaattattatgtgacccagaaattccgctcctaggtttctactcaggagtaatgaaaacatatccacataaaggctaggatatggatgttcatagcagcattattcacaacagccaaaaaagtggaaacaacccaaatgtctatcagctgatgaatggataaacaagatgtggtatatccatacaatggaatattacttggcaattaaaaggaaaaaaatactgatacatgctgcaacatagacaaacttcaaaaccattgtactcagtgaaggaagccaataacaaaaagctacatatagtatgtttttttatacaaaatgttcagaaaaggcaaatctgtaaagacagaaggtagatagtagttgcttagggctggggatgggagtggagagtgacttaatgagcatggagccttggggttaatgaaaatgttctaaaataagattgtcgtggtggttgcacaactctgtaaatatactaaaaaccattgacttgtacacttaaaatgggtgaattttatgtcatataaattacaccttattaaaattgttcataataataataaaaaaggaacctagcaaggtgcaagaaaagtgagcttttatgactttctaggagatcggcttacaattctctgttcctaaaaagtgcccgaagtaagctgcagtagtttccttttcctgaacaggttcagaatttgttgaataaatacagtgtggcagaagctggagggcttttagagatgctggtatgaccagcagagagaacaactaattgtctcctgaggaccttagtgatgtacagtagaaacagatgacagctggggagggcgttggccaacatgggctcattgtccttgaggtgtggtttaaccatttgctgggttgtttcttgaataggagccacaagtgaggggaaaaaggaagtgtccaaactaagccctattcccttggtagctgaaggccttaaaagacaaaatgattgattgaaaagagaattgagactcactcttgcatattagggtccaaaggagtaagttcttctgcaatccctaattaccagagtctcaaatagacctgtttgggtaagattttacaataatcagcatcttaattctatttaattttgataaatgatataaaaggagagattttgttctcaaatacatcttctagcaaagcgagacccacgtgtgaaggaggatattgcatttctggagtagtgggttcctgtattttagactagaggcttaagtctaggctcactctagaagaaagaggaagactggattctcttccatgaataagggaagcatcccaattctggcagcaggggtggagaaggcatatttgtccttggcagagttagaccttctcagggagggcaaactggacaactctatgagggatcattcactccaaaggacccaaagctgtttgattaagcagcacagagattacagctgaaactatgactagagcaaggcaatactatttatttgggtttattttcacacaaaaaaagtaaatacgtttattttcataaaaatacacaaattcacatagaactcatcaacttcaaatttaaataaaaataytaagtgctacagttgagttgagagttaagagaatcccttcctttctggttccttcctgcagaaacaaagggtcatcctttctagaaagagaaccgctgtgctatcaggagggaaataatccaagtgccaaagaggccatctctgaagggtatttttcttccttgagcctcagccaggaacgggaggaagaccaggatgggtaagagctggggctgtcccatttcatcatacataaggtggcaatcgctgataccaaaatctgagcacctgggaactttctttgtatggcaggcttccaggaagagaggaggcagtggggaataggttagaagcagctgaggggcaggtgccctttattcagagggaatggagagggctgccctggccccctggtggagtcacacgatgagggtgccccctggtggagccacacgatgagggtgccccctggtgggtgggccacgctgtccaggatttccccagcccctctctcagtcygccatctccaccctgtctctaccatttaccacttagcatagccaagccaggccccacattttgttaaccttaaggcagtcaagataggtagaaaattttcaaaaggaccaatactaaattcaagtagtaaaatttaggaagtgaaagcccccatattgagagattgccagcagcagagaggagcacccacgcttcctcactcggcaccttgtgactcctggattgcattagggctgagtgagggcttgttctctgtggaccctggagtaggccctgtgactggtggaaaggatcccgggaaaaaactcaggaataagaaaggagaaagtgagacttcagactgaaattattagaaatgcttggaagtaaaggaggaaaatgaaactgaggaaccagaaaaatgcccagaccagttaattaaaacctggagtaaccaggagatccagagtttcctaaaagaatgggaatttcttgcatttgaagagttgagaagaagaatcatgaattatttagaggaattgcccagtgtctcaagcagcggggcataaagaagagctggcaccratgtctccagctgacaagtttgcagggcttgtactggactcctcatgaggccaactcaaggccaaggagcaaccctggccctatccttacagagaggccctacacagtattctgggatacatataaaaggacaatgccttttcaggtcctctctgtgcagatgtgatcatccctccaactcctagtaccagcccctgtctgctctgaggctctgctgtcagtcccctacgtgatctccaaggatcctcaggtcccagatgggagccctccacggtcagctgcatgcctgttgtctgctgttgtctctgcagcccccagcccctagcagcagctgtcaacctcttctgaccctgatctggattctgaacttaaagacatttagaacctggattcttgattctgtctgaatgaccatggaagagcacaattttatatcctggtgcttgactccttcctctcccagcatgtgcaataaatgaagaaaaaagccccaacatttaaaatggaaagtttatagaaatattaggtgttgggccatgtgcggtggctcatgcctataatcccagcactttgggaggccgaggtgggcagatcacctgaggctgggagtttgagaccagcctgatcaacatggagaaaccccgtctctactgaaaaatacaaagttagccgggcatggtgatggagtcctgtaattccagctactcaggaggctgaggcaggagaatcgcttgaatctggaaggcggaggttgcggtgagctgagatcacgccactgcactccagcttgggcaacaagagcagaactctgtctaaaaaaaaaaaaaatatatatatatatatatgtatgtattcacatatatatagatagatagatagatataggtgtttacagaacatagatttctcatcctaaggtaatgatggttaaacttggtggccatttgactgagatagcccagcctaccatttctgggtctaggtggagcttctccctccagttctcttgtccagagtcagcctcttaggagtgtattcgagaagtcatggccttcctccccactcccagttagaaatcagcacgtgaatggcctgtcttctgagtatccttcaatcttgccatcttcctttctgactgtctctccatttccccactcctacccttaaaggacaggggtgctactttttttactcattcatgaaaatttactaaccttttcttttgtgtgtttagctccttttactgccatgttttggtatcctcccatgtgcttgcttgcttgctbcctcaaaattttaacaagcgccaactctgagccaggcagtgtttgaggggctggagacacagtgggaaacaaaacagagayggctccgatttcctggagcttacattttgatggggaaatagacagtagtcaaccaaataaacacataacatcacgtgagttagtaataaggaaaacaaagcaggtagagggggtggggtgggagagtgggggacgaatgaagaggactgttttaggtggagaagtcagaggaggcttctcctctgagatgacgtttgtgcagcaggctgaggaacccagggagtgaggcgtggagagatctggggaaagagtgttgcgcagatggatgggcccaggcaaaagcctgagatgggagtgaggctggtgtgttcaggaaacagcaagaaaaagtggggaggctgaagatagtgagtgctgagagagggcgggaggtgaggctggagcagaggcaggagccaggcaggttggggttacaggccgggaaagggagttagaataaaattcaaagtgtgaggggaagctgtgcggaggtctggagtaggggggaaatcatatctaatcagcattgtacaaagaacatggctgccgcataagcaactgctgatgctggagccgaggcagggccgtcaaggcagttgagggttccaggccaggtgagagcgagggctccaggctccagcgtgggtggagaggagctggcagagctcccttgttagcgtggaagtgggtgaaagcgagaaatcagtgcggaggggcctgggtggattgtggttctagtcactgacctagggaggtctagggggaaagcaggtttgcagggagagaagtgcagaagtgaggaataaccgtgtttggggctgattccattgcaatcattataataccggaggaggatttgtagggtgtgattttagagcaaatgaactcttcccctcactgtccatttaaacctgttctgttggggttggttcttctcctgccctgggcattctcagataataaacagcctctggttatgaagacagtctgttcagtaactaatatggccagtctcgtataacataatgaccaaagcttcaatcttcatttaaggtctccctccccgcgtttgggrctgctgaagctggagctataagaaagaagagggaggtagatgtcttctctctttcccttcttactctcctattccttacccctgtttcttgccactgtgatttctgatatcttcagagtccacagtgggagggaggaaagagaaataatgggtgggtaggaaagttcttacctattaattttatgatgatctatttcagtgtaaggcattctctgggcttggcaggggtttgaagctagtggtttttctcatggggcacttccaagtgatcttcagagaaaattcctattgcttggaatttctcaccggatttcttttccagctgtttgcttaggactgtctctggctctaagcatctgatggaactgccactacttcattcttcacttaggaacatagcctctatcacctaaagagatactgagactaaaattagatccatttcagtatctttgtagatgctcatcctatacccaagaggagatatacagtaggcaggtggatgtaccggtctggagttcaggggagactgggggtggagacaggtttttgagagtcatcctcatatagatgctatgtgaaatcatgcaatcacctgggggtgagtgtcaragagaagaaggccgagggttagtcctgcggaacgccaagatttagaggttggggcaaggaggcagagctggtgaaggaacattcatggagcgagaggttggtatggaaggaagcaaagcagaagtatgtgctgctgcagaggcccagtagagaaagggtttcagaaaagagggcatgcccagccatgtggcaatgctgctgagagggaggtaaaatgaggactggggagatataggcctaactgctgattttcatcagagaggttaagtggagcagctgaaatgaaagctgattagagtgggttcaggagagaattggggtgaggaagtggagacagaataagcaatgcttttgtggggttttgctataaagtggctggagaaggtaaggtaagggaatatttttatcagcgatattgatattataacatgtatgtttcctgatgggaatgctcccatagagagggagatttgatgatgctggagagagagggggtataatagaagggcagagtccttccacaggtgaggaggcagcaccctggactcaggtggacaggacactctatccattgtatgaagagggaaggccgagtacatggatgtaggtcaaactagctcagtggattttgcaaaggaagattgtttccttctgtttactcattttctcaagtgagatcatcagctgatcgcgaggcacagaatagagaatttagaggtttgaagagaaaagggaagaaaggaacctagtattttctaaatcacracaatccaagtggaaattagtactccaaacatgttgacatctgaaagctgagaccacaggggttccctcaaatcatgtcacacatcagtgatccaccccatctatttgaccatgtccctgaatctctcagtgcttctgactccagacagcgcgaggaaaggctgaggcaggaggcctaggtggagaccctgcctgagagatgagtcactcggctctggcaggacaggcttcagggggatcagctcagcttagctggggaacgctttctgctctcgtaagcccctcatccccataccacactcaactcttcccttttgtcaccttcaaaaggtttcagcaaccaaggagcacacaccctgatccttgattggtgaaaggatacacaaaatcaggctgcttcagaggaagtcatctgctcacaggaatcagggtgaaggccaaggacggcactcaagaattgtcctgtctctaaaaaaaaagcatctgcaacgaacttcctttaatttttgagttcagtgtctgtgataattaagaaatggcaataccatgtattttccccagaagttaagaaatattgctgaacgaaccaataaaaataattacagctccctcactaagtgtccatctctgtatatttggcttgttcctcaattaaggtatgctccctttggtcatgcacacttcatggccacatccacatatcctccccaggttttcccaacattctttagaaaatttaaaaattcatttggggttggccaggtgaggtgggtcatgcctgtaatcccagcactttggggaggctgaggcatgttgcccaggctgatctcgaactcctgggctcaagcgatccacccgcctcggcctccatctgaacacctgtcttgaggtcaggagttcgagaccaacctggccaacgtggcaaaaccctgtctccactaaaaatacaaaaattagccaggtgtgatggcacatacctgtaatcccagctacttgggaggctgaggcatgagaattgcttgaaccctggaggtggaggctgtagtgagccgagattgcaccactgcactctagcctgggtgacagggcaagactccatcttaaaaaaaaaaaaattcatttagggtataattactcacttgctgattctaaacattgccctctggctcatgttgagtttgaatcttggtcacaggaagacacagtaggacacagagcatagaagagtggaattctgttttccttaggcaaagggacaccatggtaaccttttcaaaagacttgggggagtctgacttcttcagttctgtctgttccccaaatatatataattccaagatccccctctttcctagtcaatgccctagatttcatataaaagactggcagcaatgttaatccatctggaattgcaattcagcaacctacaggatcaatttatgaacttgagggccacagatggaataagatttattaaaaatagtggccctatattttaatgccttgcacattctggcatctgagctttatattatcttgctttaaattatccatttttctctcattccatattcctcatcctctttaaattattctaccctgacagttatctagtctcccaacrtctcacccctaatcaatatatggttctaagtgaaactagattttctttctttctttctttttttttttttttgaaacagggtctcgttctgttgcccaggctggagtgcagtggcatgatcatggctcactgcaggctggacctcccaggttcaagcaattctccgcctttcagcctcccgagtagctacgactacaggtgtacgccatcatgcctggctaattttttgtattttttgtagagatgaggtctcaccatgttgcccaggctgatcttgaactcctgggctcaagcgatccacccgcctcagcctcccaaagtgctgggattacaagcatgagccactgcacctggctgaaaactagatttttaaaactttatactatgcacaatttcagagaattacagaaaaaataattataattgtataatgaatccttatgtttctgacatccagcttcaatactgattacctcatgtccagtcttgttttgtgtatatgcatacctacttctcaaccctaactggatgactttgaagcaaatcccagatgtcgtatcacaaatatagttgctcattccacatggtgaagagaagatgcctttcctttccctgcactttgacacgaataccaattccaaatatctcacatttcctctgaagccttgtactatttctgtattatttgagatcatttgtattgcaagtaacaagctaaccagagctaacataagcacaratggtccctggtggtctagtggttgggattaaaaaaaaaaatttcattgaaagagtgccaaagcatcttacagaaccctgagaaaaaactgaattccacaggaatggcaggaaccttgacagcactggcccctgagcagcaggcatctcagacccttctaggctgttgtcatgaacgtgactcacaacacctttccaagtctctgttttggttagacgtctataatcctagaagaaagacaggagaatctgatcctagacttgggtcaggtgtacactccttgaccaattagccacagagaagaacagggaggtgctgccatcgagtccacctctggccaggtgaagtggctcacgcctgtaatcccagcactttgggaggccgaggagggtggatcacctgaggttaggagtttgagaccagcctgaccaaaatggcaaaagcccatctctactaaaaatacaaaaattagctgggcatggtaggggggcacctgcaatcctagctactcagaaaagctgaggcgggagaatcgcttgaacccaggacggggaggctgcagtaagccaagattgcgccactgcactccagcctgggcaatagagcaagagacgccatctcaaaaaaaaaaaaaaaaaaaaagtctacctctgtgagtggagtcagggatttgccagagatgggaccacgcaggcatctctaatccaccatgtggagcaaggaggccaggaatcactgaagaaagctgagcccaaaaagacaggcaggaatcttacaggtcatgctaaagsgtttggaatttatggggagaccctgaaggattttataatactctagttcttggcattttttcccttttatattacttcatcagtcaaaacagacttctagaaatcacatcagcattaaagggatattgttacttcaccttgactttttatagaaggagaaaagtctcggtaaatcagttctgttccatgaatcagtcattactgccttctccatagcctttcctycgttcaagtaaatttagaaatttcytaagttttctttataacaggtagcctaaatctatatcatacttttaaaataaaaatctaggtgcaaatttgttcttatggttaaggttaacatgtacacttcacaaacattgagacttttgttttgttttctgggacaaggtcttgttctgtctcccagctggagtggatacaagcatggcttgcttcagcctcaacctcccggactcaagygatcctcccacctcagcttcctgagtagctgggactacaggtgcctgccaccatgcccagctaatttttaaacgttttgtagagacgcggtcccattgtgttgcccaggctggtcttgaacacctggcctcaagtgatcctcctacctcggcctcccaaagtgctgggattacatgcatgagccaccatgactggcctagactttttgatttaaagagactttttggatagaaatgcttttctctattacagttataaatgactaaaaatactagctatgccaaaatggcaaccagaggccgactgcaaagcttcaaaaggcttgatgctctcctggtagacaagtcttcagtctcttaaatgtttttttcatatgttgacattgaaatttcattttgtgtagatgttgggattatgtctcattcatttatttattcatcattcacttagtaagtatttaagtgcctgtttttcccaggtgctctgccaggttctggggatataaggatgagccaacataggctctctgccctaaagttagtgggagaaacagtaacaaaagattttaatactatgagattaactgacttagttgtggtatgtagaaagagacacagagcctgcagcaagagcctaggtgaagactcagtgaagcactacctattgaaaggagaatctttcaaatccttaacagttattttcaccatgtaaaaaaggcgacattgccagggaacatcaagtaaagagacaaatgctcaggtaagcttttaaatcatatgagattgaaataagttgattcagtaaatcagggaaacttttattttcaaatgaagtaaggaagaagctaggtagaaattaaaaatcctattttgtatcaccttttgcttatacttaatgtagtttaagccatcagtatattatacttttctgtgtatgtctactcaacaggaattttctgttcgcctgctatttgggtcagtcttagatggtcccatgttatgagaaagatgtaaagatgagatagattcagctccttttctcgagaagattataccatataaggaagtaatttgctgaatggtctctcagttagcctgactagaatctctaaatcatggtctacacagcagtaatgaggaactttggcccctcaagtgtcaatgaaggccaactggggcacctggattcctatctccatctggcagtaatgaggtggtaacctcattaaccctgttagattggtgttggagaaagccagctaaaacagaaagtttaaataagatccagagtctcataatataaactgaaaatgttcagacttcaatagagaccagcactgagatgacaaagatgttagaataagctcacagacttttaaagttgctatgagaaaactgcttcaatgagcaaatatggatacacttgaagcaaatgaaaaaataaaaatcctgagcaaacaggagatacaaagaagaaccagatgaaaattgtagaactgaaaattacaatagccaaaataaaaagctcagcagttaagctcaacagtagaatagagaagatggaggaaagaatcagtgagctggaagatagaacaataaaaattacccaatcttaaaaaatgagaaaatagactgggggtggagggaagaagagaggcttaagtggctgtgggggctataataatattcatgtcatcagaatcccagaaggacgagagaaacaggcaggactaaaaaacatacttgaagaaacattggctgaaaacagagtaatccttgtagtggtgtcctgatacacctgatacaagataatatcctgtatcttgactgtagctatgtcaaatcttggttgtgataatgtaccataccttaaactattaacaataattctagatatcattaaatttgtagtcagagttttcgcattttcctgattggcccaaatgttttgaagtcggtttcttcacatcagaatccaaaccaggtccacctgtggcaccttcacccttcagtgggagtaaggagccggacgcgtcacttaaaaccattcctcttacgttgtcgccctcaatcttacaggtaaatggcaaattctctttcgtattagtgtacatgcctcgataaaagtccagaagggcggcgggggcctcggcggttgaaggcccgcgtgccctggctcctgcgaggggagggcgcccccgagacagacgtggagggagggcgagggccaggcgctgggcttcatcactgcgtttccgttttctgtgaaatcaaatggcgcccttccctttcccgggaagtcggtgtcaccgcccgtttgctgtgaaatcaaatggcgcccttccttttcccgggacgtcggcgtcaccgtccagctggcgtcggggcagcaccccgggatctggcgtggcgcatgcgccccgacgctcgggcccgcgggctcctttctccgtcgccgctccaggacgcggcctcgggggagccctaccgggacggagccgcggggcctgcgacttcccccggagctggcctgaggtggggcccggggaggcctacgggcctgggggtcgcggagcccagggagggctgtggcagggccaggggggcgcgccccggaggaaaggcccgctttggcccgaggacgacacgggagtgggtagccgggcctgttgaagcgcctagggcgccaaggatcccagtttgttgggtgactcggctcagcttttagaaaggggccgagcgggatttgaacactccctgagcccaaaggccgggctctcaacggtaaccgtcttcctcagcctcagtttaccttttcatccctcagggattctcctgtccatggctgccaccaaaactgcgagttatgatgaacatttcaggccagaaaagttaagagaatggccggagcccgagtccgtttctttaatggaggtgtgataacgtggcgttttgagacgtcattttggcggggggacccctcgagtttgggaactgtttatcttaatttcgcttctgttctcaggattgtgacagtgcctgctttaaagcaggcgttgaaggggaatgttcgggctcagatttggccgagagtgtggccaagagtgtttccagtcgccagcctgggggctggcgcaccgacgggggcgggcagccgggcgggtgaaggcagccaccccagctccccggcagaagccaggtctgggcttgccagtcaattctgcatacttcagcgtctggtaatgattttctcaaaaagtttcattattttgtgtcatcctatgatttgcctcgctgtgaaaaactcttggaaatttcctttctttttccccttttgccctagtggcggtcggagcagtgagatgcttaatttttctatgtgtgtgcacagaaagctgtggatttcgaaaagtgctgctgcaaatcatgaccttttccttatatttcctggcaaaatcacaaagaagagccatcaaagacaaaaactgtttaatttctttaaacaaagattatttgagaatctgactcaagaatgtacataacatttgttaacaatcttactaggatgttctttaagaaggtgacttcccaagatgcttgtcaatatgttctgcttctccaaataaataaatagattctaaatttttattgtagtgtcaggatacatgtttaattgttttacatactttttcagttgccatcttcattttaattaaaaaaaaatattttagagacaggttcttgctctgtagcccaggctggggtgcagtggcccaatcatagctctctgtaacctcagactcctgggctcaagtaattctcctgcctgggccttcagagcactaggattacaggcgtgagccaccctgcctggcctgtcttcttaaaataagtctgagaaggctttaaagcaagatcctgttcctattacaaagagagctttattttaggaagacctgggcagctgtttgaatatcattttagatctcatgtgaagctattaaatatgtgggtaaaaagaacaactttccttttttgagatttctcttatttacagatttggtatttgagtttggggtttagtttgttgtgatgcattcagtgtggcagaatagaaagaagaatcagaaattgaataacagttctaagaacctgtatcatttttcatcagcaataatttttaatgtaacaatttatctcttccagatactggattttcattgccttttcatttgttcacacttagtcctataagaataaaagctagagattagtgcatagtgatccaactgaaaaagccctaaagtggggattaaaatgcatcagctttacccaaactcataatggaaatagcaagtccctagatgtggatgatgttgtttggaggccatgagctctcactaattagctctgagattctggaccagttgaactaaagggaactttctgtggtttttgacttatgaagagatctagcaaaaggcgggaaacttcaagggccctttaagacacacctactagctgggtggggtggctcacgcctataatctcagcactttgggaggccaaggtgggtggatcacttgaggtcaggagttcgagagcagcctggccaacatggtgaaactctgtctctactaaaaacacagaaattagccagctgtggtgtcatgtgcctgtaatcccagctacttgggaggctgaggcaggagaatcacttgaacctggagggcggaggttacagtgagccaggattataccactgccctgcagcctgggtgacagccagactttgtctcaaaaagcaagcaaacaaaaaacacctactgaatgcctgaaaagaggattcctttagtaagctttttagtgctttaaaacataatttaataatatgctatcagggatttttttttaaatagtctgggtgggggggtgctgaaaaatgagtagggatttattggatgaaataagattgacttggaattaatcactcgagcctggctgacaagttcacagagaatgggtttagaaattttccatatttttatgttaccaaataagcctcaagatttacactaaaactattggtaaagtacactgagttttgtcattgtagtttgtttcttcaggattcacatcttaatattcaattctgtaattttaggtattagctagagaagacattgatgaagcagtatgtgcaatattatttaaagaaaattccattgtgaaggtaagagttggctccacgctgcattctacatatgttctaggggagcaagagtgtgcagaacaacatggccaagagtttatgtcaccgtgatccaagagactcattttgcaggagtaatgaggatcctctaatttacttgtttgtactacatgcatctgaggccatgcccccttcttgcaggatcactaaaaggtccctgatcccacttggatctgtcctgaagggatctgagaagttgttccaattgctccttctcttcgtcctggtaccgaatagaaattctttcctactcacacttgcctctttctcatatgttcccacattgcagtaaaaccactagaaacaaaataagcttttaagggttatgaccaatcagtaactgatagtcactacgaaattagcttaaggggcatttaatttcaatgagagagacggagttataataatactttgggaggctgaagcaagagtattgcttgaaaccaggagtttgagagtttgagaccagcctgggcaacatagtgaggccctgtcactacaaaaaaattaaaaaattagccagacatggtggcacacgcctgtagtcccagctactcaggaggctgaggcaggaggattgcttgagctcaggaggttggggctgtagtgaactgtgatcatgccactatactccagcctgggtgacagagtgagaccctgtcttttaaacaaaaaagaataaaactttgacatttgaattgtgatttacaatgtgtaaagaaagtgcacataaattcccatttaagcatccaaagaggtagatgggattacctctctttcacaggc

SEQ ID NO: 96836 - DNA, 12795 bp, Homo sapiens
atcaaaaattcacagtgaactacttaatggagtgaaaaatgtaagttttcttttagtgtataaaaatcttattttaaggccagcacagtggctcacgcctgtaatcccagcactttgggatgccaaggcgggcggattacctgagctcagaagttcgagaccagcctggccaacaaggtgaaaccccgtctctactaaaaatacaaaaattagcagggcatggtggcatgcacctgtaatcccagctacccaggaggctgaggcaggagaatcgctggaacccaggaggcagaggctgcaacgagccaagatcccgccactgcattacagcctgggcgacagagcaagactccatgtcaaaaaaaaaaaaaaaaaaatcttattttaaaaacatgttttcaaagaagaaaaaactactcaacaaaacctagatattgtaatatcctatatattaaggctctaatttaagaaaatgcaatatatggaaagatagcagatactttaaatgaaaaaaaatttgcataaataatggatatagtatgcaactatttctgtatcaacttaacaacaacaaaaaactgcaactatatatctgcacagtagtagggtcagagaaaggaagtctacataaatgccaaaataccaacagtgatcacaactgaggtacggaattagaaaattggagtccttttcaatttatatgcaacagtgttgctcaaattgatattgactacatatcactcttttttaaaaaaggtggaaaatatgtaaaaatttgaacttatgtaacagataaatcaaaagagtaaaaattcctattacaaaaggagccattattttgccaagtgatttgctacagacttttatttcctcttaattttctgaggggagaaaattctaatctaatctaaccactaaattatatgagagactcatctatctcacttaaatgtactatgaatatattataattaagactttaacaaaatagggttagtttaagaaacaccttagctcaatggataaaaatacttgaatactgataaacaaattaaaggaatttagcagaattaaaggaagggaagaagatggaaataacgggcaatgctctgaagccttaattaccctctacctcactgctcatgaagaggaaagtttctgttcacctaagatctgtagaaagcattctgactctcaatggtttcctgctatcctaagtcttcttggaggattaaaaatgggtacaaaaatctttcttgatctccttaaaaaaaaaaattcatattaaatacctagatcttcaatactgttgaatgttacactgagtctggtctttatttcctagtaaggagttccagaaaggtattccagacttaaggatgtgtttgcagacaataatttgtaaactgcatagaaagcaacaaggggcactggggagagggatatctgttggggaaattataatagtctcggctaaaaagtaacaaagacctcaattagcagagtcaacatgaaaaacagaaagaaacatttgcataggattataagaggaccaggacgtcagaaaaccaggagaacaatattacacacaaaaaaggcaaactgctttaaaaaggagagtgttattataagggaaagtgccatagagagtgttattataagggaaagtaccatagagactgaacaggatcaaagattaggaggagataatgatctgactgtggagactctaacctaggacaaacagccttcttcaaaagaacttttcctctttaggatgaaagggaagtgaaacacagtgagtactcacttcagagagcactagaatggccagaacactcagaatatattcgatccattcttgttttattctgaatataggacaagaaagccaggagcaaatcctacatttcaattattccttaaggtcctcaagaataactccaggattttcttggcctagcatcaatattccctttagaggaaaacaccaatgatgttctttaaactctatttgtctatgcttgttttgtgtttgtattggtagaagctttttttttttttttgaaacggggccttgctctgtcatccagcctggagtacagtggtgtgatctcagctcactgcagccccaacatcctgggctcaaatgatcctcccacctcagcctcccaaatagctgggactacaggcatgcaccaccatgcccagctaatttttgtattttttgtagagacagggattcaccatgttgcccaggctggtctcgaactcctggcctcaagtgattctccaacgtctgcctcccaaagtgctgggattatgggtgtgagacaccatgattggacaagaagcatttattttaatgtttaaaattataaactggccaggcgcagtggccaacacctgtaattccagcactttggaaggccaacacaggtggatcacttgaggtcaggagttcgagatcagcctggccaccatggtgaaaccccgtctccactaaaaaatacaaaaattagcctggcatggtggcgcacacctgtaatttcagctacttgggagactgaggcaggagaatagcttgaacccaggaggtggaagttgtagtgagccgggattgcgccactgcactccagcctgggtgacagagcaagacactgtctcaaatagtaaaataaaggcttataaaaagtaaaatataggcttttgaaaacttcttaacatatatatttaaaatgcctttaaacaaaataaacagaaaaaagtactaatgccagtttcctcaacaataaaatgaaaataatacgtaacttactgagcagttatagggattaaattagatcattttatatagaaagcgcctacaatagtccttggaacacaatacaggctccactgtgtttgtaaggtgaccttttctaagctccttaagactgaagtcatgtaattagtaaactagacagaattcagatgaaagagtcattttatgtttgcttgtttacttatcaatcattaaaagtatatgtcctagccaggcatggtggtgcaagactgtagttccagctacttgggagactgaggcaggaggactgcttgaacccaggagtttgaggctgcagtgagttgtgatcacaccactgcactccagcctggacgacagagagaccctgtctctataaataaataagtaaaattttaaaaaataaaaataaatagtatatgccctgtttaagcaacagaatggggtattaaaatattaggagaattggtttctgcttttaaaaatacactagtctcaatcactgaattgattatataacatcatgcttgacttgaaccaaaactaggtggaatttgaaatatgttaaatatgcattagaaggaaatcgtaaataacataaaatacataagttgttaaaaaaaaaaaaaggaaatcattaccaaaattcatcaaccattaaatccttaccttgttttgacaagaaatggctgcagatcctgaaggatattccctgtttttcgcctaacttctaaatacaggtttggtcgatcaaaaccagtacaggtgatctgaggatttctcagatttaagcaacgtacaatgtcttcccggattgaagaacttgcagtagcagtaagtgcaacgattggaacctgaatgatgtaaaactgatattttaaaaaggaaagagctcattcattcccaacatgtctatagctttcttacaaagagactggtaggacaacagtttgtggtacaatgttaaagacacaactgtaaaatttttttgcaaagaaaaaatctccctactaacttgtttctcagccttctggatacaatatttactttttaaaaatcagaaatcatttaaataaaacattaaatccatgaggtttccaaatgccatttactttgtcttattaaattaagcctacttgttagctatctacttctccatttattattttttaacattacatttgaaatggtgctgatataagcaggggggtatattatgccttatatttgattaatgtataattacaaatgataaactctcaattcactgaaaatctaactatataaagcaatggtcgtttttttttggcctcctattttaaatatataggtttatggcttcacaaatctagaagcaaagctccaatgacccagataacctctcttcagtggtactgagataatcaataacatactatatataggaaatatgtataaatgaaacgtattattaattgattgctagcaaaggcttcttgactggattggcagacagagcaggagactcagcagttatcaggaaaagcatgaatatgtcatcttccagaaattctaaggtacagtaacaacatgcctcccctaaaactagaactcgtgtttttattctattataggaaattacacttaactatggtattatttcataatcagaaaaagtggactgtcttacagttgtttctaaattatcagctgttctatcaccaagaatataactttcttaaaaatattctttttggctcgtgacagatacaagaaacaatattctcataaaatagctcttcagatgcactgcatctattatacaaaccaaccatagcaattatcttgtatataagtggaaatgtatgtgcaatttaccaatttgcaaagaagcacttctagaatatgactcaaaattaaaacaagatcaatttattaaaaattataaactactttttcaatcactataactttactgaattaaaaattatctccaaacttatatttaaaaaaatcaattaagtttaagagtaggttttttcaaattaaaaaaattaaatcaaaactaatgtgatgagataattggcatcatttttgcattctttatccttaaattttgtgacactattttaaaaggcaaccccaaaattaatttcattgatttgtggcttacaatcagattgttctctgaatttacagtgcctgcctagcaacttaaagatgaacaagctaatctataaagaggttggtttctctaattaacccctaacatgggtgcatctgtgttaacacacaggttttaacaaatataaggctgagaataagggaggtttaaaaattagaggttcttagaacatgcacattctcactctcacagtaaagcactttcaccggttaagtgttttggttaaataatttatataaatgcactaataaaacacttgtttaaccacatattaaaaacagtgattttcaggatacagtccataagaaaacagggttgggtttgtttctaagcaatataatgtataagtgagcaggtaatatatttatgaaaatgaggaagtaagcatgaaacatgacatatatttaagaagttaacagaaaaaccaggcaaaagaatggcagcacagtgaaaaaagtctgttttggaatcagattgcttgagctgaaatcctgtttttgccacttactagatgtgagattttgagctctttatttaactctctaagcttcagtttcctcatctataaaatggctacaataacagtgccaatctcataaagttgtgaatatcaagtgagataaaacatgtaaagtgctgaacataatgcatgaaataaaatatagtaagcactcaaaaagtttcaactatcataaatattgttattaaaataaataaaaagaattctatataacaacttcagagacatgagtactactcccagatttgcaactgacatttgcaagggctcagttttttcagcaaaaaaaatgagatggagacggctatatgatgtgttagacccttccaacttaaaaattcccatcttgctaccagaaattccctattccagcaatctggtaacagtgaaaatcactataaatttactcttttgcctcaacattctagaaagatatagctaagaatgttgcttctacaattagaaaataaagtatcagactatattaaaaattaatagtacttcgttactactaaacragctagtacttcgttttcattggatacattttcagcatcatgagttgtcacagcctctgagcccctgatcttaagccacaagggctgagtgtattgtaaacttattcttgcatgttgctgtctgggaatagaccacactacagctggtagttctgggggcggtactgccgaaaggcctgaacacatgtattttggctgcaattraggaacttgggatgctgactattaattttgtatttcagcaactgccccttctcctatcccaaagaaccaattactgccctctgcctcagcagtaccagtataagatgacattccaaagactggaggcaactcagcctgagttaattcacaaaattgtgccatgctggggcttgaacttgagcttgggcttaggcttgggctcagcttttgaccctcaggcatctcctttcccttcctgccttcctctcccttctcctctgctgcagcatgattttcttaatcttcagacactcactattttcatgaacarttaccctccggccccacaaccaaagacaactcatggcctcctttggcccttgtgtaacaytgcaaacctgtggctttgcaaaatgyacccaggtcacaaggggatttttttttttagcaatgatatccctttctgggtcactttttaagcttataaccagacttataatcttaaatgtatttttcctttgattaagctgctgcttcctctgtttcactggattgtgctagttatcagtggttcttgggttcaaagtaataagaattccaaaactggaaaaaaaaataaataaataaaaattaatgataaacttccacttcagcaatgaatagaaccttttctcttataagtatgtggtattttatgacatttaaaatatataaactagagtgaagcttaaaaacaacacacaggcaggctgagaaaggtgacaatacatcctcatttgccaggacattcccagtttatgcctgcagtcacagcataattattaatagcttgaactctttaattttcagaagcaaactgctttgggtaataaattatactgtcatttagttcttaactcacaaaatgtattctttaagttgacaggtcttaatttcttttttaacaggcagcaagttttgctaaatcaaacaaccaaatataaattaatcttagacatatacttcaatggtgtggtgcccacagactgagaaaagtataagtatcccacctgcttctaaattcaggtcatgttgctaattctaactttgtactccataacatcacacatacttcattcattcatgcactcattctaaatagttactgagtacctactatgtgctgatctttgtaatagatactggggagaaagtaatagaaaaaccccacatgtcttatggatttcacaattcctcttacttgaaatgtaaagaactttaagactgatgcaaagctttctgcctggctgttctttctcaacactcactttgtctgattccttccaaataggaatctttgtgccaaacagcttagtgatttctgctgtttttgaaattactgaaataatatagtgtgaaacattccaggtttatagcagttgtcctagtataactggaatcagaaggagaagaaaagcaccaagaacagtgagaaaaatgatactactataaccaccaggtggcatgtctcaccacttagctaataaagagggttcttgaaaacaccaggggaaaaacgttttctcagccactgctcggccaacaccctccccgcactggaggcccaacagaaggaatgtgctttattaatcctcccaagaaatgaaaatgatccaatgacgtccatggccagacataataaaagatttaattcaagcttaacaatgtttaagaactgtataaaatatttaaaactcctttaacacaatccttctagaatcaaaggcctaggaaaggattacagaaagtaatcttcctagtttccaaaagcttactttaaaccattctaaatggaatggaaatcggtcctccaggtgcactgtgcctagtgactttcaccacagaaatcccttctaaacatgtactactaacactgttcatctttttatattatttgtaccacttcataataccatatttcatttggtgctattacttctactgttataggtatgaatctaaactcctttactgaactatgagctacctgagggcagaaattatgttttatgcctctttcaaatcatttgctttagaaactagcaggatgttgtatggtgcagctatttatggcccaactctatactgcccactacctgttttggaaagtcactttactgattctcagctttctcatcatcattcattcattcattcaccccattataaattgagcacctcctataagccaggtattgttccagattttataaaccaaacaatcaaaaactcctccctacaaagaatattctagtgaagaagaactcacagaaaattaacaaaatataacacagtaagttagacagtgatagtgctatttttaaaacagcaaagatttacgaggaatgctgaatgatgggggagggggaactaatctgatatttcaaatatggtggcccaggaggcctaaatccaagagatctgagagaagtatgggagaacatcctatagacaatgtgggggaaacgtattcagggagaggaagcagcaggcgcaaagcccaggcactgaagcatgcctggaatgtccgaagaaaaacaaggagggtggtgtggctgcatccggtgaatgaggagaccagtagagaatgagatcagagggaaaatggaaggccagattacatgaggatcggtaactcatcataaggacttttgcctttatttagaatgaaatggcatgctactagatggttctgagccgaagacatgatctatcagacttcatttttaaagtatcactctggacgctgtgttgaaacagaatgagggatgggaagagtgaaagcaggaggccctaaggagatggtggcccgtacctggggaatggcagggatcaagagagaagtgatttaattctgcatatattctgaagacctcacgagatttccttactgtttaaataaacagtggagtgtaagaaaaagagaaaagattgaggaaaattccaaaattttggccaatggagctgctgttaaacaagatggaggagagtgaggaaagagcagatctggagtgctatgcagaagtcaattaggaagaggttaagtttgagatacctgttggtcatctcaccagaggcatgttgagtagttatatagatgtgtgcctgtgtatacacacatatatatgtacatatattctattaaatggctaaaatgaactaatagtgacaacaccaaatgctggcaaagaggcaaaaacaactgaatcactcatatactgctgatatcagtctatgatggagataaaaatttgggagtcctcagtatagacttgatatttaaaactgtaggctggacgtggtggctcacatctgtaatctcagcactttggcaagccaaggcaggtggatcacctgaggtcaggagttcgagaccagcctggccaatatggtgaaaccccatctctactaaaaatacaaaattagctaggcatggtggcacgtacctataatcctaactactggggaggctgagcagaagaatcgcttgaacccgggaggcagaggttgcagtgaggtgagttcacgccattgcactccagcctgggcaacaagagtgaaactccatctcaaaaataaaaaaataaaataacataaaactgtatgttgggtgaaatgaccaagaaaatgagtgcaaaggtaggtccaaagactaaagtttctggaaggccaacattaaaaggtcagggagatgagaaggaacaggaggctgagaataaagagacagtaaggaaagaagaaatccatgagtgtgtgctgtcctatgtgactactaaagaattatttcaagaaaaagtatgaagattttaatagctaccttgttgaaccatgatactaaaatctgacccaaggccagccacatcattggagctcaattcacatggtttgattttccctcaatataaacttgctaactagtatatttaatttatttttggtttgttctgttttaatatctgctccaaccaaactctgtgagataagctaacaaaagatactatttttgagatgcctctcaatttgctatctataagcaagattaatgagcaatgaaattgaactagacaacctaccaaaagaataacaaacaatttctaacacagtttactcacaaaattgtgaaatcctgggctcagaaggcaccattgcctcgctactaccaagaaaacttaaacataagccaactttattcgttcaaaattaatataacaggctagagaacccagaaatagacccacacaaatacacccacatgactttcaacaaaggggcaaacgcaatttaacaggggaaggacagcctattcaacaaaggatctgctgcaatttaatctattgggaaaacaatgaaccttgacttaaacctcacaccttatacaaaatttaactcaaaatggatcacagacttaaaacataaaactgtaacaattttaggaaagaaccacaggagaaaatcttcaggatctagggctaggtgaagagcacaatccataaaagaaaaaatgataaactggatttcactaaaatgttaaatatttactctgtgaaagacacggtaaaaagaatgaaaaggcaagctacaaagtgaaagaaatatttgaaaccacgtatctgaccaaggactcatatctacaatgtattttttaaactcttaaaactcaacagaaaaaaacaagcactccaattatgtaagaaatttcaccagaggcaaattagtatatgaaaagacgttcaccatcattagccatgagagaaatgcaaattaaaagtgagataccactcgacacctatcgaaatggctaaaataaaaaacagttgcaacaacaaacggtggcaaggataactagatcattcacacactgctgacaggaatgtagaatgctacagccactttggaaaacaggtttgtgacaattccttaaaaactaaaaatacactcctggacatttatcccagagaaatgaaaacttttatattttcaggttgtttaaccattcacccattaaagaatctctgaaggccgggcgcagtggctcacgcctgtaatcccagcactttgggaggccgaggcaggtggatcacgaggtcaggagatcgagaccatcctggctaacacggtgaaacgctgcctctactaaaaatacaaaaaattagccgggcacagtggcgggcgcctgtagtctcagctactcgggaggctgaggcaggagaatggcgtgaacccaggaggcggagcttgcagcgagccgagatcgcgccactgcattccagccagggtgacagaaccagactgtctcaaaaaaagaaaaataaataaaaaaaaataaagaacctttgagatatgaacaaatgttcatagcatctttattcataatagtcaaaaactggaaaacaacccaaaagttcttcaacaggtgatcagttaaactgtggtacaaccatactgtggaatactctgtaataataaaaaggaacagaccaccaaaaaaaatagtcatgtggtacttaacggcatttctgtcaatgacagagcacatgtggaacagtggtcccataagattataatggagctgaaaaattcctatcaccaagtgatgtcatagccagcataatgtcttagcacaaggcactgctcacgtttgtggtgatgctgctgtcaataaacctactgcactaccaggcattaaaaagtatagcacatacaattatatacagtatataacttgatgaataataaacaagtatgttactggtttacgtatttacctatacccttttccattattttagagtatactcctcctacgtattcattttttaaagttaactgaaaaacagcctcaggcaggtccttcaggaggtatctaggagaaggcattgttatcacagatgacagctccatgagtgttactgcccctaaagaacttccagtgggataagacgtggaggtggaagacagcaacattgatgatcctgaccctgtgtaggtctagtctgatatgtgtgtattttagtttttaacaaaaaagttttaaaaataaaaataataaaattttaaaataaagccttatggaatgcattaatcaaggaagaaaaaatttttgtacagctgtacaatgtgttcatgttttaatctaagaattattacaagagtccaaagtcaaaaaatgttttaggtttatgaattaaagttacagtaaactgagattaatttattattgaagaaagaaaatttttaaagaaaattttaaaaatttagtgtcgcctaagtgtacaatatgtataaagtctacagtagtgtacagtaatgtcctaggcctttacattcactcgccactccctcactcactcagagcaacttccagtcctacaagctccattcacaggaagcaccctatacaggtataccatcttttatcttttatactgtatttttactgtgccttttctacattagataagtttagatacacaaatacttaccattgtattacaattgcctgcaatattcattacagtaacatctgtacaggtttacagcctaggagcaataggctctatcatatagc

SEQ ID NO: 96837 - DNA, 14341 bp, Homo sapiens
ctccatcacaattgtgttttactttatgtcttgttcttttcttgtttttaatcttttaagtcccttgactttaataccctcgtggataacatatctgtggatcctgagacaggagacctttgggttggatgccatcccaatggcatgaaaatcttcttctatgactcagagaatcctcctgcatcagaggtaagttttaaaaatgaaccagataagtgactttattcccagctactgttttttcagttgacaacataattctcaattcttggtttttttttttttttttttttttttttgtgacagagtatcgctctgtcgcccaggctggagtgcagtggcgcaatcttggctcactgcaagctccgcctcccgggttcacaccattctcctgcctcagcctcccaagtagttgggaccacaggcgcatgccaccatgcctggctaattttttgtattttttttttttttttagtagagacagggtttcatcctgttggccaggatggtcttgatctgctgaccttgtgatccacccgcctcggcctcccaaagtgccgggattacaggcgtgagccaccgtgcccggccaattctcaattctatgtgcaaataaaaggggggacatggatagatgatccaaatgatcagaaatgaaggcttttggaggtgctttagtcagagtctaggcaagaaacacatggcacacttaaattggataatttgaggggagtttaatcaacggactatacacaaaatgtgtggacacagtgtagggtaatcaacagagttataatgcagtaccccagggctagcaagggagggaggaaatgaataccagaagccagaacaggtagacggtggtgggtggagagggttgcctgacaggaacttggcctctggttaagggatcctcaaagaacataatgatgccatactgctatggtttaatcattcattacctgccttcctattcaactcccccttcctgtgtggcggtatacgcacaggtccatgcaatggaccagtcctggagcacactggccagcctctctagatcttcctgcaggtggcaagataaatagctggaattattctggcttagaagatctcatcttccaccttagttacagtactcaaaggtcccattttttgtccacggtctttattcagtgaactattttgggtacaagtaagaatttgcaacctacttcaatataggtatttgcacatttactgagttttcagtatctactaaggatacttattacttacatcatatatatgatatcatcttgacatatttgtctactgctgggtattgttaaagctcagttttaagagtccatttcacctgcccaacaggaaaaaaaaaagtgttaaagcccgtatctcttgggttaaaaaaaaaagaaacaaatgtgtatttccatttacattatggctctcttaccttttatctctaggtttgcaggacaattgtgatcatgtttaatggcaaccctttgtgccttttgctagtttttagctattagggttgctgaatggtatgtttaatagaattgaagaaatgtatgctgtggagtgttcagtgctcagaactgagcagaatgttagattctaatttgttcttgcttgttagctcatttagtaaccttgggtcatttgctatagcatggacttggtttgttgttctggagaaaatacttcatttctaatgattgatctgcaaaggagtagcaaaaagtagtaacaattccttatccaatgcactgcccctagatgagtgatttagttttattaacaagaagcttagctaagccaaggtgtaccatcaactatttccctgtaactactacatgttaatgctatggcaacttcctaagacatctgtctttggtgccagctgtttttaagaggtcattttgaacgttcccacagacccttttatatccacgcagtggccttcaccgtctgccacatttgtgatgtagatatcctttcttcaagtcattatatattatcataaaggcttaataatagaaagctagagctgaaggggaatttagagataatctagtcccacccatttcattctacagatgagaaacaaatgtgagtggaagatccaagacatgacccaggtctcccacctcagtgtagtgcttttcatactaagttgaatcacacgctattgctattttttacagtcagaatgatcagatattggctatttcatatggttggcttaacatgatactacactgttattattgatacaatcacatttctcctcaattaagtgaaggaaactgaacttacaaaatcttatacatttagagacaggaggttaagttcagaacacatgagtatggtacacagatatggttttttgagggccacattttttttcttgtctgcattttaaaaaccaggaattaagtgtaaacatccagttagttccctggcttacctgaaaatacatgaaaacggaccttaattactgcatggcaacagtttggctattgctgagtgtattagtcaaggttccctagagggacagaactaataggatatatatatatgtaaagggggtttattaagtattaacttacctgatcacaagatcccacagtaggcggtctgcaagcctgaggagcaaggagagccagtctgagtctcaaaactgaagaatttggagtctgatgtttgagggcaggaagcatcagcacgggagaaagatgtaggctgggagggtaggccagtctctcctcttcatgtttttctgcctgctttatattcgctggcagctgattagattgtgcccacccagattaagggtgggtctgccttttgcagcccactgactcaaatgttaatctcctttggcaacacgctcacagacacccaggatcaatactttgcatccttcaatccaatcaagttgactctcagtattaaccatcatactgagtaacagcttcctccctccacatttactgaaatccccactgctccctaatgtcccacatccaggatgcgctgctcatttgcatttcctgcctcatccctgtaggtctagatactctccacctctgctaaagatcacttgagatcagtacccacctgttcccaaatgaagaaacaggtgtgttaagtgtaattttggaacaaaataggatttatctcattgtataagattatatggcttcttatggaggatgaccctattatgcataaggttgttttaagtgacttaacaaaaatattaacccaatgttatttcttccacaggtgcttcgaatccagaacattctaacagaagaacctaaagtgacacaggtttatgcagaaaatggcacagtgttgcaaggcagtacagttgcctctgtgtacaaagggaaactgctgattggcacagtgtttcacaaagctctttactgtgagctctaacagaccgatttgcacccatgccatagaaactgaggccattatttcaaccgcttgccatattccgaggacccagtgttcttagctgaacaatgaatgctgaccctaaatgtggacatcatgaagcatcaaagcactgtttaactgggagtgatatgatgtgtagggcttttttttgagaatacactatcaaatcagtcttggaatacttgaaaacctcatttaccataaaaatccttctcactaaaatggataaatcagttatgtcaattgtcagatattaaataacagtgtgtgaccccaaaagtacttaccctaaaacatgtgttgcctgaaagcacatgtgtgtatcgctgccttgccatgtcttgttcagaagacacaggggagcagggttagctcacgtgtctttagaactccagtactcacccagggactccagttcacaggccagaaaacatatgcattatgaagttcccctctactccatgcacatagtaagtctgactatggcagtcagacttacttactcccattttcccttcgatatatgactttttctcagtaaatattaacctgaactattccaactccccttgtactcttgctttttcaattctcctgttgcaatgacacataggaaaatcttaaaattcttgggagtgttgtcacacctgaaaattatgagtctctatgatcttggcacaaattgtacatttgagtgtctttgacttggttaaaggaagtttgttcacttcgatgactggatacagaatgaatcccataattgacatgggcgaagctaaaagtgtccccaaagactacactgttgttgaggtggtggtagtgctggtgggtttttgtttaatatttaaacttcttgttgtggaggctgaaaagaaaaaaaataatagaaaggtaaacaaacaaataaatagaaaagatcaacaacccctttggctatctactgagacatgactaggaagaaaacatgactttatcattttgttatagaagctgatatataaaggttacacattttcatttatttgtttttctgatttgaaggtataaccttcatgatgaattacttcttcagggtgttaaggcagtgactttagaaacaaatttttttcttgtttttgttttgtttttgagaccgaatctcactctgttgcccaggctggagtgcagtggtgcgatcttggctcactgcaacttctacctccgaggttcaagagattcttgtgcctcagcctcccggatagctgggactacaggcacacaccaccatgcccggctaatttttgtatttttagtagagacggggtttcaccatgttggccagcctggtctcgaacacctgacctcaggtgatccacccgccttggccttccaaagtgctgggattacaggtgcgagccaccacacccagccagaaacgaagtttttctaaggcacttgttatgatgatagtctggcatttccgggaaaatgttttgccaataaattgagaaccaccaacagttgtttaagaatcactgacttgaagtaataaacaggaacattttgtttgggtcaaaaaaccactttattcacagcaagattggagttactcatgattccagtgacataatatcccgtgccctacatgggctcaatttttctgagatgctgctcacagcccaggatgctgggttctctgaaagactgtcttgaaattatcaatgagtgtgatgcttagggaacacccccaacatatttcattatttagaaagaaagaatttcctgagtagttaggctccctaacatcttcaataaaatgaccacattctgttctttcttgttcttgatgatagataagcaaattccactgaagaaacaaaagcctatccaatttgacacagcacatactcaagatcactcaaaaagggacatggcttggttagaaatttcataacatacattgtgaaaaagaggaaaacagcttaattcatgtattctgtgattcccagatctaaattttcgcactgacataggcttagtcacatataaattatagtttgcgtgtgtaagaatgaatgaaattaatagccctcacttatttttaaggctttagaaagaatattgtttaaaataaccccatactctacgatggtcctgattcttccttagcttgcccctcgctatgtgagactgactacttaatggatttgtcacagaggttttcctggctgagagatatcagagactttgatggtgaagcagcgacaggggaacaaaatgacgggcgaggaagcttcgagtgcaggctttgctcttttaactttatgcccagttccataattgtgctttcaaatgtaatttctagctgccaatttacactttaccacagttaagacttagtttcatttccatgaaaaatgtgcactttgctcctgattgacagatatatgctttgacaattgatacaggtttacccagtcaaggcttgttttagttgaaggtgaaaatggaagagggaaaaaaaattgcttcaacagacctcagtatttctttttattgcattcgttgtctaacaacaataatactcattggcaagaaatttatttacactaacaaattaaatttaatcacaggtattkttagattggtcagaaaacaaaagaccactgtgatattttgcttgaatgcctctgaaaaccaaagagtaaggaatgtcatttgaaactttttgaacaatctagagaagtacatattaaccaagcacaagagaacaattcagacgtggcactattgtctcttccatgcaaatgatcagacatcaaaatgtacaaattaaaagcttaggtaacatgctatccatacttatcagacttaaaattattttcaaacaattcgtgttctttactgatatacaaagaaagctgaaaagaaatcaacttcttacagtggaatagaatttattctcttttattttcagctgcccagttttgtcagtaaggtgtagcaggtgtacaagtggttgcaacaccattaaaaaatataaaagcagtagttatattaaataatgttgaagaaaacatatacatatatatttaaggaatttcactaagcactaactaaatttcatgttgttgggaggtgttatctggctggagtgcctcttaattctttttaaggtaatttaattatttcttgccaattgttctttcttgaatgaatgattacatccttaacagaaaacctgggtgtataaataatacagctgaaagaaacagaagtgtacaccttccaacaacatacactcccaaccacttgtgttgtttttggcaacaaccaaaatgccattgcttgcacaaaaagtaaataaatgatcatatgatggcaacattcatcataagagagccagtaggcagtgactgtaagcatcacagccaccaattatgtcattttagaattgtgagcaaattcacaagaacacacagtgcaatttttagctgcatacatttcttctgagctccaactcagcaatatgcaatcttgacatcaaagcattagccaaatatttgaggaaattttcttactaaaataccaagtatctgataaatcaattttaccaaaatatataaacatatagaaggataagtgcatttagtagaaatacttacaataaaaaaatctcttaaaatctatgagccattcaatgtatacacaacgmaagaagtggcaataaggctatgattacagctccaggtcctgactgacctcgccaagttccatacacaatatattttttaatgccatgtgattgcagtgtgtgtgcgtgtgtaaggtgggagtgatattcacacatatgtagttctgaacatctacacaaacggcatgcacattgttgagaagttatctgttctcttattgcatacatcttactcactgttgaatccctagcagttttggggttgggttagggtcaagcataggaaatcatcatatttctttccttctccactcttgaggatctggaatcaggtcacagactgtgctgggtccacacgcttacatatgtgaaccttcaagtaactaccattccctcaataggcccacatagacaccacggacaagcaaataaggaccctctgtctaccataaatagaacttgatgctttcactttccaggagaagctgattctgtcggctttctctttgcccctccaacttcttagttgggcctattctatgctgctacttcaagttactcaaatgtgttttgtctggtgttatttttttctccagtgttttggaccaagactagatttcctgagactttaaatacgcaagacaaatgcaaacaaaatctgccaacatacccaggctgcttttcaggagtgaatcactgaagygcatttggatttcctataacactactttcttttgggaatgtacagccctcccccagctccccatcccccatcataatgtaaaccattctaakagaaaatatggatgttttggctgggggtggtggcacatgcctgtagtcccagctacttgggaagctgaagcaggaggaccacttgagcccaggagtttgaggctgcagtaagacatgatggcaccactgcagtccagtctgggtgacagatgacagaaaaaaaaaaaaaaaaaraaaagaaaagaaaatatggacattttatttctggactttatccttaaatgcttagctttagaatagtgcacaggtacatccttaataaaaagtaaatttgaaaagacaggaaaggactgtgcttttctcttccattttaccttttcattctgagaccactaaggtctttgcattaagtaggtgacgtgaaccctagtgrccactgcccaccaaaatgcccctcatctccagctctgtcaggagtacctttagttactcaaatggaaatatctcagtgtaatgatggggctacaacatatccaaagtatagatggttctctcagggctgctggggcagcttcctttagaatcctctagaacactattgttaaacactggatctcctcttgaagtttagtctgcataacctttaacacttaaacatgaatcagagtatctatataaatgcaaattttcatttcccttttataaaatgcaattttcaagcacatgctaattctggtgcacaatgaacccagacaaatttgtcttcagcacaaactctaacggccgaggtgctagatcaaaccacctgtgaccatttttgtagcttgggactgggatattttaagatttcaggctagtgatgattacagggtcacagatagtggcaaaggtaaatctggttcctcattttccctcttgccactttgtttccaacaacaatggagcaaaaggtgacagtcccattttgtgccagttgaaagctgagtttggctttagtacctatcatactgcaatcatgaactgctgtgggttaaaaaaagcttgtgatgttgagggtgtgaaatcaattgtcaatcccagctaaaggatgatagccacagaacagctttattgtcatgaaactaaagggggacttcatcaggagtgttagaatggatgaaatgaggtttcttccctaacttaacattctgcagaaaattcctgattcaggtaaaaaaagaatgagattagtattacataaactgtgagttacttgaagggagatggtcttaaacaaagtaatctgttataaaactaacatcctttaatgggaaaccctgacccagatacagctcatacaatgctttctgtctgcagcttggcctcctcaccacacattccctcccaacaaagcataacctataccccaaaacacttttggctattgttagaatcatactgagctctcctttagggaatcagttcatagcaaccagatattccctttttgttcattttctgataataaaaactgcagtttttaaggttgatgaaataacaattctgtgttaaattgtaaggacactgaaaaccactagcattaaagtaggaattgtgcaagacattggagccttgattaggtatcatgcactacagtcaataaaagaaataataggaaaacaaaatgtgcacaagatctgaggtctttcactttgctttcatacccttaatcagtttacatcttatgctttgtggggcaatcaaaccaaatgacttttacaatttcatccgttttaagtggtaatgttaaaataactcacttcggcctaaaattactataatttaacttaaaaaatcaaaatacttataatactaaatgattttaggaataagaatttgatttataacattgtcagttggacatttatctaaacattcaatatacaaagttataaagaaaaatacttctaagatatttaagaaaatgcaatataatagatcataaattaggtgcaaaaacaagacacttacagacatttccagtatatacatccattttcaaatattaccaaagtgtaaacataacttaagataatcatccttctatttctactcttgaatacagtgaaacttccagtgtgatccaggtcacttttttcccaaagataagcaaaaatggcaaaaatttacaatagcaagcactaatattaccagatttttactaatttagtgttttagtatttgaaaagttttgccaaattgtatcactcattaatagtggcttcttatttctcatgatgttaaaaaataacaaagcaccagacatctcaagacattaatagagtatccaatatggcagtttcattatcatacccctaatgaagacagacagaaaaacataatggtgactttgataactgtaaaacacaatgttacttcatgtcaacgtttctgaggattgaatgaagggtctgtacctaatgacaaaagagctgacgcataaccgacaatactctggcaatgaaaagaaaacaggccttgggggtaaaacagaattaaaaatgtccagtttagataatttctgaattcagattttcagataaaaaaaaatcacactgttattaaaatacaagatggggctacaagggagttcccttaatctgttacactcaaaagccttgccgaggctctaaatatggaatacttctagtggaagatacgagatgctgggaacagagcagagattcccataaagtaaaagaagtaaaatactgtccaagaattcatgtggcctcaagtcttattctgaaacttgtcctttggaaagtggataacctcatttttagagtcaacgcagcaaagagaaccagatacatgagcataaaaaacaaaaaaccctcatcacatgaaatttctcaaaacgagtttattttctccttcttctgccccagtctcctgcacttgacttagtttggtgaaacatggaaatccttaatgctggcttaaaattagtataagttcctccactactaaagtatacctatgcactgccttaaacaaactttttctgtaaaattgagaatctttgaagtatggaaaggaatggttcggaaaaaccattcaaaatctctctaaaatgttaactgacagtttcctctaactggtatttctatttttcttaaaagtacatttgttaaaatactaactgagcccacctgggaaatcttgagtagaaaatatgtgatgagttcctgattgtgacataggcaggctgaagaccagccagaatgttccccaggagaggaaacctgaaaatggtggtttccttaaaaatcaatttcctgttcaatttcttgggttaggtagggggaagaggaactgtgttgtgtttgccagtgttgctgaaatgctgaacacacagcagtagcaaggtcaacagatcccaatatcccatggctgcattaatgtctgatttttttctttcttgttcagccgtatctagaggataaatattaccctcagaaccccaaggtaatacccacatccacattcttaaggcttttgcttttttcagtggttaacaaatagctataatttattttctttctttttgatgcctagcaagcagaatgacttgcttgccttttcccttagtaggtaactacagagcagagcacccatgtttccacagcggggtggtctcactgtccagactgagaattaagagcaaatctttcccacacattggagtaggtgttgcagtcctagaagttaagtactggtctcagatctcatggcagggtgctctctgccatgcagacatgtgcaattgccatttcaggatcccacactgaaaattcacggcgctccattaacaacaccagggtgtgtcatgctcttgggtggggtcacactagttctccaagtgacaaaacacacccaacacaacacaagatgttggtaagttagagaagagcaaaacacagctacttaaatgaaatctctggtttgttaatgaaccaaaggtggcttgggattattttagtagttaaaattaagagtgcattctattgcagaaaatgcagttattcaacacacagttcctcagccggcctagagccgcattacccttatcatttagtttctttttcatcctctggaggagagcagggcaggaagaggtggggacttctcttggagcatctccatcatctgtaagagggtatgtgttactgctcaccagcaccctcggctgtagttgacgtcatcttttctgtctttttggacttcctctgcatttgctcttgctcctttctccttagcttttctctttgtttttccattttctcttgggccttccgagccttctctagagacatcttcatttccttgagtttctttttgaccactgctcggtcctgggatgctgtcattccaagagcctaagaaagaaacacacacacaaactgaatttgaaaaccaatgagccctctgatggtgttaacataccatatatccaagttcgtaaactaattcaaacattgaagaggtaagaacagaggaagaactagttacatttgctaaaaaccaacacactgggggctaccctttattttttcttttgttctttgaagtcccttgcaaagtataccctaaagctcattaattaaatgctttccaaatgagtaattaatgggtgaatgaatggaaaaagggcacaattctacttctccaacctttgggctgtaggcatttacgggtaaaggtattgctaaactcatcaatattttcaaagcataggagtgagcacctgctgtcacagagggctccaagaagggcaagaagaattgaaatggcttcctttctgccaatgttttcattacaatgagaaccaaaaatgtctttggggccagaatgctcgtgtcagcatgactagccattctttccctgtaggcagacctataaaggaagttgattataatgaggaggttgctcgatgaacttagaattcagaataaggggagttgcttatgtactttaaatgtttcgtgaccttcagaatcaacagcaggatgcatctatctatctccccaacagggacagccttgtcaatgaggccttcatattcacaagctattgattgatctctaaccttttcaagattgtcaagagatactcgtctgcccgtcagcccagcagggggctgaggcgggggtggggcttgggggtacatggagttggctgtaagcacctttttccctttcccaaagggatggatgccaccttggtctctaagagagatggactggacaagtggaaatgaaagtgccatggaggggagggaagatgtgtgtacatatttggggaaaaaacttctggggagaacatcatcccagtttgggagtggtgtgtaaggaagagtggaggtgaaggagaaatgaacaaggaaaagaagactcgtggatctgggtcttaattctaatgtgatgaaaaagtccacagtggccattattaaaactcatactacatcagatgtaaggagagttaatatatggaccatgtgttgccaggtggaagcaatggagtgggtccctcactctcctaatcagcagcctaccatttgatttggaacccctgatggactttctgagacttcatttactactcagaaagaattcaacatcctttctgctgaatattgatgagaattacctctcagatatgcagaatgctcttacctaatgaaaacattttaggtgatatgagtaatacaaattatacctggtaacctaagacagacatataattctttaccttaagtttatttccatccaactgcaggagctgttctccagtgatgttttgggcactgaattcagatacatactgctccagatttaggctcattaaccagtgagaaacctgctgcacactccattcctgaacggcccgattctgacactgactgtgtttgggagactgtccatcatcaaggatctaagataggaatgttacgtagtgttgttaaaggaccaagatactatggctcatattatgctatcaaaaggaatttcttaacctatgagagccacatttatgtttaaaccaaaatatgataagctaatggttctagtggtgttagaaaaaatacttattacctatatgtttttatgtttttagaagtttagaaattccccataataaaaaagcaccattattaatgtaggaagtttaatattgaagaaaatatattaatgttgcaagcttttacatcaaaacagtctggacagattataagatgtagaaaataaatatttcataaatttctatatgcaatgcatcacttatcctctaataagacattggaattttgtaaaaatatattaacaaatactgaggtatctttcacttgcaagaggagagcattaagctctcaagccttcttaggggaagtttcacaaccattatttcacttga

SEQ ID NO: 96838 - DNA, 14631 bp, Homo sapiens
agtaaaacaggaataatggatttgctgacgaccaagttgatgttctggaaaacgaaatttactggaatgtagagaaataaaataaatggtggaaaatatgagagaaaactcaaggcatggaggatagacccaagaaattcaagttccagaacacaatttttcttagttggagaaagacaagtgtctttagatggaaaaaaatcatatcagccatacagaattagacagaaaacaaacaaaaacccaaaatacccatgcctaaacacaacctggtgaaatttcagaactctaagctaaagagaatatcttaaaagaattagaaaaagcaaaacagattacttacattggaatgagaatcagactgatagacttctcatcagcaatcctgtatgctggaagacagcagaataccgccttcaaagttttggtagaaaatgattttcagggggaggagccaagatggccgaataggaacagctcccgtctacagctcccagcgtgagcgacgcagaatacgggtgatttctgcatttccatctgaggtaccgggttcatctcctagggagtgccagacagtgggcgcaggccagtgggtgcgcgcaccgtgcgcgaaccgaagcagggcgagggcctcactcgggaagcgcaaggggtcagggagttccctttcctagtcaaagaaaggggtgacggacgcacctggaaaattgggtcactcccacccgaatactgcgcttttccgacaggcttaaaacacggcgcaccacgagattataacccgcacctggctcggagggtcctacgcccgcccacggagtctcgctgattgctagcacagcagtctaagatcaaactgcaaggcggcagcgaggctgggggaggggcgcccgccattgcccaggcttgcttaggtaaacaaagcagcagggaagctcgaactgggtggagcccaccacagctcaaggaggcctgcctgcctctgtaggctccacctctggggccagggcacagacaaacaaaaagacagcagtaacctctgcagacttaaatgtccctgtctgacagctttgaagagagcagtggttctcccagcacgcagctggagatctgagaacgggcagactgcctcctcaagtgggtccctgacccctgacccccaagcagcctaactgggaggcaccccccagcagggacacactgacacctcacacggcagggtattccaacagacctgcagctgagggtcctgtctgttagaaggaaaactaacaaacagaaaggacatccacaccaaaaacccatctgtacatcaccatcatcaaagaccaaaagtagataaaaccacaaagatggggaaaaaacagaacagaaaaactggaaactctaaaaagcagagcggctctcctcctccaaaggaacgcagttcctcaccagcaacggaacaaagctggatggagaatgactttgacgagctgagagaagaaggcttcagaagatcaaattaccctgagctacggaaggacattcagaccaaaggcaaagaagttgaaaactttgaaaaaaatttagaagaatgtataactagaataaccaatacagagaagtgcttaaaggagctgatggagctgaaaaccaaggctcgagaactacgtgaagaatgcagaagcctcaggagctgatgcgatcaactggaagaaagggtatcagcaatggaagatgaaatgaatgaaatgaagtgagaagggaagtttagagaaaaaagaataaaaagaaatgagcaaagactccaagaaatatgggactatgtgaaaagaccaaatctacgtctgactggtgtacctgcaagtgatggggagaatggaaccaagttggaaaacactctgcaggatattatccaggagaacttccccaatctagcaaggcaggccaacattcagattcaggaaatacagagaacgccacaaagatactcctcgagaagagcaactccaagacacataattgtcagattcaccaaagttgaaatgaaggaaaaaatgttaagggcagccagagagaaaggtcgggttaccctcaaagggaagcccatcagactaacagcggatctctcggcagaaaccctacaagccagaagagagtgggggccaatattcaacattcttaaagaaaagaattttcaacccagaatttcatatccagccaaactaagcttcataagtgaaggagaaataaaatactttacagacaagcaaatgctgagagattttgtcaccaccaggcctgccctaaaagagctcctgaaggaagtgctaaacatggaaaggaacaaccggtaccagccgctgcaaaatcatgccaaaatgtaaagaccatcgagactaggaagaaactgcatcaactaacgagcaaaatcaccagctaacatcataatgacaggatcagattcacacataacaatattaactttaaatgtaaatggactaaatgctccaattaaaagacacagactggcaaattggataaagagtcaagacccatcagtgtgctgtgttcaggaaatccatctcacgtgcagagacacacataggctcaaaataaaaggatggaggaagatctaccaagcaaatagaaaacaaaaaaaggcaggggttgcaatcctagtctctgataaaacagactttaaaccaacaaagatcaaaagagaccaagaaggccattacataatggtaaagggatcaattcaacaacaagagctaactatcctaaatatatatgcacccaatacaggagcacccagattcataaagcaagtcctgagtgacctacaaagagacttagactcccacacattaataatgggagactttaacaccccactgtcaacattagacagatcaacgagacagaaagtcaacaaggatacccaggaattgaactcagctctgcaccaagtggacctaatagacatctacagaactctccaccccaaatcaacagaatatatatttttttcagcaccacaccacacctattccaaaattgaccacatagttggaagtaaagcactcctaagcaaacgtaaaataacagaaattataacaaactgtctctcagaccacagtgcaatcaaactagacctcaggattaagaaactcactccaaaccacttaactacatggaaactgaacaacctgctcctgaatgactactgggtacataacgaaataaaggcagaaataaagttgttctttgaaaccaacgagaacaaagacacaacataccagaatctctgggatgcattcaaagcagtgtgtagagggaaatttatagcactaaatgcccacaagagaaagcaggaaagatccaaaattgacaccctaacatcacaattaaaagaactagaaaagcaagagcaaacacattcaaaagctagcagaaggcaagaaataactaaaatcagagcagaactgaaggaaatagagacacaaaaaacccttcaaaaaatcaatgaatccaggagctggttttttgaaaggatcaacaaaattgatagaccactagcaagactaataaagaagaaaagagagaagaatcaaatagacacaataaaaaatgataaaggggatatcaccaccgatcccacagaaatacaaactaccatcagagaatactgcaaacacctctacgcaaataaactagaaaatctagcagaaatggataaattccttgacacatacactctcccaagactaaaccaggaagaagttgactctctgaatagaccaataacaggatctgaaattgtggcaataatcaattgtttaccaaccaaaaagagtccaggccagatggattcacagccgaattttaccagaggtacaaggaggaactggtaccattccttctgaaactattccaatcaatagaaaaagagggagtcctccctaactcattttatgaggccagcatcattctgataccaaagccgggcagagatacaaccaaaaaagagaattttagaccaatatccttgatgaacatcgatccaaaaatcctcaataaaatactggcaaaacgaatccagcagcacatcaaaaagcttatccaccatgatcaagtgggcttcatccctgggatgcaaggctggttcaatatacgcaaatcaataaatgtaatccagcatataaacagagccaaagacaaaaaccacatgattatctcaatagatgcagaaaaagcctttgacaaaattcaacaacccttcatgctaaaaactctcaataaattaggtattgatgggatgtatttcaaagtaataagagctatctatgacaaacccacagccaatatcatactgaatgggcaaaaactggaagcattccctttgaaaactggcacaagacagggatgtcctctctcaccactcctattcaacatagtgttggaagttctggccagggcaattaggtaggagaaggaaataaagggtattcaattaggaaaagaggaagtcaaattgtccctgtttgcagatgacatgattgtatatctagaaaaccccattgtctcagcccaaaatctccttaagctgataaataacttcagcaaagtctcaggatacaaaaccaatgtacaaaaatcacaagcattcttatacaccaacaacagacaaacagagagccaaatcatgagtgaactcccattcacaattgcttcaaagagaataaaatacctaggaatccaacttacaagggatgtgaaggacctcttcagggagaactacaaaccactgctcaaggaaataaaagaggatacaaacaaatggaagaacattccacgctcatgggtaggaagaatcaatatcgtgaaaaaggccatactgcccaaggtaatttacagattcaatgccatccccatcaagctaccaatgccttttttcacagaattggaaaaaactactttaaagttcatatggaaccaaaaaagagcccgcatcaccaagtcaatcctaagccaaaagaacaaagctggaggcatcacactacctgacttcaaactatactacaaggctacagtaaccaaaacagcatggtactggtaccaaaacagagatatagatcaatggaacagaacagagccctcagaaataaagccgcatatctacaactatctgatctttgacaaacctgacaaaaacaagcaatggggaaaggattccctatttaataaatggtgctgggaaaactgactagccatatgtagaaagctgaaactggatcccttccttacaccttatacaaaaatcaattcaagatggattaaagacttaaacattagacctaaaaccataaaaaccctagaagaaaacctaggcattaccattcaggacataggcacaggcaaggacttcatgtctaaaacaccaaaagcaatggcaacaaaaggcaaaattgacaaatgggatctaattaaactaaagagcttctgcacagcaaaagaaactaccatcagagtgaacaggcaaccgacaaaatgggagaaaattttcgcaacctactcatctgacaaagggctaatatccagaatctacaatgaactcaaacagctttacaagaaaaaaacaaacaaccccatcaaaaagtgggtgaaggacatgaacagacacttttcaaaagaagacatttatgcagccaaaaaacacatgaaaaaatgctcatcatcactggccatcagagaaatgcaaatcaaaaccacaatgagataccatctcacaccagttagaatggcaatcattaaaaagtcaggaaacaacaggtgctggagaggatgtggagaaataggaacacttttacactgttggtgggactgtaagctagttcaaccattgtggaagtcagtgtggtgattcttcagggatctagaactagaaataccatttgacccagccatcccattactgggtatatacccaaagaactctaaatcatgctgctataaagacagatgcacttgtatgtttattgcggcattattcacaatagcaaagacttggaaccaacccaaatgcccaacaatggtagattggattaagaaaatgtggcacatatacaccatggaatactatgcagccataaaaaatgatgagttcatgtcctttgtagggacagggatgaaattagaaagcatcattctcagtaagctatcgcaagaacaaaaaaccaagcaccgcatattctcactcataggtgggaattgaacaatgagatcacacggacacaggaaggggaatatcacactctggggactgttgtggggtggggggagcggggagggatagcattgggagatatacctaatgctagatgatgagttagtgggtgcagcgcaccagcatggcacatgtatacatatgtaactaacctgcacagtgtgcacatgtaccctaaaacttaaagtataataaaaaaaaaaaagaaaaaaaaagattttcaacctgaatatacccagccaactaataggtaagtgtgagggcacactgtagacatgtttagatgttaggatcagaatgcttactgttcatgcatcttttaaaaaaattgcttcagggaaataaaaaaagaatacaagaaagaggacaccatgggttgtaaaagaagggaaagatgtgaaaatttcagaaaataaaagtatgttttataaaattaatgcctctcctttgaagaaataaaaccaggtattgttgacaggattgccactagtgattgaaactggttaggaagacctttcactttgcattttatactcttctgtattattgtattatctgcatttatttttgttttgaatacagattacttgcagtcttctttttttttttgaggcagaatctcactctgtcacccaggctggagtgcagccgcacagctttggctcactgcaacctctgcctcctggattcaagcaattctcatgcttcaacctcctgagtagctggcattataggcgggcgccaccatgcctggataatttttgtatttttagtagagacgaggtttcaccatgttggccagcctggtctccaactcctggcctcaggtgatctgcccacctcagcctccaaagtgttgggattacaggcataagccaccacacctggcccatattatcttttaatcctgctgtcagagacgtgtgaaccagagcaactccattttgagtragggctagcaaaatgaagctgggacttgctgggctgtgtttctagaaagtttggtattcctagcctctagatgtttatggttaaaggaacaaattaataatgtttactgaagagacccagacttgggagtgtccagatcaaaggcatttctaattttgctttaaagataataatgttaattcttgcaaaatatagtaattaataaatcaatcctttatcacaaacccttgtgatacaaatacaaaaatttgctgggcatagtgacacgggcctgtgatcccagctattyaggaggctgaggcaggagaattgcttgaacccaggagccagaggttgcagtgagctgagatcacgccactgcactccagcctgggcgacagagcaagaytctttctctcaaaaaaaaaaaaaamaaaaaaaaaaaagatgatatggaaaaagtgttgtgaaagctcttacttttacattctaccaaccctgtataaggtcggtgtcagagtcaagcaattaataatcacaattggggtggacaatttagcatctaggtcagtgattagcaagtaatagttttctcatccatktttgttgaattagcataagatattatggcttatgtactgatatggctggctactttatcaaggcagtaatttgtcctttattcttgctgctgtagatatttttccctttcccaagctaagaaggtagccacgtcttgtgttttttgtttttgtttttacctaggtggtttttgtattccatcaggaagcagacattgccaagcaagagaagacaactccttcttagccttttgtttgcaataaccttggctcagtgagagttatgtagaaagtaagtgcatgaaacttaacaggtagaagctgtgggacccaaggggagaggaagattcctgagactaacagatggagtcgggttctgggaggcggtgggggtgattctgtgctgagcaaaagtatcaccccaggattgcacagtctcaggctggtggactccaagaatatagtcctgggagcaatggcacagatatcccctgcctacygtcagaagaccatgtgggcagggatggtgaacttaacagagaccagcatggacagaggtctagaggactcttctccaactcctcccaccagctgttctctgggacctgaggaggtagagaaccctactgaggagtgagattgaatatcccaccaactggatggctgggggttcagggcagattaaaattgtttagcataaattttcagcttgccacaatactaccatccttgacagtgcttgcttggtcaatgactcatctagagcataaaatgaaaaatgattcacagtatatgagagctagctgtgacttctatgttcatctaattcagattcttcatttttaggttaggagaccaaggtaaaagatataaaagaactaggccaggtgtgatggctcatgcctgtaatctcagtgttttggaaggccaaggtaggaggattgcttgaagctaggagttcaagaccatcctgagcaacatagcgagatcctgtctctacaaaaaataaaaaaattagctgggtgtgatggtgtgcacctgttgtcctagctacttgggagattgaggtgggaggattgcttgagtccaggagttagaggttgcagtgagctatgatcatgccactatactcaagcctgggtgacggagtgagacaatgtgtctggaaaaaaaaagatataaaaaaaacttgttctaagtcatgagcccaaagccagtgcagggctgagacagtgggctgtcaaccctcagttgagctatgactagcccttacgaaagtaagatcttacaattttaaatgcaataaaaatggaaactttaaaaatatccagatctgatagtggaggtatctgatagtggctatgtgtattttccagttaatccccactatagaaattgtaaacagatgacctgagtcatacataaagtgggtgatattacagttcgagaattaaatacctcttctgtaggcattttaaatatggatatgtgtatgtatgtgtgttaatatacagacacacaaacagaaatctttccgctatcaaacactgggcagaaatttcttttcagttgtgtgtgtgtgtgcttgcatgtgcatgtgtgtatgtatgtgtattaaacctacttaatagctaaataaaaagtttatttataatttatgattgggtcttctttcgtaagaatcaccctgtataataatacttctagtctaacttcccccaatatccagtatttttctaatctatgtctttgtccaccttctcacccttcactctttgcaggtaaaaggctgattggagtttggcttcttatttctctccggacaactgtggcagagaatacaaccatcctatgcataacagcctctttctagctgaacaagcagcctgcactaccactccattatgagaagacctaggtagcctgagtgttcatccagcagcagtctgtgggtcactgtgagttcagaccctgctctgggcagattcaaaaggcagggtgtgaggatggcaatgcccacatggcaaaagcctgtcctttagatgcggcaccactgagagatgctgtgtcacaggaggttggcctggcttatccagctgtctgttcagatgttcccataggattctctctgccagcagagtccacggcgaatgtggataaacagtagtaccattaggacagcagatatcaggcaaaaggcaacagcaaagatgacctttagaactgtgggaaaataggaaaagtattaatgtaaaattaatgcattaggaaaataggaagatcacatgtgagtgttgctttctgccttaattgcaaatttcagaggagttgctaaagaggccttgaaatcagcattatgtgtgtgctaagaagagcacaggactaggagtcaggagatgacctaggttccagttccagcataaactttgacccttgagattcagctccccactgaaaagggagggtaattagctgaagtatttctaagtcctcttatagcactaactttatgcattttttacagttatattaccaattgtccatggtctcagggtcaaaggaaattctgaatgctcaactgcaatcaattggatctaaaagaaatgaaatccttcgatttttaaatttgatttttaggtaaatatttgttgaagaggagatcttgtgcacattttgtctctatggcaaacatttctagcataactgtgtactatttctaatatgtacctttatttacacatattcttttgatagctgaccagtaaaagcagatatttggggccatttcgtaatgagatgctaattcattatttcatctggaaagttactctcctatacacgcaccctagtccactatagtatacacatcataaataccagtttgtaccatctctaaatgtatgtcttttcattgtaaaaatatagggtttcttgttggcttaggcaataggagagcaaacatccctctgatcccatcagctctttctacagaaccctagtgcagcatagaagacaggtgaaaatcactgatttcacctgacattatcattaagagaatgaggaaaataagaagcagagcaattagataatctggttatggttaagcagataattgtattggggttgggatcttatcagtctcatgattttaaaaaccatctattcagtaattacttccaaatataaatctccagctctgacatctatcttaagcgcaagactcatttatccaattgtatacttgatatgtttctttagatatctaataggcatttcaatctcaagtccaaaactgaactcttgatctccccatcctcattccccacaccaaatttgctcttcccagagccttccctcttctcagttgatggaaactcccttcttctgttggcttaggataaaactcttggagtcttctttaactcctttatttttctcacagcttacactatcaggaaatcctattggtcttactgaaaaatatatcccaacactgacttcttttcttctctgccaccaccctgctttgaaccaccatcgtcttttgccaggatcactataatggcctcttatttgttcccttgtttctatctatcctttctcctttgtaattttttttttttttttgagacagagtttcactctgtcacccaagctggagtgcagtggcatgatcttggctcatgcagcctcgactgcccaggctcaagtgatcctctcacctcaccctccctagtaactgggaatacaggcatgcacctccatgcctagctaatttttgtattatttgtagagatggggttttgtcatgttgcccgggctggtcttgaactcttaagctcaaatgatccatctgcctcagcctcctaaagtcctgggattacagacgtgagccaccacacctggccacaaggccacaatccttttttttttttgggagatggagtcttgctgtgttgcccaagctggagtgcagtggcaccatctcggctcactgcaacctctgccttccaggttcaagggattctcctgcctcagcctcccagtagctgggattacaggtgcccgctacaatgcctggctaatttttttttgtatttttagtagagacagggtttcaccatgttgaccaggctgaccatgaactcctgacttcaggtgatccacccaccaccacctgcacctcccaaagtgctgggattacagtcataagccaccgtgcctggaccacaatccatttttaacacagcagtcaaatgacttaaagtcaaatcatgccacttctctccttaaaacaaagtctgcaatgaatgctcatctcaatcagaataaaagctacagttctaatgatgatagtttatgaggatccacatcatctgtctcctatgagtcccctcacatttcctctcctatcaccctcccttcactcactcacttctggcctcataatccttatgctgttcttcaaacatgccaagcagtcctgccttagtgactttgctatacctgttatcatggcctgaatgctctcccacacatcccttgctttctttgcctaaatctcatctccatgagaccttcccatttaaaagtgcatcttgtatatcctccttcacttcaccccaaattggccattgtgatcctcatcttccaaaacacttattatgcttattatttgttatctatccctctctccctctagtagaacacaagctttgcaaaggcaggaacttttgtcttttttgttcatgaatgtatctcaagcactgagaacagtatctggcacataacgagtactaataaatgtttgtagaaaaaacttaatgacttagaacttataagttcccaactcttagtccagtattttctgatgatgccaggatgcttcttagcatcacgaaaaggtggttttaagttataccctgagagacagtctcattagaactgcagatagatttaatataagtttaaggcaactaaatgaaattgaagagggaaagaaaggactcagtggaaatgaggaaggcagatagtagtgatccttaaaaatctattttcatggctgactctgtatttagaaatttattttcagttatttttatgggctgtgttgtcatagcagtctgatggaacatgcttttctgctctttatccttccttctttcctttctagacatgtggtgagcacacatgtaccaggtaggctgtactggatgctgaggttccataatctctgccctcgaggagctcaatgtctagcaggagaaccagaaaggtaattacaagatactgtgataactactaaaatggaggtgcaaaagaaatgctattgaaacaaagagaaagttgcagtcagcagagtgtattctatttgaaagagaaagagtttggaaagtcttctaagaattgagctgacctgcaaggtgagtaagactttgccatgaaacagaaagagtttcacaagggcatgtttaggacataatgaggagttacacatgactggaatacaggcttcagggaggtgaaaccacatgtgtaaatggggggccagtttgtttttgtttttgtttttgttttttgagatagggtctcactgcattgctcaggctggagtgcagtggtgcaatcactgctcactgcagcctcaacctcctaagcccgggtgatcctcccacctcagcctcccgggggaagctgggaccacagatgcatgccaccatgctcagctaatttttttgtattttttgtagagatagagcctcactatgttacccaggcaggtcctaaactcttgggctcaagcgattatcccacctcggactctcaaggtgctgggattacaggcatgagccactgtgcctggccaggggccagtttttagagtgcttggtttgacgtggggcaaatggaagtcatcagcaattattacatatggaagtgatacagcccactctgtgtttattttatttttatttatttatttattttttgagatggagtttcacttcattgcctaggctagagtgcagtggcacgatctcggttcactgcaacctccgcctcccgggttcaagcaattctcctgtctcagcctcctgagtggctgggactacaggtgcctgccaccatgcccggccaatttttgtattttaatagagatggggtttcaccttgttggtcaggctggtctcgaactcctgacctcaggtgattcaccccctcggcctcccaaagtgctgtgattataggcatgagccaccgtgcctggccaaccactctgtgtttaagaaaaacaaaaactgtggaaaagataggatggtggagatacattaggcttgatagagaactattgaaaatacctttaatatgacactcagggcttagaaccgcaattgtggccctgggaacgaagaggagggaattcaagagatgcagtagaattaacaggctttagtaacaggctacatatactggtaagggaggagctgtggtcaaggcaatctcatggcttcttgtttgggtgattgagaagataaattgagattgggaccacaaaaaagaattggtttggagtagagaagataatttattttgtctccagtgtgggattgagacaggttattatcctgatagagactatcagtaggcagcttgacaaaacaggtcaagaattctacagttagatgtagaaataaggattgtagacatagaagacagaggcctgggtatactggctaatactgaatgtggaatgaggaacctgaaaacaaagaaaagactcaggtgagcgcgtatgctttctctccctgtgatatttatttatttatttatttatttatttttaaatgatat

SEQ ID NO: 96839 - DNA, 21313 bp, Homo sapiens
  misc_feature (1)...(21313): n = A,T,C or G
nnnnnnnnnnnnnnnnnnnnnnnnnnnnnnnnnnnnnnnnnnnnnnnnnnnnnnnnnnnnnnnnnnnnnnnnnnnnnnnnnnnnnnnnnnnnnnnnnnnnnnnnnnnnnnnnnnnnnnnnnnnnnnnnnnnnnnnnnnnnnnnnnnnnnnnnnnnnnnnnnnnnnnnnnnnnnnnnnnnnnnnnnnnnnnnnnnnnnnnnnnnnnnnnnnnnnnnnnnnnnnnnnnnnnnnnnnnnnnnnnnnnnnnnnnnnnnnnnnnnnnnnnnnnnnnnnnnnnnnnnnnnnnnnnnnnnnnnnnnnnnnnnnnnnnnnnnnnnnnnnnnnnnnnnnnnnnnnnnnnnnnnnnnnnnnnnnnnnnnnnnnnnnnnnnnnnnnnnnnnnnnnnnnnnnnnnnnnnnnnnnnnnnnnnnnnnnnnnnnnnnnnnnnnnnnnnnnnnnnnnnnnnnnnnnnnnnnnnnnnnnnnnnnnnnnnnnnnnnnnnnnnnnnnnnnnnnnnnnnnnnnnnnnnnnnnnnnnnnnnnnnnnnnnnnnnnnnnnnnnnnnnnnnnnnnnnnnnnnnnnnnnnnnnnnnnnnnnnnnnnnnnnnnnnnnnnnnnnnnnnnnnnnnnnnnnnnnnnnnnnnnnnnnnnnnnnnnnnnnnnnnnnnnnnnnnnnnnnnnnnnnnnnnnnnnnnnnnnnnnnnnnnnnnnnnnnnnnnnnnnnnnnnnnnnnnnnnnnnnnnnnnnnnnnnnnnnnnnnnnnnnnnnnnnnnnnnnnnnnnnnnnnnnnnnnnnnnnnnnnnnnnnnnnnnnnnnnnnnnnnnnnnnnnnnnnnnnnnnnnnnnnnnnnnnnnnnnnnnnnnnnnnnnnnnnnnnnnnnnnnnnnnnnnnnnnnnnnnnnnnnnnnnnnnnnnnnnnnnnnnnnnnnnnnnnnnnnnnnnnnnnnnnnnnnnnnnnnnnnnnnnnnnnnnnnnnnnnnnnnnnnnnnnnnnnnnnnnnnnnnnnnnnnnnnnnnnnnnnnnnnnnnnnnnnnnnnnnnnnnnnnnnnnnnnnnnnnnnnnnnnnnnnnnnnnnnnnnnnnnnnnnnnnnnnnnnnnnnnnnnnnnnnnnnnnnnnnnnnnnnnnnnnnnnnnnnnnnnnnnnnnnnnnnnnnnnnnnnnnnnnnnnnnnnnnnnnnnnnnnnnnnnnnnnnnnnnnnnnnnnnnnnnnnnnnnnnnnnnnnnnnnnnnnnnnnnnnnnnnnnnnnnnnnnnnnnnnnnnnnnnnnnnnnnnnnnnnnnnnnnnnnnnnnnnnnnnnnnnnnnnnnnnnnnnnnnnnnnnnnnnnnnnnnnnnnnnnnnnnnnnnnnnnnnnnnnnnnnnnnnnnnnnnnnnnnnnnnnnnnnnnnnnnnnnnnnnnnnnnnnnnnnnnnnnnnnnnnnnnnnnnnnnnnnnnnnnnnnnnnnnnnnnnnnnnnnnnnnnnnnnnnnnnnnnnnnnnnnnnnnnnnnnnnnnnnnnnnnnnnnnnnnnnnnnnnnnnnnnnnnnnnnnnnnnnnnnnnnnnnnnnnnnnnnnnnnnnnnnnnnnnnnnnnnnnnnnnnnnnnnnnnnnnnnnnnnnnnnnnnnnnnnnnnnnnnnnnnnnnnnnnnnnnnnnnnnnnnnnnnnnnnnnnnnnnnnnnnnnnnnnnnnnnnnnnnnnnnnnnnnnnnnnnnnnnnnnnnnnnnnnnnnnnnnnnnnnnnnnnnnnnnnnnnnnnnnnnnnnnnnnnnnnnnnnnnnnnnnnnnnnnnnnnnnnnnnnnnnnnnnnnnnnnnnnnnnnnnnnnnnnnnnnnnnnnnnnnnnnnnnnnnnnnnnnnnnnnnnnnnnnnnnnnnnnnnnnnnnnnnnnnnnnnnnnnnnnnnnnnnnnnnnnnnnnnnnnnnnnnnnnnnnnnnnnnnnnnnnnnnnnnnnnnnnnnnnnnnnnnnnnnnnnnnnnnnnnnnnnnnnnnnnnnnnnnnnnnnnnnnnnnnnnnnnnnnnnnnnnnnnnnnnnnnnnnnnnnnnnnnnnnnnnnnnnnnnnnnnnnnnnnnnnnnnnnnnnnnnnnnnnnnnnnnnnnnnnnnnnnnnnnnnnnnnnnnnnnnnnnnnnnnnnnnnnnnnnnnnnnnnnnnnnnnnnnnnnnnnnnnnnnnnnnnnnnnnnnnnnnnnnnnnnnnnnnnnnnnnnnnnnnnnnnnnnnnnnnnnnnnnnnnnnnnnnnnnnnnnnnnnnnnnnnnnnnnnnnnnnnnnnnnnnnnnnnnnnnnnnnnnnnnnnnnnnnnnnnnnnnnnnnnnnnnnnnnnnnnnnnnnnnnnnnnnnnnnnnnnnnnnnnnnnnnnnnnnnnnnnnnnnnnnnnnnnnnnnnnnnnnnnnnnnnnnnnnnnnnnnnnnnnnnnnnnnnnnnnnnnnnnnnnnnnnnnnnnnnnnnnnnnnnnnnnnnnnnnnnnnnnnnnnnnnnnnnnnnnnnnnnnnnnnnnnnnnnnnnnnnnnnnnnnnnnnnnnnnnnnnnnnnnnnnnnnnnnnnnnnnnnnnnnnnnnnnnnnnnnnnnnnnnnnnnnnnnnnnnnnnnnnnnnnnnnnnnnnnnnnnnnnnnnnnnnnnnnnnnnnnnnnnnnnnnnnnnnnnnnnnnnnnnnnnnnnnnnnnnnnntggttggagctcctcaccgagccagtgtgggggctgagcatgagtgtcagatggtgccactttctcctttccagccagacgccttttcttttctttcctggcatgatggcaccggtgatgagagctccagtgctgggctgagagagcatggtgacacactcaccctggctgtgctcctctattggggaaagcggtcttctctcactgttgagtaagataccagctgtgggtatttttgtcaatgctccttactgagctgggggaacagagctcctctctgttccttctgagagttttggtcatgaatccatgttgaattttatcacgctttttttctgtgagattgtgtgattttttttcttaagcctgttagaattgtggattatattgacagatttaaaaataattgaaccagacttgtgtccccgggttaaccttctcttgtacgtggcatatgattcttttcatatattgcagaatttgctaacattttgttaaggatttttccatctatattcataagagatattggtctgattttcttttttggtacgatttttatctagttttggtatctgggtactgttaatccataaaatgaactagaaaatgttctctacttttctatttgctggaagagctgcatagaattggggtaaatgtttatttaaatgtgtggtaaaatttgccaaacaatctgggcttggagattcctttattaggagttttataattatatattacatttccttcatagttacggggtagtcacactgtctggttcatgctgggtaggttgtggtctgctgtgttttcttaggaattggtctatttcaactgggttgtcaaatatttccttattccttttttttttttttttttaaatagggtctcactctgtcacccaggctagagtgcagtgctgcaatcatagctcactgcagcctcaatctcctgggcttacgtgatcctcccacctcagcctccaaagtagctgagactacaggcaggtaccacctggctaattttaaaactttttttggtacaaaaagggtgtcattatgttgcccaggctggtctcaaactcctggactgaagtgatcctcccagagtgttgggatcataggcgtgagccactgtgcccagctgcccttgttcttttcacgtttatatcagagtgctgggatcacaggcgtgagcccccgtgtccagctgcccttgttcttttcatgtttatatctatggggttggtgtgtgtctccttccttcctgatacttgtgatttgtgtctttttttggtcatttttgctagaggttcacccatttacatatgtttaaagaaaccagctctttgactttctgtattgttcctctgctttgctttccatgatttctgtcattttttctttccttctgtcattttttctttccttctgtctgcttgcattgggttgattttgctcctctttcatagtttcttgaggtgggagctttgatgattgaattgattaggctagtgctggagctttttaatttttattttttgatccttgtttctggattaccagcttcttcaagtccaagcatgggatcgatgaagcaagaagaaaatccaaggccttcaccaccacatcatcctttgggtcctgaggtccctagccagcctgcttctctccaccctgcagggtcctaagttttctcatatagagttttatgccatgcttagtgagatgaatagagaaaaatacctctgctctatcttcccaggagcagaagacacatcccactgactttttttttttttaaacagagtcttgctctgttgcccaggctggagcgcagtggcgcgatctcggctcactgcaagctccgcctcccgggttcacgccattctcctgcctcagcctcccgagtagctgggactacaggcatcggccaccatgcccggctaattttttgtatttttagtagagacggggtttcaccgtgttagccaggatggtcttgatctcccgacttcgtgatccacctgcctcagcctcccaaagtgctgggattacaggcttgagccaccatacctggcacccattgacttttgacatcaagcattggcgtgatgcctggggctgacttccctcttgtcagggtctggctgtatttattccacctggatcatgtgccaatataaaattctgtgtcatcttttcctgaaacacannnnnnnnnnnnnnnnnnnnnnnnnnnnnnnnnnnnnnntccttctttcatgtcaggtgaattttcttgtgtgatagctttaagcagctctcccgttttacttttgaggttttccttcttagaggcacctcttctccctgtgcggacttatctttgtgtgtattccaaataattcattatcgttttttctgttgctttaccctatgtattaaaacatttttggccgggtgttgtggctcatgcctgtaatcctagcactttgggaggctgaggcaggtggattggtcaagcccaggagtttgagaccagcccaggcaacacagtgagacccaatctctccaaaaaaacatgagcccagcttggtggcgtgcacctgtggtcccagctacctgggaggctgaggcgggaggatcacctgagcccaggaggtcaagggtgcagggagctgagaacgtgccctacattccagcctgggtgacacagcaagacctggtgtcaaaaactaaaaaccatctcgaatcggcgcccccgccacaagcattttttctcgtcggcagctcagttttcagctgtgcttagtctggtttccgctcctctgggttttctcgtttcatcttggtgttttttgggtgttctttcgtttattcaacgctgtgatcggttgttttcatctcattcttcagttttgtcacctaaaccccgtggtcttctgttacaagtttgccagcttcgatcttctgaagtgagaggtgcctgcgcagtgctcttccattcctggggctgttttcttccggaatggctctctgtcttgtggcaacctctgcttcctctcttttctttccctttcttttctctctccctccgcccctccctttcttccttccttttctttttctttcttctttccttcctccctccctccctccttttcttacacatctgaagagctgctgtgttattttgtttcatttgaatatgtagcaagtccccatgtcttcactgggtcagaaccagtaaaatttccctgttcccttcgcggctcctgacctccctctgagccacggtcggagtcggtgggagggagggagggagggctgcggtcagctgagccctggcgtcgactttgctgctgagacaggacctcttgcttcctgcagcccccaaagccagacagagagaagcgtgagcactgcccaggaggccgctttcatttctgtggggacatcgggaccacccaccggacacccccaggaaggccacgttctgaggttagaaagggaaaaaatcagatctcactgaactatgcccgttaagggggaaatgatcccagttttgaaatccatcttcaaagccctgtaagcgtggcccggcgacgttgtgctctgatggggagcgtgtgcagggcacaggccgggcagccagcacttcgccgcccaggaaataccagccggtcaacttgggttagtgcagataagccatttaatttaattttaaaatgactgtggggcacaggaaagaacaagaagaaaccacaaacaaggctcccatcttctttgtccccgagcaggtaactgtgcaacttatcaagattgtcagtttaattaactttggcctccagaggaggccattcttatctacaggacaagcaccgcggctgtaccagcctctgagttccgactcgggtcctgcaggtgtgrcttcctggcgcacgcgggctctctgagctcagggaggctccgagcctgcctccaggacgcagcctttgtcactctgtcttactccacctccatctcagacccccgagctaccgggccaggctgccttctgcatccgtggagccccagtgcccgtgagggtgtccaggcctcaccctgtggggccgtgcatgaatccaggcatggaggaagtgtagcygggcttctctaagctgagacaagtaaagatgaagaggcccccaggtacccaattcctataggtgtgaggccagggcaccagacaaaggcgtgagctgcaagtatgggcgtctcctatggaaaaagtggctcacaccagagcctgggccccggagggaggagccacgcgcctgggagaccacacagccgggagcaggaccagtgtggcccggggacactccccaagccgggactcggcgacaggcccgggggcctcaggatgtcgacrggcctcgtgttgccctcgctgcggccgtcctggctgtcctggcctatgtcgggcttgagtggggtggcaggttccgagatgaggaggaaccgcactgagaagcctcctctgcatccgaacccgccaccggtcacaggaacacggactctgattggtgggtttatttttttgagctgcccatcatgagccgccctctgctgagctttgatctcgatgccttaatcagatggggctctggtggtctagggaggggagaatgcggttttatgagaggggaagggactcgctggggcagagggcgggctgccggattcaccaaacccggggcccgggcaattctccctgtgtccatgcactggtgggactgtgactgggcggcacctcccctcccgggatgggtctgtgtccctaggccctgggtctcggtggcctttgatttgccgtggttggtagaacatggtggaaggggtgtggggccttgcaacgcctctccactgggctgtggctctcccacgcccaccgcagaaggaaccggcctgacctacaggaaggtgagggtggtgtgcggaatttctccacaggagccctggaacgtgaggacgtgcgccgtcctcagtttaactcaaaaggggggtcatcggggtggcctcgcctgctcactagcccctcagagccaggagaactggccatgctgtttccggttggaagatgggaagggcccttgagaggaagatgccggcagccttcaggagccgagaggggacccggctgacaacctgcaagggaggccgggacctcagccctgccgctgcaggcccccagagctgccaggcccccccgcgagcctgcaggcgggttcttccccagagcctgcagaacggcacctgccctgctggcacctggactccaggctgtgagccctgagtggcaaatccacccacaccgtggctgagtcctggccatggaagctgccaggggatgaactggcgttgctctgaaccgctagatacggggctcatcagaaacagaaaactgaggcaggaggccgtgcggaggacagcccaggccgcagcgacggccagccccacccgccagctgccaggagccgtctgctgcccggcctggccagccctgctggtgaccatggcggcccatgagccagcccagggagcccccatggacccagagaattgtgaggaccaggagcccagcgctgctttaacctgctgcgtttcgggtggtttagttcccgtgttgtgcgtggacgcatcgtggcacgggggattctgcccagcaactgctctgtgttctgagacactaaaggccagtgcagcgttagagtcaggctggaggtgggggcaggggtgaggaagaggggacgagaagttgggggagggagaggagcaggagcaggagggagggtggggctgctctctgggcagccaggctcaatacacagagaagcttccctcagtggctaaaccgggccaggagatgctggttccggggaatgagcccactgctctgccctcttcccgtcccggctccgccacctccccagctctgtcctgatttcacacaaacccatcattccatttcactccagagatgaaatcggttctgcagctcaccctatccccatcttgagcaccgcctgagggcgcaggtggggtccctccctgcccagcgggggatggggtgggsgtgggggggcgcgcacctggagctgcgcttccctctggcggcctccctgcccggtgaggggctgtgcctccggggtctgtctcccggcatttttcatattccacggggttctgtcatcctgactgtgaagggcacacggagccgggtcctggcccatttgaccggctcggctcacccctgcgctgcctgttcgcctgtgtccgtctgtccgtccatctgtctgctggccacagctcttccaccctcggggaggtgttcttccccctctgctgagcctgcatgaagacgcgtgcgctcaggccggcgtctgcagtgtagacacagctccctaggctcacttgtggtgtggacgctgtgctgtgccggtgttgcgctgtgtccggtgcaggcgccgtcctctggcttctccgtggtgtgtgcagcgtcacacgctgtcccggcggggctcggagggaannnnnnnnnnnnnnnnnnnnnnnnnnnnnnnnnnnnnnnnnnnnnnnnnnnnnnnnnnnnnnnnnnnnnnnnnnnnnnnnnnnnnnnnnnnnnnnnnnnnnnctgtcccggcggggctcggagggaaccgcccggcgtagtgtgaggggcggggccgctcctgcggagtccacggagctcggccggccgcgggggcctcttcgccgagggagtcggggcggggcccgtccttccggggacggagcacggaggagacgcagcgacggaggagtcgagggcggggcctggggcggcccttcgcccttttaagtcactgcgcgcgggtcccaggcggcgcccgtctcgggggcaggtccgcggggtgtgacgaatgttcccgcggcgtctccccgccctccccggcgcctcccccggcctcgggcagccgctttctgcacggcacctccgaagccgctgggcgtctgtaaccaacctgcacgttgtgcgcatgtgccccagaaattaaagtagaataaacaacaacaaaaccaaaagacctttttactttgacgcagttttagattcccaggacgttgcacagaaaatccggacggatcctgtgccctccgcccagctcccggggtcacaggcagcctcggctccgaccccgccgggcgcgcggtgaccggctgtgcgggttccaggggcggatgtgcgctttgcccggcccctctcccgccgcgcggccgctcctcctctccgccaagggccggttcaggcacaggccccgccgaggctgcccctgacttgagggctcacgcaccgggctgcttgcggctctggactattgtgaataaggccggtgtgagtattttactgtaagtctttggggacgtgtcttcatgccccttgggtgaatccaggtgtgagattgccgggccggggtgctgtgagttacctttggttatagggaggtggtgacccatggtggctccaagtgcccgtggcctttcgtgaccccgccagcagcgggtgggcctttggggcgctccgaggctcgcccgtgctgcccgtgggtgcttcagccagtccggccgccgtggctttcctctgcagcccccggtgcctgctggcgtcgtgcctttccgtgtgctcgttggccacgcacatgtcgaggggccgttctgacgatggactgaggggctcggggatagcacgtgtccagcggggcaggtcagcctttctcttctccccacagacctcagcacagctctgcacctcggaggactcggggaagtttctgggcctatttgggcaataggagaaggtcatgggctgtctttccaaaattcacgtccacccagaacccccgaatgagacctatttaaagagaaggccttagctgatggaacattaagatgaggccaccctggagcagggtgggccctgaatccgaggctgctgtccctgcaaggtgacgagagggtgcaggcgtggaggagacacatgggggtggggtgaggaacaggccaccggcagcagagacgggtcaggcccagcgagggaggaggtgggaggagccccggagccctcggaggaagccgggctggcacctgggcsttggactctgggactgtgagggaatcaattctgccatctgaagccacctgctgtggtcctgtgttacagcagcgctgggcacaaacatgggagggcctcgtgattgggactggggcattcacaggcccggcaggctggtgagccggtgcctggcaggtggggaggacatggtgtgagaggcggcctgcgggccggccagtgagctccagcacggggactggtcaccagccagtgnnnnnnnnnnnnnnnnnnnnnnnnnnnnnnnnnnnnnnnnnnnnnnnnnnnnnnnnnnnnnnnnnnnnnnnnnnnnnnnnnnnnnnnnnnnnnnnnnnnnnnnnnnnnnnnnnnnnnnnnnnnnnnnnnnnnnnnnnnnnnnnnnnnnnnnnnnnnnnnnnnnnnnnnnnnnnnnnnnnnnnnnnnnnnnnnnnnnnnnnnnnnnnnnnnnnnnnnnnnnnnnnnnnnnnnnnnnnnnnnnnnnnnnnnnnnnnnnnnnnnnnnnnnnnnnnnnnnnnnnnnnnnnnnnnnnnnnnnnnnnnnnnnnnnnnnnnnnnnnnnnnnnnnnnnnnnnnnnnnnnnnnnnnnnnnnnnnnnnnnnnnnnnnnnnnnnnnnnnnnnnnnnnnnnnnnnnnnnnnnnnnnnnnnnnnnnnnnnnnnnnnnnnnnnnnnnnnnnnnnnnnnnnnnnnnnnnnnnnnnnnnnnnnnnnnnnnnnnnnnnnnnnnnnnnnnnnnnnnnnnnnnnnnnnnnnnnnnnnnnnnnnnnnnnnnnnnnnnnnnnnnnnnnnnnnnnnnnnnnnnnnnnnnnnnnnnnnnnnnnnnnnnnnnnnnnnnnnnnnnnnnnnnnnnnnnnnnnnnnnnnnnnnnnnnnnnnnnnnnnnnnnnnnnnnnnnnnnnnnnnnnnnnnnnnnnnnnnnnnnnnnnnnnnnnnnnnnnnnnnnnnnnnnnnnnnnnnnnnnnnnnnnnnnnnnnnnnnnnnnnnnnnnnnnnnnnnnnnnnnnnnnnnnnnnnnnnnnnnnnnnnnnnnnnnnnnnnnnnnnnnnnnnnnnnnnnnnnnnnnnnnnnnnnnnnnnnnnnnnnnnnnnnnnnnnnnnnnnnnnnnnnnnnnnnnnnnnnnnnnnnnnnnnnnnnnnnnnnnnnnnnnnnnnnnnnnnnnnnnnnnnnnnnnnnnnnnnnnnnnnnnnnnnnnnnnnnnnnnnnnnnnnnnnnnnnnnnnnnnnnnnnnnnnnnnnnnnnnnnnnnnnnnnnnnnnnnnnnnnnnnnnnnnnnnnnnnnnnnnnnnnnnnnnnnnnnnnnnnnnnnnnnnnnnnnnnnnnnnnnnnnnnnnnnnnnnnnnnnngagtgctcagtactacttaaggtatttgaagaattaaatgggattaaaatttcagccgtatataaacatcttcctccctccctcgtcctcctcctgtgtcctccctcgtcctcctcctgtgtcctccctcatcctcctcctgtgtcctccctcatcctcctctgtcctccctcctcctcctcctctaaggagaagagaatggttggcagcagttttcccgagtacctgggacaggagctggcgtttctgtagacctttgctctgaaaggaatctcttgtgcgtcctgtcttagtcacatctgttggactgggggcgtgctctgcgtctcggtcgcgtccgtcggactggggaggtgctctgcgtgtctcggtcgcgtccgtcggactggggaggtgctctgcgtgtctcggtcgcgtccgtcggactggggaggtgctctgcgtgtctcggtcgcgtccgtcggactggggaggtgctctgcgtctgggggttttgggagagcaagttgggggtgtgctggccagtgtctgacaataggctgttggaagcgcagccgtggcgtgtagcattgccaatcatagtgtctgtatctctgtctgtctctccaccacggaccgttccaggcgaccaacacgcagtctccaagcttggagttgcctgctgtaggccccccaccgactgccggaaccccagctcccagsccttccagcctgtgggtgttggtaggcggtttcggcagttgtgagcctggtcaaagcctcagctcttccctcacttgggcaatcggtcctccatattaaatcccttttgtttgactggttggatcccacctgatacaattggggtggccccaaccaaggacctatggttacaaaacaggacacrgaagtccatgaggaggagtgattgtgccttacaggaagggacgtatccacatgtgtcaaagggtttaggggatcacggtggcttcagcacagcccacggacggcacagcctacagatggcacagcccacggactgcactgcacgttttcctgagcccagggactgtgctggggtcagggcaaatgcatgtctccatccgtttggcattttgctattcatataaaggaacatctgagacagggtaattcgtgaagaaaaggggtgtaagtggctcacgggcctgcaggctctacaggaagcctggcaccaacatctgcttccgggaaggcctcagggagcttcttctcagagcagaggggaygtggtgagggagggagcagggagggcagtgccaggacccttctaacaaccagctccctcaggaactactagagtggatgttagttaccatgaggacagtgctggactgttcatgagggatccacccgtgacscaaacacgtcccagcaggcaccacctccatgttggttaaatttctacctgaaatttggaggggacaaacatccaatctacatcagcatgtcactgtgacttaaacagtatggttggttcccatgtggggcacccctctgaggcaggcgtgagagtctaggccagcaaggacatcctggtggccacggccgagtgttggccatgcagccgtgcagggaccatcttcaacagcgacaccgtgtggcagcagatgcaaaggcagcagcggacgttgggacatctccagctctgccccacccatgcaagggtggggagctctttggattacatgatctctaggattcgtgggtactttctccagaacaggggcagttctcaagaggcgtgtggccacttaggcaggtaaggacagaggggaatagtcagggaaataaggacacttggaggtgtatttggtgaagcagagtgtttggcaagtcaargtcatgcctgttgaagagtctcctgtccggacagcgtggacagcacctcacctccgctgccctgcagggatctgccatcccaggtgctcccctygggactcctcctggtgccagggaggaggggctgggccaggtgaggyggagcagccataggcttccctcagtgggagggaacactcacctccctgaagggtgggagttctactgaggattcgagagtaattttccaggtgtcaggttttctgtgggatcytgtgtgggctatgaaccagccagctttgacttgcctgtcaatttgcctaatgaattggtgtrtgagcgagccgagtttgcacctgccatcctcttggtctaaactacaggcactgcacgttgcaagataagggacgttgcacatccttcacctgggaaacttctggactcctaacttcacctgggaaacttctggactcctgtgagtctggctgggggtggggggggtccctggcaagccactcacttttggggcctcactcactgcccgtgttttgcctccatgatcttagaattttggcaagatctggactagacagagggctgaggcttgggctggggttgggagaattctctgctgagaacagagaaactgggacccctcagggcttcttacaggaacaggaagcaacgactggggagtcccagaggaaggcgttgagcagaggggccgtgtggtgggtgggcaccccagcaggcagggtgctgggggaggaacatgagcccctgcgggctttggaaagagcagtgaagtacagccccattgcctctgcccagggctagcggaaagtgaagtgttcccagccccattgcctctgcccagggctagcggaaagtgaagtgttcccagccccattgcctctgcccagggctagcggacagtgacgtgtccccgcaggctgaactccgactggtgacaacgggtcagcgtcctcactccctggagactcggagcctggacttgccaaatttggcacctgcccatttttttttttttttctttgagatggagtatcactctgttgcccaggctggagtgctgtggctcgatctcggctcactgcaacctccacctcccaggttcaagctatattctgcctcagcctgctgagtagctgggattacaggtgcctgccaccatgcccagctaatttttgtatttttagtagagatgggatttcaccttagccaggatggtctcaatctcctgacctcagatgatccacccacctcagcctcccaaagtgctgggattataggcgtgaaccaccgtgcctggccttttaaaaaaaaaattttagattcatgggtacatgtgtgggtttgttatgtgggtatatagcttgatgctgaggttttggcttctaacgatcccatcacccagggagtgaacgcagctcccaacaggtggttttccagccctcgtcctcgtcctcctccccctcccacctgcccctctggagtccctggcgtctgctattccctctctgcgtcatgtgcatgcagcattcagctcccatggataagtgagaacacgtggttttggttttctgttcgggttgagttctcaggctgacggcctccagctgcatgtgtggctgcaggggacgtgctctcctccattttcccggctgcatcgagttcatggtctgtctgcacacgtgaggccacctgccaggccacatcccagcacaggcgtcatccagtgatttcctcatcggccagagtctgcgtctgcagctttgtgagccacgcggccatggcctgactctgtgccgagagccccgcagcggtggccacagacaatagtaagcaactgggtgtggctgggcgccaataaaactgtatttattaaaacaggcaaggggctgggctgcggcagggcccaggtgcctgggaaagaggtgggaccgggccccaacccccagctcggctcccaggaagacacacacagtgctgctgcctaatcctctctttatttggtctctgctgaagcagtcgtgccagcctcctagacacggcctcaggtttgtcgctgtccatgtcctccagcacccctcttaccagaccacaaggagctgcattatgatgtgtgacttaggtcttggttggagggctgagcggccgcaagtgctgggggaggctgcttggagcatgggaggcctgcgggtggaagacaccagggtgcagcctggtgcatggtccggggcttggcctccctatggggcgtggggggctgtggtacatgcagaggcggcggctgtcccagcagcctggccaggagataccgtggagaaggcacgtgtttgagttggcatcactgtccccagacgccctccctcgggtagagccgcctgtcctaggagaagctgtactccagatgcagtgggtgacaccctggtcactcagccacaccccggcccctcagcctctgctgtcctggccgcacatagagccctgtcctgctgtgtctgccgggcacaccccggtcactcagccacactggctcggcccagcgccttcccgaggtctgtgggggtccgggcggaggtggggtcagtgccgtgcgtgtttgatccagtttctgatcatccacttctgccccgagcacctctgtaccaccagccggagcccaaagttggcatctttggacatctccacctccaggcagcggcccgtggcccggctcacaatggggccactctgtggggacaggcacatcaagtcagccaggtgcaggcgtccttgttccccctccccccacctcagggaggctgcttcgtgctctcagccctcgtgctcattcttggggcagcttgaatggaaagccagcatcacagcagcacccaggggggccgggaaggggctgacttcagtggagcttcgaggatttcccatctttcctgcagggctagcggcccaggttggaatcatacctcatccccttcctaaatcctccctctaccctgggcacctgaggctggaagaggcagatgcagggctatgatcagactgtccagcccgacccctctctggctgtgtgaccctgaccagtcacctgccctctctgtgagcgtcggggcccataagggagcagctgatccaaggccccgtcccctgaccaccccctgccgcactccagctcccacccaatgggctggctctagtggcagaggcacccaggggtcccagcagccctgccccgccccaaccccacggccccccttccccagaggctgacctgggtgaagtcccacagnnnnnnnnnnnnnnnnnnnnnnnnnnnnnnnnnnnnnnnnnnnnnnnnnnnnnnnnnnnnnnnnnnnnnngcaagaaggctgtggagcccagaggccccagctgcagcaggccgtcagcgctgtaccgcaccagctggggacaggaccaccgggactgtgtgtgagcagcgcccaggctctccccagtgagcactgacaggccgtgcgagctgccttgagctgcaaacggggccctgcgcggctgccttggagcctcccaccccggggacgctgttgcgggcgggagaggaccgccgggcagggcccacgtggggatgcgggctggacggcacccaaatgctccgcagggccaggctcccggcttgcacagctggctggtcttccgcctggacagacgtcatgaatgtggctcagacccagagcgcggccccactcgtttcggggaggacaggagttgggtttaatttgggcaacatgcagtgccgtgtgtgagcggaacacgcattcccgtggggttagaaacgtccagctccttatgggggtcatggtcagaatggcctggaccttcactacggccagcccctgaccactgtgattctgcggggctggggctggggctggggctggggctggggctgggcctgggcctgggctgcaggtgagtcctgcccaggtggggagtgctcggaggtcaacagcactattgccgtgttaatccaccccagagccaatgcttcccacacttccgcttcaatcacgcgacagtcctgagcggtaagtgctgttgccgtctcccttgactgaggggggagtgatgcacccccagcccatctgaccccaaaggcctggttcctttttaattttttgagatacggtctcgctctgttgcccaggatggagtgcactggtgtgatctcagctcaacctccgcatcccaggctcaggtgatcctcctgcctcagcctcccgagcagctgggaatacgggcatgccccaccatgcccggctaatttttgtattttttgtagcgacagggtttcgccacgctgcccagactggtctcaattcctgggcttaagtgatctgtctgccttggcctcccatcgtgctgagatgacaggcgtgagccactgcacccggcccaggctgttttcaattccccgtgttctgctaccttccaggtggggcgggctgggaggcctcttctagaggggccctcaggctgctccaagccctggaatgcagccctggtggcctcagaacaccccagcaggctggccccgtgcctctgccccagggtgtagggtccgggtggcctggggtcgtccccttgggaactgcatgggtggccgctgctactcctacctgggaggacatcccgtggcaggggtagaggatcgcccggtcgccgtcctccgctccctggtccagacagtaggcactggctttgctgtttctcacctgcaagcagaagccccaggagaaagtccagagtcacccgagggtgcagccccagggagcttcacgcagccagctctgcagccagcacctaaggaggtgcccgcgggaggaggagggggcgtgtgggatgctctggccgggtgggccgcctgggaaggggtggctgaccgagtttgtcactgatggagacatggaagtgtccgccatgcacagatggagacttggccatcactccataggggaacacttgagcagcagggacgacagccccaggctgtggagtggcttccctgccttgccgcctgctccctgtgcccttgcggctcccactgagtgggtagagaccgctcgccagccttgcagtctaggctggccttggcttggacccttgggagaccttccagcttccactctgtcttggaaggaaccctgacagccctctgagaacaagcccgggccagactgctgggggatgtgttgtcatcgggcagccaacctccagcctccagaacaggcccatcggagatcagcacagcctggatcaggccagcagcactgcctgggtggccccggctcgtgagcaagtgtagatgcttattgcttttgtccaccgcgtctccaggctgctgggtttgcagcagcagctgacccatccaccacggccaccacgagaggtcacacaggtttgaattgggaccgttgaggaagcccagcagagtctggatgttacggctgctctgggttgggggtgcctgcacttggctaattgaggatggagtgggcagagtagaagcacagggaggctgggggagaggggcggcgccccgatgcacactcagcactgcctgggaaacctctgtgcccaagggactggagtcagcgcagggtggaccaggagctgcaggaggggaggctcagcgaggaccatccaccccagggacccttttccgtgccccatccgagtgccagctcagggctgggacgctcgagtctcatggtgggaggcgccccatcccctgcacagactggggagagggcagaagagcagcaccttctcgctggctttacggagtgctgtgcatgtgggggccagtggagacgggggtctctgtgtagctgatgggcctgtgtgagtgtgcatatcacccattgtgtgcatctgtgggggcaccttcatgcatgcacgctggtgtatgaacgtggctccgcatatgtggatgcacagacgtgtacacacacacattattttgcttgataacaagggcctgtgtgtttatctgtgcacaggcaggcccctttggggttcatgcacttagtgaaacatacatctgtgtaggaagagctgtgtacattagcaaaactgggtgcaaatgtatactcgtgtccgcgtgctcttgtacatatgagtgtttgcatggatttacgcacctgcctgtgaatgtctctgtacacacatctaggtgagtgcatgtatccctatgtacacatacgtgagagcgtaggtacattgaatcaggcaatgtgaacacgcatggatgtgactacacacctgcctgcctctagggaggtccatgtgaaggaatgggtgtgtatggacatgtgggtctgcaggtgcgtgtgtttatgtgaacctgcaccttgtgtgtgcacgtggatgtgcctgcatcaccgtgaatgcacacgtgtgtgcaggagtcagggcggaaggcctgtcgggccgagtgggaccctctgggggaggcgctacctctctgtgtgcatgtggatgtgcctgcatcaccctgaatgcatacgtgtgcaggagtcagggcagaaagcctgtcgggccgaacggggccctcgggggaggtgctacctctccgtacgtgagggtgttgttgtagaccctcatctccgggtacacgttctccaggtaccacttgaagctgcgacacttcagcctctgacgcagggccagcctctcagacacgtccccgaagtccacccctgggttctgcaaggccagaagtaggcgagagggtacgtgggtgtcaccatgacctgggtcttccccataatgaggttgggggtctccagggaccaagtcccctcacaggagcagcctcccccccagtattcagatgctgaggccccatccggccccatccaggtgggaccccccccagcctcctaatatccacagagggtctgaggcagctgctcctgatgggaaggaccctgccagaggccagccccggcctggacagacggcccctgctgcagccggctcgtccacacccacccgggcccaggaacctcctgcctgagaagacggccctgctcacctggccttactgcacggcatcagcctgacctctggagggtggagactgaggtcagccatatccacgagaccagcctggtgaggaccctggatactgaggcttgggggctcctggctggccccgcctggcacgtgttgtcacgcatgggtgccggagaatcaagtccttgggaccccccgcggggggacacctgagagcttgtacctggcctttcctggtccctgcccaggcgtctcttccctctgctgactttgacccgtgtcctct

SEQ ID NO: 96840 - DNA, 12664 bp, Homo sapiens
atcactcaccgttctccaccttggtgcggagctttccttgtttgggattctcgaagacagggtagtggcgggattctgtgctttccatagcacggtcgctgcaggacttgtcaaagagggcgccatctccacacggagcagtgctgaaaaacaggggtggctgttaaaactcacctgtgggaaatctgcaatttcgtggggctccaaaacagtcagatgtgacagaagcaagggatgttttctaaggcctaccatgggagactggaggtggacagcagtacatgtgagtcatctacacctgaatatggacctcaaacccacagtggagtgtggcttattgtatcaggttcgatttacaggccaggagagcatttggatacccaattctaacagcctggcagggcccaccctggcagcaacaggaactgtacagacctgatatacagatggaatgacacagtcttttttatttggagcttttctcctcccttagcaggttcaaatatactatccttcgcagtctgggagttgtatttcattaactcactgtagagaaacctacaaaaagaaagtctggttaggaaggcaggttcaattctgggaaaagcagttgtttctataatctgacctccaaatgagaaagtaaggaaaagtctcaatgttgcagacctttcacagtttatcaggtggaaattctccaggggagacctcagcatttcataaagcatagttagccttttgggtctccttcatttctgctgagggctcctcgctatggcggctacagggattctagagcagagcaaactgattcaaggactacaggaagctgttgctcctttctaagtctctcccttcataaattaaagaaaaggtgagctagaggagaaagctggcaggggcatcaaggttgtgtaggtcctcaaacggaaatggaaagctgcctcatcctcaaggccctgaggactaaaaggtcattttgtgtttttagaaaagaacatgaagcagcagagttagcagaaaaaaggacagcatttaaaaacaggccgagcagtgggaggcagctcaggtcacagaggggatggattccatcagacaggttcaaatggacgggtgaaaagcaaaggctgccactgccacatcatgacccgtctgtctgagggggattcagaggccgtgtcagagccatgtggggcagggaactggagctctccacagccgggcagccgggccacagctctgacctcgctcacctgatgaagcctctccgggagattatttctgcatggcagtcattgacagtttctccttttaggctgagagaatctcctttcacacagcgattccctaggaaggtgtttaaaacagaaatagaataatggaaggaaaccgatggaaaacaggatgaaggctatttgttctgaaagcttcaaggcagaaacagcctcagtttctcagatcctagactcccatattctctcctctaggaactaagaactcattcctcactctgaattgactgtagctaaaatgaagtctcttctccctgccttggacttacatgcatggactccaggggaggatgagaggcacccgctttcaggcgccatgggaggcggcatgtctcagagcctcactcacctgttcccaagctgacgacgacacccatgtcctcagagtcttttttcataatgatggcggccagaatcttgcggccgagcaaggagggctggaagctgttagtcagagtgttgaagcaccggtggctcagcatggctatctggtcatggaaggtgctgccagtgagagggagctgtggggaaaagaggctgtgtcagcaccacaaagctgaggctgtgtccaccatattcaccgtgggcagggagatcaagctctacttgtcgtgtgagtcatcttttccttcttacatctagtgtcccagttactgctctctcgaggctaagagtaaagcctaggaataactcgcatgacagcaagagccacctccacttaggagttaggaggaccccccccccccaaaaaaggcaccaaaagtagacgtcttaactgtctttggctgtgcttctggggaccttgagaggaggagcatagttcttctgagactggcccctgtcactggggttacctctgtgaaacccatgcgttctgccttctcgttctccccaatcaagacacggagagccgcatctgctgcttcctgcttgccttgcttcttgctgtgtgcgcagacggctgggaaccagcgacccccaacttttgcttggtaaacgaacctttgggatgagaaacagagaatgaagacaagtgccagaccctgacattgttccaaggaagggttagttttgctgaagatgtggccagtcttgcaaacatatggacccgtcaaacagaagctgtttctaaggcagcatttcctagattttggtcattcatgaatcaccacatgatttgtgccacatccaggtattacttggactattaattaatatttttctctaaattgacttcttagagccagccattgtggctcacacctgtaatcccagcaacttgaggagctaaggtgggagatcacttgaggccaggagttcaagaccagcctgggcaacatagtaatcccccaggcaacatagcgagacccctgtctcttaaaaaaaaaaaaaaaaatttagctgggcacggtggtctgtgcctatagtctcagctacttgggaggctggggtgagaggatcacttgagccctggaggtcaaggctgcagtgagctatgaccatatcactgcactccagcctgcgcgagacagcaagatccccatctctaaaataaacaaacagactctaaaaatgtaaatatccgtaatactaggtatgaaaaaagagataaaaatgtaaacacactgaaataggaaactttgtttcactactgtaaatggaaaaccagtatcacttgccacatattgaaggtggctgtaaaacagaatatgataaaatcatgttataaaattctgactagatactgttacctgcaaaggctctgagcctgtccttactataaaggaagattatgaagtatgaggaaggcttaacgaaatgctagcaccaacttggactctcttcttaagcagaaatcagaagggactacctttctccccacaagtcactgttacttcatacactgtctgatttttaaagcgcccaactccattccctcatttacttcctattagctcaaggggacttgacctggagaggtcattaggtcaaggtcggccttaggccagggacccaggttttgctgggagttgtttttttgactcctggcaggcttaagctaactctggggtaaggaatggatcttgggcgcatgagctgcgctgacaataaagtgcccaagtggagcagggaggtggcttctaccgctccggctggtaatttccaaacacagagggaagagcatggtggagcaaaacagcttggaaatgtaccagacaaggcatcaagaatcctagctttcaaccagatcctaatctactggctgagaacccagctttggatactctaactgcatataacagaggcttcagtttcaagacttagcagctcaggcagtaaaaggaatcaacgtttatgttcaaccacatggagtttctcactgttccttgatgatccgaagcaactaaatgccttcactcttttctttgtccatgctggcaggcccgtgcaggccagtgggcttaagttcagaatgagagggacagtggcatgaaaagaagatggtgaaggcggtcaggagggacagattgtgtagtatctttacctcagggatccaggagaatttcatgactgccccatgtgtttgaaaagaatatgaactcttacgtgcaaagttttatactgatatatttacatatatgataaagtttgttaattatgcaactagaatcctttagagctgtgctatccaatatggtagccactagccaaatggggctattgccataagtgcctcctctcagcctctttgccagctctgcgcttctcccaccacaggatttaacagtgtccttcgcctagaaccctcagtctttctctcttcatcatccttaaagtctcagctcaggcagtacttcttggggaagcccttccccctctccttcctaagtcaaactgtgctataattgattctcgctgcaactccagccctttggaatacttatcaaatatgagatcttacatttctttaggtgactattggttaatgtttggttcctgttctaaaaaaaatagaagatactccataaataagtgttgagtaaataaagtagaaagatcagttaggaggctattgtgacagtctagatgagacagtggcttggattagagtgctgacgctggaggtggaaagaagaggaagggatttgggatagaaattctaagtataaccaataggacttaaggatgagttgacgaaggaggtaaaggagatagaggaaaagatgatcctcaggtttctgacttgagccactgggtagacagtggtatcacttactaagctgggaaagacttgggggaaatgaagcgaagggggcaaaacccaagagttctgctttggacatgtcatattagggatgttaatccaaacagaggtgacaagtaagcaactagatggaggaatcgggagctctgagtggtctccagcatttagatattaaaagtcatggctgtcgcggtggttcatgcctgtaatcccagcactttgggaggctgaggcgggtggatcatctgaggtcaggagttgaagaccagcctggccaacatggtgaaactctgtctctactaaaaatacaaaaatagtcagatgtggtggcagatgcctgtaatcccagctactcgaggagctgaggcaagagaattgtttgaacccaggaggcggaggttgcagtgagctgagactgcgccactgcactccagcctgggtgacagagtgagactccatctccaaaaaaaaaaaaaaaaaaaacagaaaagaagtcataaaattagttaacgtcaccagccacagtagacagaaaggaaaaaaagacccagcataattcacattaagaagcaactaaagtatattattgtacgagatagttaataaacgtagttactcaattagcatttcccctctctatgcaaccttcctcagctccctggcagacagtggcagcagtgtcctctgtgtccccacagcactctgcattcacctccaatggcacatttcaatactgctatggctatatgtctgctacacactcaggggcagcaattttttgtatcttccatctagttcatagtaagttcttacattctcaatgaatggctgacttgaagtcctagaaaggatttcacagaagatttcacagaagagaaagaggaaatgcactgaacctatcatctgaaggactgtgcttaaagataaggaggtgcttattgagatgaaggatatgaattagtagaagagcagctggagggagactgggcctctccttttccagatggcttaaacagtgggcagatgtgtgttctaaattgggtcatgttgggcaaagggctacttttaaaaattatgttaaaagttcttacatatccatgagagtaacaatctgaaagaaaactggaaaaggacaagaacaggtggttcacagaaaaggaaatgcaaataacacataaatatgaataaatgaaatgccattacttctgatttttttgtttttttttttgagacggagtctcactccatcacccaggctggagtgcagtggcacaatctcaggtcactgcaacttccgcctcctgggttcaagtaattctcctgctcagcctccggagtagctggcatacaggggcataccaccatgctcagctattttttgtatttttagtagagatggggttttaccatgttggccaggctggtctcaaattactgagctcaaatgatccacccacctcggcctcccaaagtgctgggattataggcgtaagccactgcgcccggctgacattacttctattaaggagagacaaatttaaagtaacaagatagcatttttataagcttttttccttaatgactttaaaatggacaagttggatgccaaacatgtgaaaattcaaacagttaagagtgtacaataaaagtgtccctccttccccagaagcaaacacagttgccagttttttcgatccttcaagaaaatattctagacatatacagacaatcttcacctctcccctcactttacaccttgcttttccactttgtgatagaccttagagattaagaaaacatgcckgttgcatggcaagagtgatgccatcttgatgcaaaaccactatgaccaccaatatctgactcccgcatcccaaagtgttgggtagcataaataattccacacaaagatgtctaccaagcctccccaccagctagtgctcataagtttcacaagaaagtataatgtgtgaccagctgcatgtttaaccaaaaaagcctctatagaaagcatactttctggagggtaagtgcagggatccaccatcttgcagccacccaagacatcatttctgttcctaagtccctattaaatgtttacttctgagaaactgaatttgtcagcttctattcaatgaaatactatgcagctatgcaagaagtctggtaagtaaaggagtcaacgtataaaacagaagatatatttgtttaaaaagacaaaagggaaaatgtgctagttatgcacagcaatttctagaaggactcaagaaactggtatagtcatgtactgcataacagtgttttgttcaatgataaatcacacatatgacaggggccccgtaagattatgatggagctgaaaaattcttatcaccaagtgcagggctctgtaacctgttaggaacctgggcacacaggaagaggtgagtggcgagcaagaaagcattctggtccgagctccgcctcctgtgggatcagcagcagcatgagattcttgtaggagtgtgaactcgactgtgaactgtgaatgcgagggatctaggctacacactccttatgtgtttactatatttttatcattatttcagcgtatactccttctacttctagaaaaataagtaactaaaaaaagcctcaggcaggtattccagaaagcactgttaccataggagatgacggcccccatgcatgttattgcccctgaacaccttacagtgggacaagacgtggaggtggaagacagtgatactgaggatcctgaccctgtgtaggcctaggctaacagctaatgtattttcatcttagctttcaacaaaaaagtttaaaaagttaaaaaaataaaaaaatttacaaacagaaaaaagactatagaattaaggatataaacaaaggaaatatttttggatagcagtacaacatgtttgtgttttaagctaagtattattacaaaaggaacaaaaaataaaaaagttaataaagtaaaaaataaagtaaaaataaagtaaaaaagttacagtaagctaaggttaatttattaaagaaaaatattttaaataaatgtagttagcctaagtgaacagtgtttacaaagcctacattagtgtacagtcatgtcctaggccctcatattcattctccactcactggctgactcacccacagcaacttctagtcctgcaagctccattcatggcaggcgccctatacaggtgtagtatttttttaatcctttatgctgtctttttactgtatctttttgctgtttagatagacaccaatacttaccagtgtgttgcagctgcccacagtattcactacagttacatgctgtacaggtttgtagcctaggagcaaccggccataccatacagcctgtacgtgtgtaggagcccatgccatctaggtttatgtaaatacacactgatgttctcacaacaacaaaaccatgcttctcagaccgcatcccagttgctaatgcagggctatagtaatatatgggtctagggagggaaactggaagtctgagacggaaatgagacttttcattgaaatgactactttttcaatcagcttgaatgatttttttcaagatggagtcttgctctgttgctcaggctggagtgcagtggtgcgatctcagctcactgcaacctccgcctcccagcttcaatcaattctcctgtctcagcctcccgagtagctgggattacaggcacccgctgccacgcccagctaatttttgtatttttagtagagacagggtttcctcatatggtccggctggtcttgaactcctgacctcaggtaatctacctgcctcaacttcccaaagtgctgggattacaggcgtgagccaccatgtctggcctgaatgattttttaatgtacctatacatttctttaaaaattaaaactagtcaaaaaattaaaaaggatcatgcttactggaagagtgaacgcattcactcttggcaggtctattgtcttctaagaggccgtggagacagggctggacttgtttccctcaactcgccccttctgtcctacacagctaaagcacacccttgttttccctgggttacagaccatccccaactggtgacacatgcattagccaggactaggacactcacttgggctcgtgaggaggtccggactggtcgaccaacttgaattcagcagcaaagccatgggagcgggcgtactccaaaaggccacccacagggttggtgttcaggtatctcacgagctcgccaatcttcctgaccttgttgggcatcatggattccaagttatcaagtgactctgagatcataccttcaggctaaaggagaatccatcaaacagaggagccataaacacttcaggaaatgttgagggagtcactggcaatcttaaaccactcagttgctaaaaatgacctgtatcttttgagtaggaaaacgccctacctggttatcagaagccatggagttggtcgcctccccatgcagggccttcatggcttcctctgcggccatctgctttgccactttcttgctgggagcactcacactggggaaagtttgggctcccactgcaacacagtattggaacctgacaggagatgaagcacgtagaaggattaaaatggttttgactgaggagcctgacctagcctctgccaggctgccatcctccactactggtaatttccttgaacacatcacctctgtgcagtcacatctcatgcagtcacttctgccttgaacagccagtgtctcttagcctggctgacccctttcaacatttaagcatcaacctagtttcacctcttccaggaacacttctcttgaacatgtgagtctatagacccacaggcagagagcttctcaggtcctgtacctttctgtcccaccaacagtgagtgacctccaagccgtgaacctccctagtgcttatagaggagatagagggtgggccaggaattccctttgaattcctaatccctaattgtctgcctcacaagcagcaaccaggacctcagagccctcctttccccattttgaaacaggagaaattggtcaatctgccatccctgaggaggcaaggaagaaaatgtgtctctttttctttctgagaaaacctcagctggacagaggacacgtaggacatacttgggttcatgggcagggccttctttggacaggagacggaattcgcaggagttccccaatttgtgcatacactcaagcagtgtggtgacggggctcttcccagaaaagaaggatgtggctgaaggggtgggggtctgggactctgcagtctagagaaaatgagagacaagaagaaaacaaaactaagaaaacactggttagtccatcacagaagaagggatggggatgggggactttattcccaccacctgtcaaggggttggcttcccaaagttaaaggggctgctggagctctcattccgcatcttccaagagaggagattggcctcaataaactttcaggtctctttcaagtccgaaattctgtaaatccaattatgttgggacaggagcagacagaggagctgggtatgagaggaggaaaggtgggctggcgagatagggtagagggaagagtgggaagctgactccgagatggtgtcagttgtttaggctgggattgcctcaagggagtcagttacaatccagacactgacagggaactgatcctcccagatggcaggaggacacctaccttctctgattctttctctgtggaatagtgggatgattcttctgattttccactgtccttggctttggcttcctctagcagaattgtcatggctttcatagctgcatcctgcttggccactttcttgcttccagcttcagctgggggaaactctcggccattgatgacaacctggaatttaaatcttgacggaaagtgattagatgtgtgaacaggagtctaggtcactccttctgccttctccaaagagaccttcaacctggaattttctgctacgctaaggggcttttcacttgtggaggagatgaagggtaggccaaggaactccttcctactccttaaggctcagcctgtcctttctttttgtaaacaaagcagccagtgactctttccccatagctcagtgaagcaaacataggcacagatgataggaaactagctcaggggaaacccactatctctttaacaatgaattaagataaaacccacacacacaaaaatgatgagccaaaaattaccattatagtcttgtgagcaaccaaaagaccttcattctaaagcaattgtggtagactggcctcctcaagggagggtcctaaaagatagtgaaggcttcttataacccagtctcacactccccactacctagggggatcaggcatctgccacttatcagtggcctgcttttgtccctagacctatatcaccgtagtttgttatgagtcactctatagcaccatttgtctccagctattttctacataacaaggaatttccccttgttatgtagaaaataaaaaagcatttgttctaggcctctggacttagcctaggccccctttgttcaagctttcaaatgtggtgagctctttgctcagtctgggatttcatttagaaaagtaggtcaaatttcttatttcctaggtcttctgatatatttgaacatggcaccaatgtttcttttagtgtgagtccaaagaatgactaaccacaaaatccactgctttcctccaactctggggaggagggatggaggcaaaagagaatgacggccatccagtctctaccccaaacaatccagctctggccttgccagcttttggacagacacaactccttttcttaaccgctctcctgaaatgccaaattggtgtcatgaagacagtcaagacaaggaataagggccctagccaggaatctacacccctagaaaccaggctaggtaaacataaaggtcagtggaattctcccccatcctactggctctttccctggctgcagctgcagccactcagcttcagtggttttgctctctgttatgcccttcagaagctcctgttttcctcaatctgtccactggcctattaggacctacagtgcagggcctgaccagctatctgagtgaggtaatcgctgacttcacagctcaggagtggcagcaagtgctagcctacccatctgtgcagaggaggtttataaaattagaaccaccaccttcaacaggcaggcagccgtgcacacgctcctccatcctttccccccaggagctatgcagaggggggattgtggacctgctgctgcttagcagcacaacccacccccactgtgtatgcagcctgccccaacccacctgctcctgcacctctctcagaaaacggcttagggaggaggggaaggcctacagaagggaattaagtcttcattacctctgccttaggaggcaggcatgatattgatgcatggagatcaatcatgtttttcttttttctttctttttccaagatggagtctcactctgtcgcccaggctggagtgcagtggcgccaatctcggctcactacaacctccacctcctgggttcaagtgattctcctgcctcagcctcccgagtagctgggattacaggcaagcaccaccacccccagctaatttttgtatttttagtagagatggggtttcaccatgttggccaggctggtctcgaattcctcacctcatgatctgcctgccttggcctcccaaagtgctgggattacagtcgtaagccaccgccccggcccccaagaccaatcatttctttcttttttttttttgagatggagtcttgctctgtggcccaggctggagtgcagtggcgcaatctcagttcactgcaacctctgcctcctgggttcaagtgattctcctgtctcagcttcctgagtagctgggactacaggtgcacgccaccacgcccagctaatttttgtatttttagtagagacagggtttcaccatgttggccaggctggtctcaaactcctgacctcgtgatatgcctgcctcggcctcaaaaagtgctgggattacaggcatgagccaccgcgtacggccaaaa

SEQ ID NO: 96841 - DNA, 12277 bp, Homo sapiens
ttaaggattttaagtaagacccaaatcagtatggggtatgattttcttgtttgtgattaaaacatatggaagtaattatagatctcaaagtaatttttatttatacacaaataatacatacgttcctgatccttgaaaaaattgaaacattacttgatgacatctaagacttctttgactactactgtctctcctgattcccttttacttttctcagaggcaatgaccattatcagtttggtgtttttctttctgagcttttccgtctttagaagtagagaaaaccaaggtggacatggtacgcaagtctccacatggttttcttctgtggtttagcctcatctcctgggccagatcatatgcttcttgagaccagaaaccacatgaactccttgatctgattccacaccactcccaggcctggaatagaatcatggagaagtgaggggaatggtgaggaacagttaactaaacgcttgtttgagaaaaattattgtcctgcagtttactcaaatagagctagtaactcggctgggcaagtttcagattctgtgtttcaaaaccacctcaacccacccagtggaaaccagaatattctcatggctttacaaaaacgcctgagctttaagcttgatctaaagggctcagcaaagaagcattgctcctgagaggcttcctgtctgcctcaagctccctgtctcagcctccaggtagcctcatcctcatgctccacttgcccagacatggacctcaaagaaactcctgtccaccttcttgggggtcccttcaggggtagttgtgtgtcatcagccaccctcagagttggctctgaaacattccccggtttctccttcagtggtttgtggaggtcaggaagaaatgcatgtgatattttctgaaggttctggacaatcctaatgttgtcatgaagcctgctggcccctttaggcaacatacacacccagacatatatcgatagtgatggaagaattccatcttttcttcaaattctcttctctatttttactttctttccttaaaatggtgcctaggatgggtccttgtggaaaggacagtgctggggttgcaactcctatctcagtgctttgacaagccctcaagaaataaggtttatggctgtttttaggagactccatcacaggccctcctcaccatccaggcttctctcctgtttgcccatatctggaataggactgactgtactcctggctctctgagcaccacaccctctcgcctgcctccatgcctttgttaatgctggtcctttcggcctgagaggaaccaggcccatccctgctggccaagctccatcttctcctgggagccttccctggtgacttggttgggtccacacttcgctgacctcctcttttcccactgtcaccatcattgcttatgacattcctaccatactatcctccttgttgttccttgaatgtgctaggcatgcccatctccaggccttagtacgtgccgtttcctctgtgaagtgctcttttctgaagtgcatggtttcctttctcaccttctgcaggtctctgttcgggtgtcatctgaccttcctctcttaaacagcaacactcccacttcccctgactccctccctaccctcctactctgctttttactctccctaacatttatcccacatgagttagtatacaattgtttgtctatctgtttattttctattttccccattagaatgtagaaacatgagggcgggaacttggtctgctttgttcaccgctttattcccaacacctagaaattgcttaccaggtggtagtcatgtagtaaatatttgttgaaaaacaaatcaacaactctaactaccatattttgcccccctgaaaaaaaagtttctacactgattatgggtgccatgcccagccaggcctgcactgaggcatttggcaggagttggatgatgaagctttatacatgccctgagttgtgtgctctccagttgtttcatgagcaggtcttgtcttaattatattgtgagctacttgggggtagaaatcaaattttgttcttcttcttaactacttaacacttgaaatgcgtctgggttccattagtgattatttgtttattgttccaaaaaagaactaaaggttgccaatgggggagtcacagtgtgtggtcattaactgcttattgactgattgattagtgatggcaaatcctgatgaggtagattgactctaaggacagagtggatgtggctgttggaagatgcatttgggtccttatgtaaaattctgggttctccttgcagggtgtgatatctctgactggtgtctgaatgtccgtggctctttcttccaccttcctaacctagattctgacaaatatattcctggcattaagagtggttgtaaaactagaaacatatatcactgtatataaaccaaagtatgtctttatccactacttatagtctttcagagagacttaattttccctttttagtgttattcatttacagcctcttcatatagatttgaagcagcttatcatatacagtaaagtggttaaataaaaaaggtagaaaataagaactaggaaaaaggaaaattcaaatttgtcaaccatgagggtcaacacaattgctgttattactcttcattcttggctcagggatttctgacagcaattcccaaaggaaaacaccatcagttttatggccttcacaatcagaaagtaagataactatgtacgctttttgtggcaaaagagagcatttctcaggactgaattctaaaaagaatatctcatggggactttataaaggtgagtactgcatgataaaatggataaagttctcaacagcattttgacagccaaagaagtggtaagtttcacatatgtatttcttatagttttggcaaaaattgagcacatgaatgaggaggttttattcagtgggcataaaaaaattaaggatctgacttcaatatgtaactcggtgaaagctattatgaattgtctattttgttaatcaccatataccctgtatacatagtttaataggtggtcaattgttaagttaatagatgaataaagtgtctctcatatttggtactattccagcttcaatgttaaatagtaaacagatacatattaagcatctactaattccaggtggtttgctgggcactttcatatgtattgttccacttattctctttaaacacattttcttattgaagaatattcagatcataagtgtacagcaatgaattattacaaagtaaacacttccatgtaaccactgcccaaatcaagaaatagaacattaatcaggactctgaaagtccccatgttcttccccttccctcctccctagtggtaccattatcctgacttctaatgccatagattagggttttcttttggttgttggttttgaactttatgtaaatgcagccactcagtatgaaggcttttgtgtctggcttaattttgtcaacattatgcttgtgaagttcttctatgttgtggcatacggctttaattctttcagtctcattgctgtataatagtgcattgtatgaatatagcacaatttgttgttgtccattttcagttaatagatctttggattgtcttctcctttggggtgtaacaaaccgtgctgcaatgaatacttttcaacatgtcttttggtgcatttctgttgggttatctgcctgggctggagttacttagttatggagtttgcatatgtttagctttagagatattgccctacagttctcctaaatgattattgtatcaatttatttctctactactagtgtgagagttctaattgctctacatctttgcacacacttgacattattgcttgtaaatttcagacatttgataggtatgagtggttctcaacatgatttaatttgcaattatctgatatctgatgaggttgagccagtatctttttattggctttaaaaatatctcattttgtgtcttttccttttttttttttaagaaaagagattgccttttactcattgacttataggcatactttgtatcttctgcatactagctctttctttttaattcttcacaataactgtgagttataataacattttatacaggcagatactgaggtcacagaagttaagtaatttactcaaggacacttggggtattagggtataagaattatcccttctcttcagtggcttgtaatctacttgtttggggaaatactgctgagaacaattagtgagtaatattaggtaataaatattaaagtattaatctggatggtgcaggctatgaatgatataacagttaaaagatcagtgtgagctttctagtggaggtcagatttagtctaggacttgaaggataggtataactgaggaagtagagaggaaattaaaaaaacatttcagcgagggtgaccacaagagcagaggcatggagctggaagtaatactactactaacaagttgcctttgaatagctctttgcagaactttttgtcttaagaccacctctcttatgcagggacatgagtgcagggaccatgactgttccattcactcaggcatgtccagtgtacaccatggtgcctggcacatgaccaatgcttaacaaatatgttcaaataaaatgaatgaatgagtgaattcaatcccaacaatgtacctgtaaacctaataggatagaatttaaatgattaaggtgagggttgaaagttaaaagacaattagatgaccaatctatggcttctgaaagatttctacagaaactagtggtaaattgtaattagagagatagattatagagagtctgatcagtttaaacttgatgtagcatgtaggaaagcataaagtgtcactgagaggtcttgaacagagggaggtgaaaaggtgcaaacagtgttttgcaaaattcatgagtgattgaatggggactggacaggaatggggggacagctaagaagaggctgttgcaatgatataggcactcacttatgtattcaacaaacatttattgaaaccatagaatacatctggcgcggccgggtgtggtggctcatgcctgtaatcccagcacttttggaggctgaggcgggtggatcacgaggtcaagagatcaagaccatcctggctaacatggtgaaaccccgtctctactaaaaatacaaaaaattagctgggcatggtggcaggcacctgtaatcccagctacttgggaggctgaggcaggagaatcgcttgaacctggcaggcggaggttgtagtgagctgagatcgtgccattgcactccagcctggggaaaaagagcgaaactcccacttccaaaaaaaaaaaaaaaaaatctggcgctaaacttcatgctactgaagaatagcaagatgcgtaagttgtgagccttgccatcaaggagtttatagtctaaaaggagagcttagacaagcacacaaataattataactcaatacagaatgattttttaaaatagcgcaaataaagactatggagttcagaggaggataagatctcctctggccagggcatcaggaaaggttcaagtagtactctagagctgcgtcctgcctgcctctgcctccctgctcccctgcctcctctctatcacattatcttccattattacctggaattgtctggtttatttattattgtttgtctctcccttccttcagtagaatacaagctccaagatgacgagctaacttgttttggacactgctgtatccctaatgcttcacctaatatctggcactaacatggattttttttttaaagaaaatttggaatgaatgaataaagtgtcattggcatcagatcccataagacaaacgggattggtcattcaggaaaagttgcagggaaagatatcattttaggtgaagggtacatgaagtcctacagggaatggagaatgaaagatggatctagaatatagacttaagaaaaactatagaggaagcggctaactatggcgactgccactgagcagtgggttctggtggagatggtacaggcgctttacgaggctcctgcttaccattttattttggaagggattctgatactctggataatcagacttcttttctctaagacttacaaattacaagaacgatctgatcttaacagtcaaggaaaaagaagaactaattgaagagtggcaaccagaacctcttgttcctcctgtcccaaaagaccatcctgctctcaactacaacatcgtttcaggacggagtcttgctctgtcaccaggctggagtgcaatggtgcgatctcggctcactgcaacctccacctcccgggttcaagccattctcctgcctcagcctcctgagtagccgggactacaggcacaagccaccatgcccacctaatttttgtattttcagtagagatggagtttcactatgttggccagaatgatctcgatctccttttttttaattaaaaagtaaactttaatgtcgaaaatgcaaacttggggagggcagaaagatcacacacaaggctgtcacttcacacttggaaggttgcacagcagccgggcagagacgctcctcacttcccagatggtgagggggccgggcagaggagctcctcacttcccagacggtgcaggggctgggcagaggtgctcctcccttacaaacggtgagggggccgggcagaggtgctcctcactttccagacagcgccgcggctgggcagaagcactcctcacttcccagatgggatggtggccaggcagaggcactcctcatttcccagatgttgaggaggcagggcagaggcactcctcacttcgcagacaggacggcggcgaggcagaggcgctcctcatttcccagacggtgaggaggccgggcagaggcactcgtctcttcgcagatgggatggcagcggggcagaggcgctcctcatttcccagatggtgaggaggccaggcagaggcactcgtcgctttgcagacaggacggcagcgaggcagaggcgctccttacttcccagacagggtggtggctgggcagaggcgctcctcacttcccataccgtgaggcggccaggcagaggtgctcgtcacttcccagatggggtggaggctgggcagaggtggtgctcctcctcaattcccagatggtgggtggctgggcagaggcgctcctcacttcccagacagggcagtggccaggcagaggcactcctcacttcccagagtgtaagggggccgggcagaggctctcctaacttcccagacagggtggcggcctggcagaggcactcctcactgcccagatggggcagggcccaggcagaggtgctcctcacttcccagactgtgaggcagccaggcagaggcgctcgtcacttcccagacagggcgggggctgggccgaggcactcctcacttcccagatggtggggtggctgggcagaggcgctcctcacttcccagacggtggagcagccgggcagaggcgcttctcacttcccagatggtgcaggcagagatgcttctcaggtctcaatctcttgacctcctgatccacctgcctgggcctcccgaagtgctggattacaggtgtgagctaccacacctgccctgccgtctcttctttctcctcctaagcagctctcttagtctcctgaattttgatgttctacttaacaccctcatgttcttacacatgttgccctgctggaggcgtccttctctttgggaagcctgactcaccaacagggcctcaggagatagacatggaaacttagccggtgggggcccctcgtctctatcccacttcagttgcaggggaggggtcggttgcagctgcagcggtggctccgacagttttcttttgtgggaactgtggctggcagctctggatggagaagacctacttgatccaagagctgcaggatccttgggctgcatgtcctcccccaccatcagcaagcctggagagctgggcaggtggtctttacccagcaccttcaaggccgccttctctggccacagggagcagcccggaactggggcagggagcactgttggaartgggtcaggcttcccaaargraaggatgcctccagcagggctgtgtgaactggcgacttcatggtccttggagtagaaactcactgcatgcacctgggccttgtcagtctggttcttttctatcaagctcttgaggtggacatttccctccaagggcctgggattgtaccaggaggaagtgaggtttccctgagtctccaggagactagaggtggaggctgcttccccattgctacaggggccccttttattgtcctcctgcccctgggtctctacctggtctttcacctccgttgcttctttgggctcttctgccctcacctccatcttcgggagcctggctgggatcacctgctcatctaatgaaggaagttgaaggttaaacttgcctctcagatgagggatcctcacggggctgaggtgtccaaacatcatggagttgcaagcagacagcatgggtttcttccttgaaggggggctccagaccacaggaggcaggaccctctgtggggtgcccgtgttctgagggataagacacagcctcataggggcgccatcccacctgactggaaaagaaggcccaagatgtcgctgacggttgaagaggagtgggaaacggcccacgattccccgggcaggcacaggtgcaggagccgctgggtgagcccggccagctgggaaggcctcacggacaagacaagcaggttgccgatggcatggccaggacctgcggcggaaccaggaacaaaatacgcttagtgagttgcccattttgagcgagttgtgcacagacgaaactaagggtcagaagcagagaggatactcctaagtcacccacttctctgtggccgggtgcacactgggcatctgggagtttatgacatcaccatggggctggtgacagagccagggttgtggaggagtgcttaggagcccagcgagggtgcctacaagaggggtaaaagggcaaagggtgagacccttccaccggtccagctggactctagcctcagggacgtcctgctcctgggggcaggtgtgtggccctggatgggcccccctgtggggctgttgggggtgcggggctgatctgccagagcccttccgcctggcgcccggcccaggtgctggctggcacccagtggccctgtcttggccggccctgtctcccgggttacagggccagaacctggaagcagagcgcaggaccagccagatcccgctaggctcccccgggtcctctccagtgcctctgtgccgcctggagccaggcccgccttctccatggctgctgtggcctcaagggccaccagccccgctccgcaggtttccaaagagaggacgcggtgccctgacctgactggatgcgcctcttaccacatgcctccctggcaggcagtgtctccactttttacaaatttgcctgagaccattcctcaggtcattcaggtggtcatggcccagccaggctttgaacctgggctgtgtgattccacagctggcgctctggcctgtgtgcctcatgatcatggatacagcatctattcttattttttcctgtagtcctggggtacttagcaccatggcatatctgtaataagcacatgcacaccttgaaggagttcttcacttcagcatacaagttgaccatggcatgctctgggctccagtcctctacaaagatgtagggcaggaactaccagttgtcagcacagcaccatcccacattactcttctaatggagcctttcaccccagatgttctttcttgtttgatgggaaggatccaagtatgtaaagattatgttctagatcagctttggtctgtcctaaaagaaatttgccagtggattattccatatggataaaagtcagtttctctggtcttcctggaatgtgtctagaaagcaaatacattatttacaagttcatagtagatcaatgtattggattaaaatatgacaaacataatttggtcattgtgagcatgccagctcggtcaactattcaccacacatgatgccctaaatataactctaggttttcttatgcccaagagagggacatacttttgggtgtctggactaggaaaacatgtatgaaaaaccatttgaccactctacatcttgttattggagaattgaaaccatctatattcaaagatattattaaaaggcaagaagttaaaaaaaaagaaaaactattgagataacaaagtggattagatatgaagaataagacaaggtaaatgatgattccaaagtttgtgcctttgaagcatgatagaatgaagattgagagaatgacagtaggaaggaaattgagaagacaagccagtttgtctggaagtggttgacaatagaaggcgtcatatctgtgagcatttgtagagactggattgaagtgcacagtcaggtttgaacaaggtgaattgagactcatcagtgtgaaagagataatagtaagttggaccaagcatgggttctcacgaggagaaagttcataaaaagaagagtccttggaaagggggcacagtcttgggcactggatgagaggaattaactagggagatggggaaagaccactgaagggagtatttcatgaaagacagtcatcaatgcccgatgtccaaaactgtggaagctggaggtctttaggcttgttggatggagggcaacatcaccttcaaaggaatacttcttgaaggatgatggcaaaaacatatatatatatatatatatatatatatatatatatatatatatatatatatattcagcaaacttttcttctttctgcccaccattctattagtgctgattgctggaatgctaagagagtgtttaaaaattgttgctattaagtttttaattttttcagttaagaaaataaaatatgcttagtacagaaaattttgatttctttttctattttagtagagattaggtctcactatgttgtccaggcttgtctcaaactcctgagctcaagtgatcctcctgccttggcttcccaaagtgctgggattacaggcatgagccactgcccatttatttaatgccgtcagcaaaccatataggtaaacgtttctgctttttggctgttcttgttcctctgtgagttgtgcatccttttctatgactgccagcaccactgccactggagctgttttgtcattcacattttcttcaattctagtgaggatttcgaatgtttattggccatctgtatagcttcttttgtgaatttattaataatgaagtttttcatttttatggactcagatacttattgccacattgcttgccaaaagggatgacgagtttatgctctagtatgtatatatttatttatactaaaattatctataattatatataaataaaaattatatataattttataaactaaaaattatgtatattttataaactaaaaattagtgtataattttataaactgaaaattatgtatataattttataaactaaaagttatgtatataattttataaactaaaagttatgtatataattttataaactaaaaattatgtatataattttataaactaaaaattatgtatataattttataaactaaaaattatgtatataattttttcctttagtaagtctatgctctagtgtagtacatatgtatgtttgtgtatgtgtatgtatattagagcatggacaaactaaaagaaatatatatatttttcttttttatgaattgtctcatgtttcttgctcatttaaagtaatatttttttcagatagggatataattcatatttgagtgtagaatgaaaagagctgaaaatattggagggggaggttatatacttggattttaggctctggaaaatgtgaaggttgaagtggaagaatactgaacctcgaaggcagaatgcaatgggagatggagtattggactgctttttggcttcaggaaacattgtatgataacaattttattcctttcctgggtcatgactaagcttgaagagcatcatactttaattatagtcttttgaaaaaacacaaataactaagattgttttcgtttttgatcagtgtctccaaggcaagacggagaatgaggggaaaaaaatgacccaacaaaagaaattgatcatcaggttgtttaattatcaattttaatttaataccct

SEQ ID NO: 96842 - DNA, 20038 bp, Homo sapiens
  misc_feature (1)...(20038): n = A,T,C or G
attttctttctttcttttttttttttttgagatggagtctcgctctgtcacccaggctgaagtgcagtggtgtgatctcggctcactgcaacctccatctcccaggtttaagcagttctctgcctcagcctcccaagtggctgggattacaggcacctgccactacgcccggctagtttttgtatttttagtagagacagggtttcaccatcttggccaggctggtcttgaactcctgacctcgtgatccacctgcctcagcctcccaaagtgctgggattacaagcatgagccatcgcacccatccgagcgttacacattttctagtcattaccatcttttcgtgtgtttattacctaccatatacatttccttttctgaaattgcaggcctatatctttattcatttttatcctacatttgtctttttcctagcagtctgaagatattctttgaatactgaggatatgttacatgtattgcaaggattttcaccaaatctgtactttttcacttggctttatttatagtatctttggacatataatttttaaaatatgtttataaaattaaaaacctgttatttttttcatgtctttttgtgtttactgacttgcttatgttttccgtctggggttatacaaaaatattcatcaaaattttcatcttattattttactgttttgttttttacattcaagactttagctagaatttaattttgtatgtaatgtaaggaggagtcaagacttggcatctgggagtttgccgtaactcttcatatcttgtggcattttccatgttttcataataaccctccagtcagctcatagttcctcaggtttcaggcctttcccatgttggctgctgtgctgcaaactgagagtgggaaggaaccatgtctgtctctttctccattgcatccttcaggaaggaccagtaaatgttgcaaagcacctagcatagggcctaacacattttaggcactcagacaacattcatggggggaatgaaagttgcattcacaccgcattactatcaccccttggcaagtttaatattgatggctttgtctgtgtaaacaaggggaaatgtcattctccttaacgccactcatggtctcatgagctcactctggtccttcctccttctgtgtctttattctttgaggtctgccttctctttataaatctggctcattctataaggactcccttctggcagaggcaaggtggggggcgctttcttcaaaccccttcttaaaatctaacagtacttataaattctgcaatactatttagcatttaatccacaatggattttagtccttttctagcacccatcactgtgctgggcacatagcccattaaatacatcaactgtgactgaaacaatcttgcatgccaaggttctttaaaaagcctgaggtatagcctcaagatttgttatgaaagcccttaggtctaaggaacaacaaactgggaagaggtagaaaatgaccctgagannnnnnnnnnnnnnnnnnnnnnnnnnnnnnnnnnnnnnnnnnnnnnnnnnnnnnnnnnnnnnnnnnnnnnnnnnnnnnnnnnnnnnnnnnnnnnnnnnnnnnnnnnnnnnnnnnnnnnnnnnnnnnnnnnnnnnnnnnnnnnnnnnnnnnnnnnnnnnnnnnnnnnnnnnnnnnnnnnnnnnnnnnnnnnnnnnnnnnnnnnnnnnnnnnnnnnnnnnnnnnnnnnnnnnnnnnnnnnnnnnnnnnnnnnnnnnnnnnnnnnnnnnnnnnnnnnnnnnnnnnnnnnnnnnnnnnnnnnnnnnnnnnnnnnnnnnnnnnnnnnnnnnnnnnnnnnnnnnnnnnnnnnnnnnnnnnnnnnnnnnnnnnnnnnnnntgcagtggcacaatctcagctcactgcaagctccacctcccgggttcaggccattctcctgcctcagcctcccaagtagctgggactacaggcgtccaccacctcgcccggctaattttttgtatttttagtagagacggggtttcaccgtgttagccgggatggtctcgatctcctgacctcgtgatccgcccgcctcggcctcccgaagtgctgggattacaggcgtgagccactgcgcccggcctaagaatggtttttcaagtgagactgtgtagtcacatttaaattgtcctgaacacaattgttagacaaacacgagcaggtattgctctgtccaaaggcacaggtccacagactttctcaggacgttttctgtttccatggccttcaccagcttggatctttggagcttcagagaaaatggaaagaaacttgatgtgtccctatatttggtttagaaataatatcaaatggctctcagctctttctgcgtgcatttttaatgaagaaacggctaattctagggctagggcagggactatacaagatgaccctggagcatcttgggggattttgtttgttttgtttttgtagaggcgaggttttgccatgttgcccagtctggtctcaaactcctgggctcaagccatctgcccacctcatcctcccaaagtgctgggattacaggtgtgagccaccacgcccggccccctggggcatcttgtaatgccagaaagtactcaaaaccaaaaggatgggcgtatgtcaaagggacacaggagccaactggaaaagctcccaatggccaaagctggaacaattcgaacaacaaaataatatagcattgaattatagcccaaagaataaaacaaccatgagttcatactgatataaatgactgaataaataaatggaagagaccaatctcccatgcagaagaactcccaataatttatgtagaaactccacccttaaggagatagagcatagaaaccccacccttaaggagatagagcataacttcagggaataattccccaacccttaagagtggaatacatgtaatgccttgctttccaacatgaaaaaaaaaattaaaattaaagaaacaaagagtacaacatgaaaaaagggagcaaagtaactttacagtggagaaacttggcaaagactaccttagccaggtgaccagggttaacaccatcagtaagaagtcatgttgatcatatgtgcccttaatatgatgtgatgaaaatgacatttcacctctgtggtcttccaaaaaccataaccacagcctgtaagaaaaacggacatatcccaattaaggtatgtgctacaaaatacataaccagttctcctcaaaactatcaaagtcatcaacaacagccaagtgcagtggctcacacctgtaatcccaccatttgggatgctgaggcaggaggattgcttgaggccagcagttcaagaccaggcaggccaacataatgagacccttttttttttaattaaaatttttaaaaattagctaagtgttgcacatgcctgtagtcctggctacttgggatgctgaagcaggaggattgcttgtgcccagccaggggttcactcaggagttgagcccaggctgcagtgagctatgattgtgccactgcacttcagcccaggcaacagagcgagaccatgtctctttaaaaaaaagaaaaaaaaaatcatcaaaaacaaagaatgtctaagaaactatcacagcctacaggagtctatggaaatatgacgattaaatgtaatatggtatgatggatgggatcctggaacagaaaaaggacattaagcaaaactagtaaactctgaaaaaagtatgaagttcacttaataatatattatttctttagtggtgataaatgtaccacagtaaggtgttaacagaactgggtctgagtacgtggaaactctgtattatccttgtaccttttctgtaaatctaaaactaaaattaagtttacttaaatatctttaaaatatgcagtttgggcaacagattgactacatgcttatcttcaaaactgtgctttcaattacagggtgctggtgacagctttgtgggagctctggccttctacctggcttactatccaaatctgtccttggaagacatgctcaacagatccaatttcattgcagcagtcagtgtccaggctgcaggaacacagtcatcttacccttacaaaaaagaccttccgcttactctgttttgattgctattagtcccaaaataaatatacctgggaataaaatgtacttgggggtggctgctcctggctaatgcttattagaaaatgtcctcgtcccctttctttgcaaatattagttcttttacgaagtcatcctcaagcttcaatttatttataacgatgattcttttgctttccatgcatttgcacaaaacaaccagaattaaagattccacaaccaagatctgtacaaacataaagacaagtaacctcaattgtcaacagattgttaatgccccatgtgcaccatatggcaggggttgtggacaacagtgtctagagtcagagcagactcttcttaaataagggaaagggcactttctaagaggggcagctgatactcaacttcagcttagtgttgtcaacgcctctggttttgtaagggaaggcagaagtttggatatttattgaaacccttcaatgtttatgtatcagcaactaatttttttttaaatgtaaacaccacaggggcatggtggctcacgcctgtaatcccaccactttgggaagcaaggcagaagaattgcttgagcccaacatggcaaaacctcatctctactaaaaatacaaaaaattagccaggtgtggtggcacacacctgtagtcccagctactcaggaggctgaggtgggaggataacatgagcctgggagttcaaggctgcagtgagctatgatcacaccactacaccccagcctgggtgacaaagcagaccctatatcaaaaaaaaaaaaaaaaaaaagaagtaaccaccacctatgggccacattcaacccatgggctgaataagtaagtcatttgttaaaccaggtaagttttttttttttttaagcaattcatgcatgtcacagaccctttacatcagcttagctaggatcaggtgaaagatttttcttgtaactcaacactatatacagtttcagcctaaaaagagccaagatctcacctattattactttgaaccagagctttatcaaaagatgccataaaatagctgattgaccatgaggccacaagccctaagactcatcaactatctgcctctaattccactgccagagagctgctcttacatttccctcagagccaggtttgggccatggagaaggaacttcttattttgtagtcagggtgggcactgtatcattctcccacacaaatgctttaaatggggtaggatgtgaaccaacagatcttaaaatgagcagatccttttcaaccgggaacttgacaaaggagaaaactggacaattttcaaaacttgtgggaaaaaacagcctgagtgagaaagtgtatggctctgggcaggagagaggtccgtatctgaacattagggattgctcccagaattccatgctagttagctgtgtggtaccaccatgccccagaagtcttagcagtggctttattgaaacactataccttcttttattttaaaaggaaagaaaaatctagggaataaaggaatccaaagctgtcccagaaaatcctagatactgctttggtgatctgggtttgaaaatataggcctgtggcatttttcctaattatataagcacaaatcagaaatagaggttctcttggtttgtgttacaaggctcctctttttgtcattcctggtcccccttgccatctctgttattacatgggagtttcttcaagatcactctggaatgttactctgccttttctctgagtacagagggagcaggctggaaactcttacataagtgttgttatggaaacatttattacatggaacaatggttattttttagtaatgtggttgatttttaaaacatcaaatagtggggaaaaacatcactaagacacaatagcacaggctattttaatattttttattaagggctataaaaatacccagaaagataaataaatgtkatgcaatgatatctgtcctaatatgaagaactttctttcactgcattgttttccttcacaatggccttcaaatcacaggaggcagtgattccatgccatttcctcttcttttattacacgctacaggatttctgaatcagtatccccgccctcagtcttctctttataaatcaaagtcattttcaatccaccgtttaaagggagcgtatttttttcttttccacgaagaggactctttgtttcactatggagggagaaaaaaaaattgtggcagaaaattattaagtatcatcgccatttttataaaaaatacatatcagaccataagccctcacctttctcttattttactattccttgatatgaagatggagctgatttgcaaactcagttcctccatcccaggagccagggcagactggagaaaatggctatagggccactagctaatcagcagcatccttggtatgccacaagtcatattcaaccaatgaagaaatattcacattaagaaagaaaactagggacaaaaatggaaaacratgttttcacccaattaatgtccactcttgtaggaggtaagcaaggacagactgggagctggactccagaaagagagcagcaagaaccaagtggaccacgctgtctggaagagtaatagacactaaacctctacttcccagagatgggttaatacacccaaatacggagtttttagtttggtactataattaatatcataaccaaaatctcattattgtaaatattagagtacagttctctgaaacaaagtgctaccggcctggatgaaacactgaaggctagctgggcgcagtgactcacacctgtaatcccagcactttgggagaccgaggtggtcatatcacctgaggctgggagttcaagaccagcctggctaacatggagaaaccccatctccactagaaatacaaaattagccaggcatggtggtgcatgcctgtaatcccagctacgcgggaggctggcgcaggagaatcacttgaacccgggaggcagaggttgcagtgagccgagatcgcaccattgcactccagcctgggcaacaagagtgaaactccgtctcaaaaaaaaaaaaagaaaagattgaagactagatgctgagcagtaaggctttcatatttctataatgccttatggcactcgattaacttccatctctctcacacacacacccacacacccacacacacacacacccctacctatttcctctttgctaaaacaaaaacaagaaaacaccagaaatggaataatcacccaaggaagatccaggaacttaaacaactatgacctaacaattcctcacttgtccctatcatacagacattttagcttttttcttctacagtcaatatggatactctgcatatgagattcccaagctatctacgactaagaatgagcttatctaagtaagtccattctcacctccactcctaccttaattctggtttagtagggctagagttggactgaagtctacattttttaaaactactcaattgatgggcagctgaatttaagaatcattaacctgtcaacagaatttatctatgatattaatacactgtacataagggatctttttaacatacttcaaatcatgtgaaatgtaagtaggattgatcctcctaaaactccaaggaggactacaatgcattaatgcattacaagatggtagtaaagaaccaaaacagtttctcatctatattacgacaagaaatatttcccccatggttttctacagggaactaaaaacttggtttaaaaaaaggcgsggggtaggggggttgtctcactgaaaagcaatctggagactatttaaatgaccctgactaggagtaactgattaaggttagtagagcaaggctatattgagtagaattctttgattcattcactgcacctattcctttaactcaaagaataaaatatttaagtccatagaactgtgctaggcaatgtagagtttacaaaagtgtaagaagactccctgatttaatacatcagtacatcatgaggtgcccacacaaatgtccagtaaaccccagaggaacctaaaggtcagaaagggacaggaatggtgacagaagtcctcatggaaagtgtcaagtttggtccctgaagacagatcagcatttggattaaatgaaccaggaatgggcatctggtttagtagagggattggtgataggagtctcagtggggatccatggcctgaccacagggatgggtcttgattaaaaaaaaaaaaaaaaaaaagttttagattaatttggctccatgtaagagacagaacagggacttggccaggaatggtggctcatgcccataatcccagcacttgggagactgaggtaggaggattagtagaggccaggagttccagaccagcctgggcaacacagaagacactgtacaaaaaaaaccaaaaacctatttttaaattagaagggctaagcacaatggctcaggcctgtaatcccaacactctgggcagccaaggtgggcggactgcttgagctcaggagttcgagaccagtctgcacaacacagaccccatctctattttaaaaaattaaataaataaatacatagaagaacagggacttgagtgagaaagactcggttccaactctggctccaccatttatcagctatgaatccctgggaaaatttctcaaagtactctatcctgctttcttccctgtgggagagataactatctccctcacaaggttgttgctggacacatagtgcgcactcaacactgagttgaaatgacacactgctacccacaattgtaaacatgaattaattttctgtcaaaatatttgctgcttaattcatagaagaatgaatctgtcaagttctctccctacatctaaccaaaatcgattctgcttcaattacagtctatattgtcttgtttagtcatccaaggaattaaaactgacaagttttcattctctttatgataaaccttcaatatatttaagaaagtttaataagctcatgcctcagcctttaatccttcctcttcggaaattagcatctagttttatacgtggaaaaggaattcgaaaggataggcacatgcagctgcttcttgccacagactatattatgaaatgctcaaataattgggaattttttcacgtttccttacctatttccttcataaagcagaccaacaatcatcgtcctcaaacttaacaatttactcatcacagtaaaacatgctgggagaactgccaagctatttggtaccctgggcaatgggggcaggccccgaggcaaacatcttcatcacgaacacgtgcagggcattcagcaggtgggcagaaagccaggcagtctgctatcccagaacattctcttcttcagaaaagacaaagttgtgctgtcaaagctaagaccgttccttatcagaaaaattctaagcgtctgtttgaaatttatacgtgaatcttttctcccactttgaactatgatcagaactgtttatggctgtatcctttcccaatctcaaaacttaaaatcaaactgacaattattaagttcctaatacctccatactaaagatgaaaagcccaatacattttttcatacttaaaatatcacagaatgttactcagtcacccctttgacttttcaccagctgacacaaagaaatcagagggagaaaaacataccaatccaattctaaaccttatcaatccaacagcaaacctcatcatttttccaccatatgaggaatcatcctgaaattcagactccttaccatcagatacagacctagaattcccttttcactctgataatgaataaacagaaatttgaacaccataaaaacagcaaggaattttatttctgttaaaggatggaacacaagaaactttaagctgacaactgtgcttcttggagcctttaaaaaatgtctgctcatgttattatagccattatcttgttaagaagcaatggccgggtgcggtggctcacacctgtaatcccagcactttgggaggctgaggtgggtggatcacctgaggtcaggagttcaagaccagcgtggctaacatggtgaaaccctatctctactaaaaatataaaagttagccgggtgtggtggcacacacctgtagtcccagctacttgggaggctgaagcaggagaatcacttgaacccaggaggcagaggttgcagtgagccgaaattgtaccactgcactccagcctgggcgacaaagtgagactccatctcaaaaaaaaaaaaaaaaaaaattaattataaagagcacaaaatgaacagccagagctctaaaattaaaaaacacgtttgctatttttacataaatctgcacataaaatccagaaacaggataggcatccaccaacagcaatcaggtgctgactctatttttgtttgtgagcagataatatggccttaggaacacttgtctcttctagataaatacttccatctaatgagaccatttaaagttaccatatagtacagcattttagtggatggcacaaaatggaaaaatcaaatttcctacccccactgcactaatatatagaaaccatattcctttaacttctatcaggaaccaaatactagccactgtcgaacagatgatgccaggacaccataccgtccccttcttaagacacttgtctgtttccagaacactaccacctattctctttacatagctggtttctcaccttcaggtctcggttaactatctcctcctggagagaccttccctgatttagccatctaatgtgactttccctaccactctccaacttcatcctacacctcagcatcctgattgtttctctcacagcacttataatttgtcatcttttctccccctctcagactagactaagtgccaagagtacagggacttgtcttgtgtcctggtgtatcccagcacctgggatgttaaatagcatcataacaatcattcaatacctatttactaaatgaatgctagtgtcagaggctaaaaaaacacctccagagagttcagatgttcagcctacaaagggggcaacaggccttggaagcattaacctccccagatcttaccaactggatcataatgcaaaagagtcagtttttcccgcagtcggtttctcttggtgttgaagcagaaacctgtcccagcttcgctcaccattctcaccagaatgtttctaagattaaaaagtacgctgttatgtacgagctgacgaaataaactaaaatcagtcacagggggatggcacattttgagaactcygtagggtaatattagttgtgagatatcacttggccctaaaaggttcagttgtaagacagcctaagttttccatgaaacagtttcaatggtttcaaatctctaggatttgctccactacacagagttacttcgcaatgacctaaccaaaacaataagaacaatcaagccacattgcgggactagcctcagacatccacccttcacgaggagcagaagtcaggaaggggaaaatatcaaaatactggtaaccacagctggctagtgaggaaattgtaaagatcgctgtctcagaacagccctctcttccagggcataaatgattatattcaggaagggacaaaataaagagactaaagcttttagtttgctaatgcgcaaaaccttgtgccccttcatatttcatttaagttccactcatccaaagcagaaagtccatgtttgcctcaccagatcttttaatacctgtactgtttgttattttttcatgtgtcttgtctccccatgtagaccatgttattttatttctcatgtaattccaaaacaacctggaagcatctaagactatattacacaccactgcattgctttcaacattcagcacagtgcctcataagaggcatacagtatttgtttgtaattaagatagacaataattattcaacacagattcaacaaatattaagcacttactctgtggaaggcactctgggaaatacaaagctctacaagtctatgtctatgtcctctaggagctaacagtactgtatggaaggtgagttggtacatgaggtcaatcaggcaagacatatatgaaatatgtcacaagggtagaaagaacgagagtcagaatatacctctacagaaaccaaaggcaagagattcctatagatccctggggcagggaattttgacataaataactggactgtggcgaaagctacgtgaatcactgaaagatactgggagggaaagcgctaacatacatgtttttcattaacgttaatccaaaagactagctttaaggattttcaatgtcttgagttgcaaggaaaagctgctttagaacctccctatttttaccacaaaatcttctgttattgtctacaacatttattttgaaatacaagtttggtagttctagtctctctggtacagcatggaatctttaatcttggctatttttgaaatgcttataccatgaatgcaaaggattacaaaactcattaaaacagactatgatttaatcaaagcagagtttgttcttctggattccygtagtgagctccagacacatggcccctggtcctcgatttgaggaaatggaaatatggtggtagtccaaatacagcacagcccaatggtttgtttagaaacagacagtgagctcacaaatcctgggactagaaaagcagcaaaggttcctkcaagtatttcaatgctcacagaagtagctcagttcagcaggagggaaaatatttttgaaagagttcataaagaaaaaataatcaactaagtaatccacaaaccaactcttaggaaatcaaggcccaatgcttaatttcatataaggatgtactgggagcagctagactaacaaatccaacataaacaagtgacgtttaaaaaaggaaaaatctttacttactttgacttgctcttggcaacttttttgtagacaggaagggttggaaaagaaaataaaaatataaatgtattctctttcttatgcaaagttcatataaatatcagtaataaccaaaaatatttaacttatgaaatatgccatgaggtgtcactcaagtaactattccctatctattagggatccccttaggattttatagaaggaaggttaaaagatccaatcagaccaacacaattctagatttaatattttgcataatttcatgactgttggactgkctaccttttaaatctttctaaagtaatacctgctccattttttccctcttctaaggtgcaagtattcgcgctgcagcaagcttcttgtttgacaagtttaacctttgcaaattacaacaaccatcacatgtggtgaaaaccagatactaaatctaactgggaagtcagccaagggtaaagaagagcactgactcgggagcccgaggacttctttaactgccctgccgcattactcaggcaattcattgcccctctcgggagcggtttccttatttttagagttcgaaataggtgggctgcaaattctgaggtccttcggacaaagattctcctaacacgggctggagaaaaacgccccacagccagactcaacggtccgtgaggacggcaattgaatccagacaccgcagaccccttctcaggcacccacaggtccgcgcagggaggcgcgccgcggggcatgccggacgctgtggtcctgaaggcctggaaaagtacgcagctgcagcttcccgtcctgttcgcacatccttccccgcatcattccggggccctgcctgtcacggccccctaaccctcgccgtaacccctaccggcgtctccagccccacttacagaagaccgcggagaggaacatggtgaccacacctgggcagtctccgtcaccggccaaaaggcccccaamcaacaacaactgcttccggggcacggcccggttctggaagaggacatccggcagtcgcccgaggccacgccccccgcctggaacctgcctccagtcgtctggctcgttcctcggtttctcagagcgagtgtgttttgcttttgtcgtgctggaggttggaatcctcatcattctggaaagggatttacagctcagggttcgcgccccggccctgactcctatttctgggtcaagtgctttcagcgttaggtgctttccatatttgtttcacgaaataatcgcaaccacctgcattagacccacaagaacaactgtgtattgtacttcggccgctccagcgtatcagcccctcgcatattttcttaaaatgttgcctcccccgacccaactccctctccgcctggttaagccttactctcactcttctgagtcccttcggcattaagaaccccacctttccttagttatcccaatctctaggagggcaggaccctttgcatctcaaacttctgtatccaaacacctagcacagttcctgacatagaagccaaataacagattgagagcattcacatcacgtgcctaatatcacagaactaccaggtggcagagtaagaatttaaacctagattttatctgactccaaagactcatgcctttcccagtagacattgggacctaccagtttgcaatcattaatttttcatggctctgtaaggaacctgggctcctctaacaccaaggacctcgtcagtaacctcatttcgcaactaataatcaggacttttggatttttttcctaatccgtgatttgtatctacatatgaagtcttacagatgtgaaataagatttaatcgcatggctcacgcctgtaatcccagccctttgggaggctgaggcaggcagatcacttgaggtcacgagtttgagaccagcctggccaacgtcgcggaatcccgcctgtactaaaaatacaaaaattagctgaacccgggaggcggaggttgcagtgagccgagatagcgccactgcactccagcctgggcgacaaagtgagactccgtctcaaaaaaaaaaaaaaaaaaaaaaaaaagtaataaaactgttttaaagaaaattcagctctctgtgccatcacaaagaagatgaggaggaaaaaaatcagctctccatacaatacaattcaattttttaaattaagaccgtccttctccttagtacctataatactttttttccttctaatcattcttgatatttatcttcccataaccggactccagctactgagtaccttccaggtgccgaaatccttccttaccttgcattggcaaaaaagagcttcagatgttcaagaggataaggtttcttatatttcctttagaggatttataagaaaacacaagactggaagccaaggaacatgatttctagtccttgttctgtcccttagaaagtcactttaactttagcccagccaaatagcagttcttaaactccatgcccctgcccccaactctattctccttactcttctttatgttttcctacagcacttattgccattaatagtattacttgtgtacttgttgatttccctattgtctttggctaccagaatgctgggcaacagcaaaaccctgtctctaaaaaaatttttttaattaaaaaaaagaacttcagcttattccctcactgctgtatccctggttcctacaacaatgcctgctacatctattaaatatctattgaatgaatgaatctgaggtgagaggcaccatacaaatgtcaatatttatgtttaaatagcaaaaaaaaaaaaactaactttaagtattgtcaatagtttcaggatccaggagaatgtataagcttgcttttgaaaagagccaggtgcagtgggtcactcctgcaatcccagtattttgggaggccgacgagggtagatcacctgaggtcaggagtttgagaccagcctggccaacatggcgaaaccccatctctactaaaaaataacacaactggccgggcgcggtggctcacacctgtaatcccagcactttgggaggccgaggcaggtgaatcacgaggtcaggaaattgagaccatcctggctaacatggtgaaaccccatctctactaaaaatacaaaaaaaaaaaaaaaaaaaaattagccgggcgtggtggcgggtgcctgtagtcccagctactcgggaggctgaggcaggagaatggcgtgaacctgggaggtgtagcctgcagtgagccaagatcgcaccactgcactccaggctgggcgactgagcaagactccgtctcaaaaataacttaaaaaaaaaaattagccagatgtgggcgcctgtaattccagctactcaggatgcagaggcaggagaattgcttgaacctgggaggcagaggttgcattgagccaaggtagcagcactgcaccccagcgtgggcaacagagggagtctccatgtcaagagaggagaggggagaggggagaggaagaaaagagatagcatatgaactatttcttgaaattcttgaaggagtaggctggaggcagtgactctctagcctcaggagttcatgttgcatccacctgttatttatacctaatatagctggcagttggtaagtgttaattaaaatgtttattataatacagatgtaattcatgatttggggcttttttccttgaatttacataatgagccctctatgccttattagaggaaagtgcataacaattagagcatcctggcagcccaaatggaaaaagtgtagtccttagagaaggggcaccctctttgggaggtggggtgctacagggaggagaagatcaagctgtttaacctagattctcagcccggagaagcagatagaggaagagaacatctgctctgggtcagggctccatacacagcatctgtattgggttggtagacactgtattcccagcacttagtgatgggattcaaacccgaggatctagaagctgtacccctcctcctctgctgtgctggcagacccctggctgcccatcatccagcccattgtcacacctacatcttgcttgacttgtgattgggaagtacagccactgttcttgcctacagaatcagtgatcctggctccctgacctgtcccaggggcctgggaacatgggcagtggaaggagaaagacgctacaggagaaagctggggcttcctgaaaagagctggtacctttacaagctcagacaccacaggcagatgggacagcttcaaaatcaggccctcagactcaatggcttagcattatagcaaagactacctgagggagcaagacgagtgaagctggggccaccaactgggttcaacctgtgtgtagtgggtgtcctccagttggcattcaatggcctctatcatctggcctcaccctcctaattcagtcccatctctcttcactgaggctgctgggtgccaatctctttagggatgaagcctttcctcaccctgcattccccattccaccccacatcttccctccacagattcctctcagagcatccattaagcttccctgcatgccttggatcacaggtctgcctcctattatgggacctaagtccctcaaggaccaggtcttctgaatctcccccactcccccaagcaggagcactaacggaaggttgctatcccactcacgtttttgacaaatacagaccgaaccttctctactaagggactgtgccttgagttattttctctcccttcagtcccacttcctcccaagtcaacctgagacaggcagagtggaaggaactgggggaaggcacctaaaaaaaaggcatctaaaaaatgcacattgagcatcctcttggggctagagtgtggggtgaagtgagggaggtgagctagaaaggatggctggggctaggcaatgaaagaaccagtgttctagctgggagtcaggcttagttctgtgggcagcaggaaggctcaagagttaagtaagatttctgcagtggcagcacctgaaatcagccattttcccacttagttgggagagtggcagtgactttcccatcccacccaaaggccccccaaaggtccccttgagaacaatagacacttttcttgatctgcatgctcatgcctatttatttagttaacacatgtatttggtgtttccttaacaattggcaagttcttcttccttatgttttgtcacttagccttttttgaagaagaaaggaggagggtgttgtacacctcttgagaatctgctgagaggtatggcttagcttttccagaagaaaatgcacttatgcccatccacaaacaattttacctgcactttctggggggcctcaacattggctgtacaatgggatcacctagggaattttataaactttttttttgagacagagttttactctgtcactcaggtgggagtacagtggcgcatctcagctcactgtaacctctgcctcctgagtccaagcgattcttctgcctcagcctcccgagtagctgggattacaggtacatgccactatgcctggctaattttttttttttttttttttttttttggtaattttagtagagatggggtttcaccatgttggccaggctggtctcaaacttctgacctcaagtgatctgcctgcttcggcctcccaaagtgctgggattacaggcacgcatcaccacacccagctcatttttctattttttagtagaaatgggggttttgccatgttgtccaggctagtctcaaactcctgacctcaagcgatccacccacctcagcctcccaaagtgctgggattataggcatgagccagtgcacccggccataaactctttatgcctgtttcttaccccctgagtttctgatttaatttatctgggtgcaggccaggtgcagcagttcacaactctaatcccagcactttgggaggctgaggtgggaggctctctagaggccaggtgtttaagagcagcctgggcaacatagtgagatcctgcctctatttttgttaaaaaaaaaaaatcaaaataatttatgagtgtagtctggactttgggttttctaaactccccaggagatgctaacgtatgccaagattgtaaaatactgggattcacggacaggttaaaccccctgtcaaacactcttaagttccaggtgtgctcaattcactccacttggtgagcagcacctatctggataaggaggggagaggacaaagtggccagtttgaaagaatgaggaagtcttgaagttgtaagcccagagaggaggtgtttacatacattccagaaagctgtagaacccaccaaaagaagaggttctgaaatagaagacccaaagcaggaaacttaattgccttcctgaaagatgaatggaagtccagcagacaacacccttcccacccacatacctcacctgccccaagaggagccgcaaacagcatcaaaaggctgacagcatcggtctttgggggagagtcaaccagttaaacgtgtggcttgattggtcagtgacaggggtggggagagggtggcatttgtgggagtccaccacctgtgagggtgtgcagttttagaggtaatgggctgaaactgtcggctggaggaggaaaaggtttgtgtctcggtcaaggagaggcattcctgcggtgggtggaagcggggctgcaaggccgccgtgcagagaagaactgcgcatgcgccggaggccgccgcggattgccagccacgcgacactgagcaagcccccgcctcagtttctgatctgggacttgtgtggtaacttcggaggagcccacaatctcagatgatgatcgtctagatcattcctaaggctttttccgttgcgatgtcacaggaacctgggaggattttagtcctcctaaaactctgatattttcaaacctgatacccgtaagaatcacgtggggtgcccatggccagataacatgattcagtgggtggagaatgggggcggctag

SEQ ID NO: 96843 - DNA, 159041 bp, Homo sapiens
ttatatactgctccaatatccaatgaatagtagtttcttaaaggttagttacagtgtggaatttgtaaccacatctgtgaacttttcttatggttacattaaaatctgttggtctactgggcactttgaatggatctttcacatgcatgattttataatatcatgcactggtcatttgacaaatatgggtttagtgagttatatacagcttccaaatattgacacatgtcactatataatacttaaaatataaattaactaatagtatgataatatttgtcatagaagtcttaaaatattacaaaactctcaggtgcttgaaagctcatattttatcattgataacaaattgtcttagatctttatcttgaagtgacaggcccagttgatttatgttgagaaaatgtctgccaaatacatgtctgccaaaatatgtttggcatatataatgccagttataatgaaattaaaatgtttattgcctcatcaagggccttttcaattaaaactgacttttttattgcaaatgtgcagctataaagaatacagcaattactagtatagtttggtgccactgctttgattcctattaagacacaagcagttttactcacagtaaagaaacaaccaatatcttaggtttattatgaaaataattttgacattggggactcttttgatagctgctattctagaataaaaaggcttattgcagtcacaaataagcctgagatatagggttatggaatttagtatagatgggttgttgagagaaaaatatgtggatatcaagggccagtttttcatatctgcagcttcctgagggctgactgtgggacttgattatctgcagattttgatattagtgaggggacctggaaccaatcctccacagataccaagggacacataaagataatgatgtcggcttttctttaccagattagtattaatagataaaaagttctagggaaatatagaggaggataggttattattgttgttgttattcataataaagatggttttggagtatagtagaggaacagcgtggcctgattctttggtttggagagggcgagagaagctaggaagtttcaaagaagacttcatagaataaatgattcttaagttatcaataatattttgaataaattgctattttaaactaaatatgtaatagaaatgtttttactgatttgctaattaaggtacagttaagcctttctctagagaaactgtgaacatgattaacatccctctccaaatgtaggaaatcatgtcgatcttacttttctgatatctctagactcatacaaggtaggcaatgagacagtgaaaggaggagctagttttggaaaacgtctgtacaaaagaggaaaatgtcaaagagatggggatagaaacatgggttggatcaaagggggtaatggtcataatacctaacatttacgtccactggattatatgccaggggcttctctgagcactttgcatgtgtatataagatcagttgaaggtatttgtgtagtctacttcgggctctctattctgttttgttgatctctttgcctattcttttgccagtatcacactgtcttgtctactatagcttcctggtaggtctcaaagtttggtagtgtcagtcctccagctgtttttctccaatattgtattggctatcctggatcttttgcctctctttataaactttaggatcattttgttaatatccataaaataacttgctgggatttttgttggaattatgttgaatccttgggtcaaagtgggacaaactgacattttgtcagtattgagtcttcctatccatgaacatagaatctctcttcatttatttagttctttgatttctttcatcagagtgttatagttttccttatatagatcttttgcgtatcttgttagatttatacctaattatttggtttagtggagtgctaatgtaaatggtattatatttttgcctcaaattccacttacttctgacataaaggaaaagtggttgatttttgtatattaactttgtatcttagaacttgtttttaattgcttattagttccagggatgggttttttttttttttttgtcctttcagattatctgtttacacaatcatgtcatctgtgaacaaaagcagttttgtttctttcctcccaatatatatactttttatttttttcattttattgcgttaactaggacttgtaggataatattgagaagcagtggtgaaaggggcatccttactttattcccctgatcattcttggaaagctttgagtttttcagcattaagtatggtactagccataggagttttttttttttaaaagatattctttatcaagttgaggaagtttccctctacttctagtgtactgaggctgtttatcatcaataggtattggattttgtcaaatgcattttctgcatctattggtatgatcacatgattattattctttagcctgttgatacgatataatgctttaattgatttttgaatggttaaccagccttgcatgcctgggatgaattccacttggtcatgatattatttttattcattgttgaattcaacttgctaatatttttgcttttatgtttatgagcaatattggtcaataatttttatttctgtaaatgtctttatctggttttggtattagtatagtgctggcctcatagaatgaagaaggtattccctttgcttctgttttctgaaagaggttgcagataattggtatacagttgtcctttggaatctgcaggggattggttccaagaatcccccacacataccaaaatccgaggatgttcaaatgttttatgttaaatggtgtggtatgtgcatataacccatgcatatcctcctgtatattgtaaatcatctctagattacttatacctaagacaatgtaaatgttatgtaaatagctactatcctggatttttatatatgctatttttatagttgtattgttatttttctttttttttcaaatatttttgatccgtggttggttgaatccacagatgtagaacccacagatacagagggctgactgtaacttcttccttaaatgtttaaaagaatccaccagtcaatccatctgggcctggtgctttctgttttggaaagttattaattattgattcagtttctttaacaatataggactatgctgattgtccatttcttgtgtgagttttggtagattgtgtctttcaagaaattggtacatttctctacattgtcaaagctgtgggcatagacttgtgcataatattcattgattatcctttaaaagttcatgggaacttttgtgtggaggaaaagttaaatattaaatttgaactcaattgaacgtggacacaaacaatggtcaccaagtcctggcacaggttgtgtgagccccttcaggcgttcgtccagcactgtttcagagaaatctctatttcaatctattcctataccttggtttttgaaaagcaataggccgggtgcagtggctcatgcctgtaatcccaccactttgggaggccaaggcgggtggatcacttgaagtcaggagttcaagaccagcctggccaacattgcaaaaccccatcgctactaaaatacatgaattacctgggcatgatggcgggcacctgtaatcccagctactcaggaggctgaagcaggagaatcacttgaacccaggaggcggaggttgcagtgagccaagatcgtgccactgcactccagcctgggcgacagagcaggactcatctcaaaaaaaaaaaaaaagaaaagcaatagatagtcacaaaaacaagttgacctttttgtgttccttgagtccagtcacgaagggccttcatgactggacctcctgccaaacaactcgttacaaaaacagctagggtcccacactgtgctgaagcttcatgagacctctctttgtctgtgcacagacaagtggctgactatagagcccaggctgttgcttcccagtctagtggttgttagaaacaagtgcttggtgctgcaaagtgaaaccagcactcaggcaaaaagcgttctcagcaaggcaatttacttctgcagaagggtgctccctgcatcagccacgatcacaagagcacactgaacaaatagggtagatgcacaattcgcaagggagcgggtagaagtggttcttctgctatggcacaagacgtgtctggacatgtctgggcaagttagggcacagcaagagcaggagggctgcttgcaggctaaaaatgagaaagtacaagaaggtggggcctttgaaccaaggacattacacaattaaaccctttgaagaggaattcaccacctctggcatggtgaatcctccatagtctggtgagtgcagtgtccaactctggagcccagactgttgcttcccagtctggtggtgaatcctccatagtctggtgagtgtagagacatttatctcttttcccttctcccctttgcgttgcaatttgcttattatatcatttgcttattttattactttgcttattatataatttgcttattatatctacattgccatttacatgggataaagcttgtttacctttaaaggtattgtgtgtgtgccttttcttctcctcttgcgggtctcccgcccagaacaatctgtactgatatcccgtctttcatttcatttgttagtaatttgtgcctttttttttttttcttaattagcctggctagaggcttattgagcttttcaaagaagcagccttttattttattgatttttctctactgattttctgttttcagtatcattgatttcaattctaacttttattttctttatttgcttactctggatgtaatttgctcttcttttctagtttccaaaggtcaaagcttagtttactgactttagatctttcttcttttctaatatgtgcattcaatgatagaaatttttctataagcactgctttcatcacatcacacaaattttgatgttttattttcattttcagttagctcaaaatattttttaaatttctcttgagatttcatctttgactcatgttatttaaaaagtattgtttggctgggtgcagtagcttatgcctataatcctggcactttgggagactgacacaggagaattgcttgagcccaggagttcgagaccagcctggacaacatggaaagaccctttctctacaaaataaaaaatattagccagatatactggtaggcacctgtagtcccagctactcaggaggctgagatgggagaatcgcctgagcccagggggttggggttaaagtgagctgtgatcatgccactgcactgcagcctgggtgatgaaacaagaccctatctcaaaaaaaaaagaaagtgttgtttaacctgcaagtatttctggattttccagctatctgcctgttattgatttctagtttaattctgtcatggtctaacagcagacattctatgattcctcttttttaaatttgttgaagtatgttttatggacaagaatgtggtctgtcttgctgaacaagatatctctttttttgtaatgaattgaagactctcagattcatatggaaatttaaaaataattctattttccctcaatgatacatattttgcccttgatttctaatgtattccatgatttgttctcatagttgggggatgtctttaattttgatgcggtattcctacataggcctacctgggtctcagaaatggcacccagagtggcaactgtgggaaatcgaggctatcttcatgaaatatatatgcacattggtgaaagttttcaccattatgaatctgtacattaacttttttttaaatgttggctttagactcataccacatcaggtaggaatttgttaaaatgggcaaacatttaaaatttctcagagattaataattaacttttattgtttttaaatgttacatttttttttctatttcatttagttttgtcagcctggcgggtggcagctgtccagagagaggaagcagccaacgttctttgtggttgtcctgacagacattgactcagatcgacattactgctcatgcctaaccttctatgaggcagagatcaatcttcaggtacaaaaacctttactagctmaagtacagtcgaaggtacaacatttaggaatgttttttatatgccatatttttgttacaactgcaagtttgagttttatgggctagcataagaagcatgaagaaatttttatgtttaaggttggagaggagagcaacatgttaaaattactttccagatttaattgtcctttttcaaaacattgatcataatctgaatatttctaaaaatagtgcatccttgaattggtttattaagaatattaatttcttctcttggtgaacctgtgattttccctgccagcccttctcctgggaggtctttcatagaatgtggaacatttactcacaatgtttgcaaatcattattacaatgcttgacattattgtttaagcacccaaatgttaactcattcttcttaggggtggtattatcaacatgatcaggcagaaattcataagctagaactatgaagacatataaaataattgctctttcagactattggttgaggttcttagtttcacattactggctctactttctctaagcagaaaggagtcataacaaagtatttggcaacttgtgaaattttaggggtgagggacaagcagggaaccaattctgggtactaggaacagcccagcttggtgctattctcatagaaaccatattccttccaccttttaccacttggcacttacaatgctgggtatatatcagacattataaccttcaccatagttgtgctagaatatccattctcctgcagatattcacactgctgacttctgctttagtctcatactgctgacttctgcttttaagttttacatgagttgtttctttggtggaagttaagattgtatacagagcccattttgccccaaaaagtgtagggttttttttgttggtgctggtggtggtggtttttctttccaggctctataatacaagaaggaaaccataaaggggacttcgaagatattgagtaagccagtttgcataatctactgtagtttctgctacgtatagagtatcatcacttgggggaaaagattggcctgctttctgaaatggcttaacaaaggagtatttggtagttttgattatgtttattaaactctaagatctgaattttctggatgcagaaatctgatttttgagtacaagaagagacaaattacctttcatgatgcagactcattattcaagttcattagactgatgtgttaaaactaacatgctagactactaatttataggaaatgtgaaaagtgctgaaaatgcatatagaacaaaacatgcattatcagcacattgtcttcctgtcaccagatcttagtagaaagccatatcaaagtccggagttttgattatggaatcaaacygatatttgatgttaaatacttaaagactatcagactaacatagcctgttgcttctatttgaagttagagattactgtatgttatcaatggggacagaaaactttcagtctgtgactttaagtctcctctcccctggataatgtttggatatatgttgccaacaaatagctaatcaaattctcatttttatcagttcaatctgaataagttagagagtgttctctagcccaagaaccactctgtctcttttattggcctttcgtttctctgttgatctttagcatttaagttaatgctgagaattcagtatattctgttatttccatattcttgagggtatcgcttcacaactctttggaattatctaatgaaactaactataattatttagattctccctcttcactattcacccctcttcttctagacaaactgacagaaaggcaatatattgacattatattaatggcagatgtttataaataggttctaggaattcttgggtatttttcaaacttttaatttggaaataattttaaacttacagaaaagttgcaagaataatgcaaacatgtatatagcctttacccatattcacctgttgttaatattttgccccatcgttttatttgaggtctttcttccctacccttctttcctctctttatcccttcttccctcttcccctctctcctctccccatctcccccatacacacacacacctaaattctttagtatatgcttcagaggtacatgaacagtacgtaaacagtacagttatcaacctcaggaaatttaacatcaatataataaaacctactatccatattccagttttgtcatttgatctaatagtgtcctttatagcacccccccatcccttttttcttccagtacaggatctagtacatactrcatatattgcatttagtttttatttctctttcgtctcttttcatctggaatacttgtgctgcctttgtctataatgttgacatttttaaataatgtaacttctcaccccccatttttaatacaatgtttcttattttctgttttccagtatctctcattgttagtttcaggctgtgtcaacagttggaatattacctgtgttccttctaagggcatccttctaagagtacacatccggaagtccacaatgcctgtctgtccctcactgatgatgttaattttggtaacttggtcagatgattgtcagatttctccacttcatagtggcgatttttatgtttgcaattaataatcagtctactagaagacactctaacactatgcaaatatcctactgttcatcaatcatgttcccctagatttcagcatttactaatgattcttgcctatagcaattttgattctgataacaaaaaatgattattttctaactccatactccctctatttttagcagtcagcagtcgaccttttactataagcaggaactctctcttcctgtctgtttgagctacagatacatggattcaggttttttttttgtcaataatatgtaaatcattaatggtttttattattttaatgcacaaattatcccatatttgaccagcgtgcaccactcagacagattcctgtgttcttttcacagatctccttttagaaaaagtactttttaacttttcatcataacaagttgatctaggatcattttattccttccctgcctctgccttgaaatcagccatttcttcaaggagtctgactcctttgaatagggaataatattagaagctaagatctgggttcttgtatagtttgaatccatatgtcaagaagttatttctctttttagcttagatattttcctacttgccattttaagtgggcccagaaatcataatttatttgttacgatcaccttacaaaaggttacagtctgcttcatatcagtttttccaagattttgaaaatgcggataggttgtgagaattccggattctatataattgtacttaggtactagccagaattgtaagaccacttttctggaaacataagttaatgtcttttgggcttggtggaaaagagggataaacaatgaagcagaatttgaaaaaaaaatagaacccagaagatgtttctttcttgtcatcagtaaagttgttttcatttttggcatgaactgtttatgtccctttaaaaatgtgtttttcttttctttttggatcatatcatcagttcaaaatagatcttttaattcttttttggtgtgaattacttcataccaaatatactatgacacattatttggaagcctaaagagggggaacttagggacatacaccatccagaatgtgattgtgcaactttaaaaatgttagctctgttatctttccaagatacagtaacactgtcagtaatcataagcaaaacttggcattaaacttttgataatatgttcccaaaattactcaactaggtaatgtgatcctaaatttttttaagtaatcagcaaaatatgatagatttacattgacttttattacttatctaaataatcatttgattatcttaaaatatgttaaaagtataaaattttaaatatctaaaatttaaatttagttctatatctttttaaagttatttcatatgtttatatacttgtctctgaatcagtggtaattatgcagttctcagtgagaacatttggtgtgtcatcaaattgtcatcaaagaaagagagagggaatgaattttgtaatttcgagagataagaggaggaaaaaagagggagagacatagaagacataagatacgtttctccatcacagtgggcttcaaatctagcttgggaagcagaaccaaaacttaagtacaaaaccattccaaagtatcatatgctaagtatcattcagtgaaacagataataattgcagactaggcaactggaataaatcatacagagtttaaaagactcagtggacattttaataagagctaacacctagagtaagggaaagaaaaaggacaattcaaacaaaaagcttgtgcaaaggaaaaaagattgtagtgcttatgataaattaaagtcttatgttctgggtactgtgctaaaagttttacaacactttatttcattctattttatttaactcacatatagtttattctcacaaaacaccatttgataggttttaacatttccattttacagatgaggcttacttagggacattcagtaccaagttaaagtgcttgattgattctgtctccaaggaccaaataataaccacatatactacaaagctgcaaaaattgtatcagtgtgctataggttcaagaattaagtgtcaagggtaaaaacaattatgggaacaaaaccaatactccagaagcagaccctattgtgtataggagatcagtgtccaacaatagaagctttataaatcaatggaatgtgtgtatttcaacaaatattatttaaacagttgatgagctatttgagaaaagaaaaaaatttaaacatagtatcatataattaattccaagcagttaagtaattacctggaaaatggagtaataaaaaggaatttataaattcgtctctagatggtataaaacagtggagaaaaccacacacaaaacagtgtatagatttagctgaagtactacaacccaatcatttttggtactcccccacccccaccatcccgctctttatcatagtaaactatgctcattgtagaagacatagagagaacatgcaggaaaaaatttgagagaacagaaaaagatggtttgacatattttcttccaataataaggattttttttttttaacaaaagttgctgtacactagttgaccatataggtaggtttaattaatcccctgatggacatgtatttcctgttttgtcaatattatgaataactgtgatgaatatctcattggaaaaaccttagttccttcaagaagggtttagtcccaggtaatccaactctttgaactaaaaattcgaaatagcagtatttgggaattgggcttgctgatattgtaatcaactttacacttggtagcattctagagactaattcttaggtcttattcaacaagactagactttgttagagtctggtgaaaactagcatgcgtaacataattcacacagagaaaaaattgggagacttgtgtattctgagtttattctatagtttgataatttacaactttgcaagtatccacatgggattctccttagagtatcgatgctgaagattatgtcttttaccaaagaatctgtcttctcctccccttttgaaaatgagaattggcaaatggacagaatgctgaatcttaacagtccccttgatgtccctcacagatgtattttgtagggaaaaactgtcactggattaactatgattaattggtgcaacatgcttaaaatgatataagactttaaaacaacaggagaaacttttgggattaagtttccagaatccttcaacatcaaataccttttcttaaattttgacaactatttcaggctaggaagggctgcagtgagaactgtgtattgttactatttcattttaaaacaaaaattactacattcaaatataattaaaggaaaacaaacctgaacatcttttcaaattgacagtttggcgtctcagatgttatctttcctaaacagcttattttaactaatatgttatttcttataaaggttacatataagagtataggatactggaaagagaagtagcttaagagaagacttggcttgttaatcccacttatgcctttaatgatctgtatgaccttggcaagtcatttcatccctctgggcatgtgattactgatttataaaatgaagtaggtagcatagattttaaatatcttccactactgtattatttttcttattctgtcatgttaactatatctgattttaaagatatattttaatattgttcatagcagatatactttaaattatgtcccgcagaatactattgcaagtcatcttctgaataaagtatacttttattttttttaagtatactttaagttctggggtacatgtgcagaacatgcagttttgttacataggtatacatgtgccatggtggtttgctgcacccatcaacctgtcatctacattaaatatttctcctaatgctatcgctcccctaaccccactacccactgacaggccccagtgtgtgatgttccccgccctgtgtccatgtgttctcattgttcaactcccacttatgagtgagaacatgcggtgtttggttttctgttcttgtgttagtttgccgagaattatggtttccagcttcatccatgtccctacaaaggacatgaactcatccttttttatggctgcatagtattccatggtgtatatgtgccacatttkcttaatccgatctattattggtggacatatgggttcattctaagtctttcctattgtgaatagtgtcacaataagcatacgtgtgcatgtgtctttatagtagaatgatttataatcctttgggtatacacccagtaatgtggtggctgggtgaaatggcatttctagttctagatcctcaaggaatcgccacactgtctaccacaatggttgaactagttttcactcccaacagtgtaaaagcattcctgtttctccacatcctctccagcatctgttgtttcctgactttttaatgatcaccattctaactggtgtgagatggtatctcattgtgattttgatttgcatttctctgatgaccagtgatgatgagcatttttttcatgtcttttggctgcataaatgtcttcttttgagaagtgtctgttcatatcctgtgcccacttgttgatggggttgtttgtttttttcttttaaatttgtttaagtcctttgtagattctggatattagccctttgtcagatgggtagattgcaaaatttttctcccattctgtaggttgcctgttcactctgctgatagtttcttttgctgtgcagaagctctttagtttaattagatcccatttgtcaattttggcttttgttgccattgcttttggtgttttagacrtgaagtctttgcccatgcttatgtcttgaatggtattggctaggttttcttctagggtttttatggttttaggtcttacgtttaagactttaggctgggcgtggtggctcatacctgtaatcccagcactttgggaggccgaggtgggcagatcacgaggtcaggagatcgagactatcctggctaacacggtgaaaccccatctctactaaaaatacaaaaaaaaagaaaaaattagccaggcgtggtggcgggtgcctctagtcccagcctctcaggaggctgaggcaggagaatggcatgaacccgggaggtggagcttgcagcgagcggagattctgaactgaagactagaggcctagtttgtttgaaggcttgttatcctaaaatgtgtatttcttatgcattcattatttcccagaccaatgaaagggcaaacctggtttgatcatgtagacatgtcaacttgattaaaagattatttggcaagaaatgaagggttcaggaggaattttagaacttacagaattttgcaactacttaggctccattatttccaattctggaaaatttttaagttcttaaattgctttactgagacaattctatataatggtatacttgctatatattacatttcagaaaggaaatttaggactgaaaattttttacttgtggaattaattttatcctccttttataactgattatttaagaaatgctgcgggaagatttttagtgtgatacagtattgttaaaaatgaacatagcacagagaagatgttggatgcaacagttctttaaggataaaagggtcaggacttgacagttattttgatattaaaattaagcatcaagatacaacaaagatgaggctgaagtgttcaacctgaatggtaggataaacttccttaaagcttgtgctgatctgctacatcaagttattgcgtgcaatcagcaatctagtactttttgtctcaggatatgttttaagagcagtagcacttttaggccagattgatatggtgagtactaatttatcccatattattgaagcacagagatgatgaactacacataagttacacagaagctgggaatcactagcagatgtaatccatagtagtaattggtaggcaaagatatctacaaatgggcaagttgtggcatgtgattattatatgtattgaccttgtaagtcaatgtgagatatttagtaaacagtgtttaagataaatttgtatctttaatgagacctactaaaagcaaggaataatctttaagtggccaatttaatgagaagaaataatcttaagttggcaaagcctttaaaatattgttcagctggataaaatatgtgaaacttttgtagtataaaatattaaatttagcattattagaatatctcatattcatagactatgttttgaatttcctgcttatttttaagtttttcacatctttccaatgggtgaaaatctgtcattgtaaaacacacaccaaataaaactagtgtcattttataattattacatagaatacatctagcagctatatagaagagggagtattcctctgacatgataaattatttctagaaaaattttatcaaaaatgtcacattaccattctagaacaaactttattttacctaataaatttggggtttatttgttgtgtgtgtgtgtgtgtgtgtgtgtttaatcacagcagtacattttgctttaaaagcagaaataagaattttttctctaaacttaggacattgcattcttataggagagatattgaaattaagaactaagaatattttaggatttgtagcacatttacaaaggaaaagtcaacatcgtaataaaaagtgatataaattaaaattattttttacttaatactgattttcactctattggacctttttctttctcgttaataactattccttttggtgagtgtttaattgaagagcagctttaagaaatgaccaatgcattctattttgtgttttggtcaaagttagtaaatggtcatatatttgaaatggttatctacttactctagctggcttctaatggtactctagggcatttatcacaatctcataaaatgtggatagctttatctcttccaagaattttagtcattcttttgtcattttgaattagttagtaatccatgaagaatatgattcattaagtgtggaaatctttggtgaattcatattcatcacatttttattatttctaaggattccagaaaccaaccaacctaatttttgtttttgctttgtaataaatgaaaatctttcaagagcatatggactctatcatacatacaaaaactaaacagatagttccctttggatgtgcacattccacagacatctaatacttggttatattgcattgtactagaaactaaatgagctctaaaggaagtagaaaatataattattggcctctatgaataggggggaaaagacttcccttgataaaatgctcaaaaaactatgccaagaaaatgtattcatgcatgtatgcaatgaataaatattaagtatcagctatgggcctagcccttattttaggaactgggaaatcaccgttgaacaaaacagaaatcctggcctttatgggagcatgtgctagtgcagttgacagacaaactaaaaaacaagataagtgaaatagataaatatgttggatagtaacaaatgccatggagaaaaataaagcagagaaagtgggtagagagtgttagggcattgcagttttaaataacattgtcagcaaaagcttattagagcagaagatgcttgaatgaaaacttaaaagtgatgaggaactaagtcattagaatatctgtggaaagagtatttaggcaaaggaataacacagaagcgcatagagcagtggatgggagcatgcccagtgtgtttaaagagcagcaaggaagcaaagtggggctaaagaagaataaaggagatgaagggaggctgttagagtaatccacacaagagattatagtagctcacagcgttatggtagcaatagaggaggtaagaaatcagggtttgttgacagtgggatataggttattaaaaagaggggaatcacgattttgggtttgttaagcgggagaatcatattttgtcaagtttattaaccagtgtttagttattgaaacttatgtattgttttaagcgttttttattgtggtaaaatatatatgtataagatttgccatttagccatttttaagtattcagttcagtggcattaagtactttctgaaattcagttttgtatgtaaaaatgttctctcagccaagcatgatggctcacacctataatccagcactttggaagcataaggcaggagcatcacttgagctcagtagtttgaaaccagctgggcaacatagggagaccctgcctctacaaaaaacaaaaaattaacctggcgtggtggagtgtgcctatgattccaaccacttgggaggctgaggtgggaggatccctaacgcccagaaagttgaggctgcagtgcactgtgattgtgccactgccctccagcctgggcaacagagcaagaccttgtttcaaaaacggaaacagagttctcttttctcaaaatatcagcattgttgcttatgaacaaaagcaatttagagccgattgtgctttactgccaagagcattgagcaccaagcattctgcaagccttagaatccttgtttgagacattgagacaagtagaaaaaccaacatgaaaattagtgtcatatttgcaaaacatcttcttttgaaaactgacttcatttaaatatcattttttaacttttcatctaagtgagtataatttttaattgggtcactatttaaaataatttgagcatgtcttatttgcccttgattcactcagaaaggaaatgctcaaataaagttgtgttatatgtctggagcttaaggagcttttcaaaaatgaaataagtattcccggcttcataatttgtctactttacttttagaatgctcttaaagtctattctttatttgtagtttgatttttaaaattatattataattaattttgaatttgcataagttatatttaaggtgatattcatcttttgtgaattatgaacctaggaaatcccttctgtttgttgatttcagtgtctctttttctagggaacaaagaaggaagagattgaaggtgaagcaaaagtgtctggtttaattcagcctgcagaagtgtttgctcccaaaagcctggtgttggtatccagattatattatccagaaatttttagggtaaagaacacatagttatcattattaatttgtattattgtgtgagtctcttgaatgaaccatggtacaagttctttggattgaaaatattgttagattgatttaggaattcatctatgaaatacagttagcatgaacagaagaaatattttcatgttgggtgaaataaatacctgaataagttaatgtgactactaaaacttctaaggatgtagtgtttgttttaaaataggtcccacatttattgaatccagaatgtatacatcctaaagaaataatttgattacctgtagtaaatgtaaatgcatgagtgatttaacaaattcgtgtatgtatattcaccttgtgaggaatcaggttcaagtaaatagggtgggtgtttgagatttcaaacaattctgatcatacttctgtcaaaatagtcttaaaatattgcttccaggtattttcttgttttagaaacacagaattttcaaacataagaggaaatttttattcatttgtaaatatttgtgctaagatacaatttctgtaaaacttttctagaaattgagattatttgtgttataaaagaattaaattagtgtcaagatttcaatgacaatgcgtaactccaagcaaatactaagttttcagagtcacaaattttgctatactgaaagattcataaagattgcattatgtctgttttaccacctacctccttctgaactcagtgttaatcttacaatcttgtctctgttttgcaatcctttcttacaattcacatgttaaatttttctgtagaataagcattccggatttataagaaccaccaaacaagataaaatttctaagtttttgtcttgagatttagagtttaacagacttaagttgaggcaaaaacagtattagccctacagatttgctagagtagttatcagagcacaaacatctgttttacaaattatggatttctgctttctataaactcatctcagaagctcatttgggggttctggttctaaggaaaatttaataaacttaatttttgctgtttaaaatgtattccatgttcactgtataatatactttactgggttcaaagagaaatcgtcctagagcagatgtcataacaatttatttttaatgctttttccatgaaataattacatgtatttatctttttgcaggcttgcctgggtttgatctataccgtgtatgtggacagcctgaatgtctccttggaaagtctaattgcaaacctttgtgcctgccttgtcccagcggctggagggtctcaggtaaatagaatagaaagagaggtggagaaggattgttcctcttcccctctcctccagttaatttaatttatggagaaagggaaagaaataattctttaaatatttttgttttaaggaagatcctactttagttaagcattgtccccatggtctgctttctagacactcaagattccattcttttcttaggtcatgaggttaattttaacacagggttcatctttcacatagcataattagaagtcatattttgtgtaacttgaactgcagtttgtattttcttggaaatatattaagttgaacttttaaatgttctcttttacctttctcactcctgtatatagttacatctcatttttattaacctaaattgaaacatgttggagtgataaaaattagaagatgacattaagaaaactctcaacacagttctttgttacattgtaactacttattaatagattcatttattctgtatgtcttgagattttcatatttgtctctaaagtagaaaaataagaatctctgctgctatgatttatttattgtttcttggtcaaccatacttttaaaaggatagattttttccttaaaccttaaaaatgaataggtgataatttattttgcttattcttatataatattgggaaagaggacagccttctaaaaatcacattgtcttcagtctgacaaagatcctgcttatagtgggattggcatttctttttcttgcccttcgcctttttacttctcttctatctttctcattgtcttttgtcttaaatttttatcctccttttttctctgtctctcttgctctctcctccttcattcttctacctctgctcaaagggcagaatattaaatgtgagtttggtcacagatgggtctaaacttgaattgctttatgagcctttattaaagttgttgactttaacatttcattattttttagccagttatgattatcaatgatttttgtgtcttatctctactagattttcaactttcagccactgaattttcttatgccacttaagtatacaaagaacttaaatgttttgggatatacattgttgccttttgtatctgttaattggatcttacatggtcgtttgctctaaaaatgaacatcgaaggtatttttattttttwaaaaatggctgaaatcgtgtgtgtgtgtgtttgtgtttctcccattctgcagaagctgttttctttgggtgcaggagatagacagttgatccagactcctttacatgatagtcttcctatcacgggcactagtgtggctctcctgttccagcaattgggtatgtcttttctcccattttcaatgtcatcttgtagaagcctatgattaaaggatttattttaagtcgacatcacctcacatgaatcaagaaaatgttttttaaaccattaaatattttatatataggagatatataattttgtgggtcctgatcttacctactgttcattctttttaaaaattttaactcaggccccttttttccttaggtcagttagacttttagaaagtggatgggacgggtgtggtagctcatgcctgtaatcacagtactttgggaggccgaggcaggaggattgtttgagcccaggaatttgagatcaacctggacaacatagtgagaccccatatctacagaaaaaattttaaaacattagctgggcatgttggtgcacacctgaaatctcagctactagggaggctgaggtagatgtatcacttgagcccaaaaattcaagactgcaatgagctatgatggtgccactgtactctaacatagaaggaaagtggacatattttctttatgctaaaagatgaatagatgatatattttgcatttccatagatgaactgcttttgtggaagccttgtcagatgggactctgagtctcattcttctcatcccaccatctatctgaggactttatctccaatttttcggcaatggttaggatgaaagattgggaggattctagaaagtgtccactgtaccttggacagcttttacattatttaagaaatatataacttaaaaatgaggatatttcaaaccagggctgcccaaagattcccatttacgttacctctgacttgtcctttatatatcctgcctatgagtgtcccactctcattgctctccatctgtgtttgtcttttcctagttatgctgaaatcttcccttccctaaggtccataccctgcctcttcatggaattcttaatttcttgcacagaaattctaccctcttgcttccctcctgtctcttgttgaattttgcttgtagttttgctctgtatcttaccacccttttcatcagtgtccctatccatatacttctgctttaacttcaatcagtgaaagttagaaagccttagaggagattagtataaatataaatagagtcttctaatatctgaattaaaatgagtggtgatatcaatttcaaagtaattctttccagctacatttgcctcttctcatgccaactctaaaataatatctccctttggtcaaaagatacaaaatttcaattaggagaaataagttcaagatatctactatgcaacatggtgactacagttaataacaatgtattgtatacttgaacatcattaagagaatggattttaagtgttcttaccacaaaaaaaaagtatgtgaagtaatgcatgtattaattagttcaatttagcctatctgcaatgtgtacatatttcaaaacatcgtgttgtacactgtaaatatatagtttttgtcaattaaaaaattacatctcccttctcttctagtgcaagtttttactcactgagcatagttaagccttaaaatatttaaagctattttctttaatttcatattaaatagatatttaatgcatatctatctaatatgacgtacataatcccttcctggtggcatgtctccaaagaacatcttgttgattacattctccctccataaacttttggaaattaacaaaaaaaatttttttggagacaggatcttagtcatcaccaaggctggaatgcagtggcatgaacacagcttactacagcccccaacaccctgggctcaagcagtcttccctccttagcctcttgagtagctgggatgataggcacatgcaatcatacccagttaatttttttaatttttttgttttatagagacagggtctcgccatgttgcccaggctgttctcagactcctgggctcaagcagtcctcctgctttggcctcccaaagagctgggattataggcatgagccactgcatgcagcctggaagtaaatttagtagattcatggactacctgcagcttgtctgtggtccctactaaccattgacttaattgattttagccaagaaccattcacctgaccttttttactttaaaaaaggttgtatacctctaaagggtcaatcagagcagaggtttactatgaaaaggtatagaaggatatgacacaaatgaaattatttcacatttccaaatgtgaacttaatgagtaccttataaacctctgtggtcttagttttaccatgagttgtgaggggggaggagaggaggaggttgtaaccagcatttagcgtcaaggaccagggatattaaacatcctgcagtttgtgtgatgtttaggtgccagaagcatttttacccccaatacaattagcattcccactggaaaaaaaaaaaaaactactgtagataaagtataaatttctaaaacccaaagctctcttccagtaatggtggcctgtgtaattcagaataatcctcttaacaatgacaacttgaaaagatacacaaatataaagaacatccgctagaccaggcacagtggctcatgcctgtaatcccagcactttaggaggccaaggcaggtggatcactttagggcaggtgttcgagaccagcctggccaacacgctgacaccccatctctactaaaaatagaaaacagtagcggagcatggtggcaggtgcctgtagtgccagctactcaggaggctgaggcatgagaatcgcttgaacccgggaggaggaggttgcagtgagccaagatcatgccacttcactccagcctgggcgacagagtgaaaccctgtcccaaaataaacaaataaaataaaaataacatctgcttgaaggcatcagagccagtaaataattgccaagccatgatccaggagaaaatgaagtgagccagacatttgggaccattttttcctaagggcccttgttgattttggaagaaatggctgagaagctgatcagtactatcgatatcttatggggaagagggaaaattggaatttaagttttaccaaggtggattttttttttatataaagctctcataatttgagttgagaccataaaaggccacagcctgggagtgggtaaatcagaagtagactggctccctcgggaattacaatacagcttgaaatcatttcagtttcttgagttggattaaggtaattcttgatgctactgtctatccatctcatagaagtaaaagtatatcctctctgaaacaagataactacattctagacctccaatttgtctatgaatttttatatacctgccctgtactcaatcaaaaataaccagaaacgtgaggaccaaaactatatgaaagaaatgcaaaagaaaccatagacaatatgaaagaaccacaggggctctagcaaatagagttatcagatgcagttattaaaataactatatttgaaatagtgaaggaaataaatagtcaagactgagaatttgggagtgacattaatcagatagaggaataggaaattccagccctccctccgtgacagaaacactgatttaacaaagatttactgacaaaaatccctgcatgacaattccagattctagtcaagaaattacagtacctcagacttgcacaaagcagagaatagcagcattgaaatgtgtaaatagagcaattttatgttacctgtatcagccccttcctcaactctctcaggcttgggggtacagggaggagggaagagtggagcttgcatcccaaattctggctgttgaggaagctgcctaagggacttgtttctgtgttgcctctttggaagcacaagcaggagctgacatagtttggatgtctggggggctgagaacaaagaaggggtttggggagatgcttgctgtgacctgcacagcttggtgtgattggaagaaggcacacaacttgaggcttatcaaccttggcgagaagtgggaggagcattttgtgttgagacttcagagtgcttccctgagtactggtaaaaatgtgaatgaattagacctcttattcatggctaataggaatatgaaatggtaccactatcttggaacacagtttgactattttaagtttaaaaatgttcataaaaatatttgtatatgaatgttcatagccattttatttatggtagtgaaaaactggagacaaactcagtgtccaccagtggtaaaggataattgattatggaaatggataaagcatctgtggtatgttcatacaatgtaatactactaagctaaatgaaaaatgaatggctgatacacgcaacatagattaacctgaaaataattattttgaatgaaaaatgtcagaaaaattatatacggcatgattcggtttctctaaagttctaaaaaatgtggtctaatctatggtgatggaaacaggtcactggttgtttcatggataggaagagcgagattacaaagggacatgaggaaactttctggatgatatttgtgtatacagtcttgattgtggtgatggttttataagtatgtacataagtcaaaatgtatcagattcttaaaaaaaaagaaaaacatatattcacaccaaaacttgtatgtgaatgttcatagcagcattatttataagagtcagaaagtggaagcaatccaaatgtcattcagctgatgaatggataaacaaattttgatatatccgcacaatggaaaattattcagccgtaaaatggaatgaagtattgatacgtgctacaacctgggtgaatcttggaaacatgctaagtaaaagaaaccaggcacaaaaaccgtatattatatgattgtgtttatgtggaatgtccaaaataggcaaacacataggggcaaaacagattagtgattataaggggctcgagggatagggccgtgagaaataactgccagtgggtgtggggtttcttttgaggaatgaaattcttctgcaattggatactaatgatgcttgtacaacctcgtgactacactaaaaaccactgaattgtatactttaaaatggggaatttatggtatgagaattaagaaaaaatgttactgttagaggcttgttaaaagaactcaggagccatcttgaagaggctcacaactgatctaagatgatagaatttgagcttcaaaaattacaataattgcagttggttgaaacccagcaaatattttaagatccatgaattcataatattaaaaagggattgtcacctacctcagaatatgataaagaacaatttatcttgaaaatttatcaataaagaaaaaaatgataaccaatagtagttgagggcaattatcttttttagaaagtcttctaattaataaagatgaaagaaatgatggaaatagagtatcattttgcaatcctcaatgaaccaagatctaagtatcaacagctgttaccacagaaagaaaaacaagcaagtattatgtgccgttataaccttaccaaacactacttattgttttgccaaagggattaaacctgagtctgatcacagaaaatgtagaaaatagaggaacacattaaactgcaccaagagaatgtaattaccaaaatgcaggctgttggaaactctcttagtcaaatgtcccaggttctttaacaatctagaggttcctcaacctcgagattgaaagagatttaaaagacatccaactttttaatagagtgagactaaactatagtgtctacggatgtacttttgggtgataaaaactgcctatagaaaaaaatcaggaaagtggataaatattaaataaaagcatggttactcttggcagtagagaggagattatgatgggggggtgggtacataaaaggggcttccaggggcttttacttttgctgggaaagttctctttcttgatgtgggtggtatttttaagataatttattaagccatacatttgatttgtgtggttttctatatctgtgttttataataaaaagatttttttaacttgtaaaattatttatgtcctttatgtgcataactaatatatttttaaaaccttaaaaatatgtatttaagcaaaatacagattttatccttctcacataacaaaaagtctacatacaggtaggcagtccagggctgatgtgtattgattctggaatatcttcagggacgttacagaaattctatcctatgcttttttcccctgtttgtttataagaagtttttcctaaaacttacatgtcttattattcttgtgtactctatatctggcataatgcctcaggtacaaaaggcatcaatgtttattgaataaatgaaagaatgcactagctatgaggaagtggtaaccatattgtagatttttctgtgtactgatgaagtgtgccggaatacataataattggtcatttgaagatcaaattttattattttattttactctagtattttcagcttcattatcttttgcttgcatgttctaaattcacttttttctgggaaagaatggggaaaagataaggaagcaaagcagaaagaaagatgcagtgcagtgtgcagagttgttgtttccaaagcacatggtggtgataattctatataaaggcattctcttatcacctgtcattttgtttggactttgtcaaaggccaatattaggccattatcagagttcacgagctgggttgggggtagtggtggtagcggattttacaaagcacagacaggaagcagataagactataagatccttttgtaaccttgactagttttcctgtgaaaggtctaaatgtaatgatagcatttcctttgttcttctctctaagaattgttatgataatgaatttgtttttcacagtttaaaaggtctctgtgtttttctgaaataattatatggactctgccattccaagcttcactccctacaatttcctcttgatcgccttcatctcttgtttactgtcttgtgtttatttggtttttggtttttttgttttttttgtttttttggcagcctatgtgaactatttttgtttacctgaggattagtgttttaagtgtactaacaatgctgggatttttaatgttaataagtttgtattcacaggaactggtttttatagaccctgtgatattttaatctaatccatacccgtttaaacttgggtgtccctccctgccccaaataatcttgtaaaatgctcttgacatcttttgtcatgtctgttcacctgtaatttggattttactagaacatgtactagttttagaaaatgtatccaacagttttcacagtatactctttaataggcatttttgaaaactgactaaaatgatcctgggccatcagctatcaacactttgtttccacagttaaaccacattaatcttgtatcatttgtgtttgtacctttttctatgcatgctttctttttacttgtccatggttaactttggccagttttttattagctattgatgggtcagtatgtctccatcgatgatctctgatattaaatatagggtttttttttaaagttcttaaaaaagtttttgttcagtttgtcttacaaatattattcttactttgtacataaaagttattaaaatgttgactgtagccattccttgctattcagcaagttgtttcagttttaaaatgctttaatggaaaacctttggtagtctcacttttgtctttccctggaaaaacttctctctgtgatactatgtgattatttttgaagtgataatgttactggcagtgaacccataggagtctgcagcaaaaattgttgcctcctcagaagaaaaaattcagccaaggggcctaaggcagagtgagagaccaaggcaagttttagagcaggagtgaaagtttattaaaaagctttagagctagaacaaaaggaagtaaagtacacttggaattgggccaagcgggcaacttgagagagcaagtgcacrgtttggcttttcgacttgggattttataggttggcatgcttctgggtggttgcatttctcctcccctgattcttcccttgaggtaggctctctgcatacacagtggcctgctagcacctgggaggggcttcacgtgcagtgtgtttactggagttgtacacatgctcactttaggcattttttctttaccaatccagtgttcctagaggaaggtcatatagcagttaaactctgccattttgcctcttactgcacctgcgtgagctcactcacccaactcctgagctcttatcaggaagctgccgatcaccaatttcaggtatttctatcttgggaaactgcccttccctggcaccactgtgaccaattattattttagagagagagtttaacaacttacctgaccatcacctgatggtcgcctgacattcctggttggggttgggcaggggaaggaggttctcctgctctgcttatgtctgtctgaatatctactataacaataagaacatttgtaggagccttaaaaataacttacgttcctaaaacataaagatgaaaagatgccagaggtaaaaatgaaagcttaggatgtgtaaaaatgttttctttaaaagaaaatactgattggtaaattgctgaaccatccaattaatgcatcaattgtaggatgatttttatcctttttactgaaatgatcagcatctagggcctcagatcatgtttctgtcttagttttctcagcttattcatatagcattattacttgttttaatcttattctcacttataaggggaaaaaatgaagtcgtcttttttttttcaatgtttgaccttgaaggaagcttgcttagttttctcatattaatctgtcttttgtcataagggtctgtcccaacaacaaacttatcagggttaaaaaaaaatttaaagaaaatatatttcctctcctatcataaaaacayagtttgcaaatttgagtacacaagattttaaactattactaataatggcatcttgtgccctattttactgtatctatgattaattattttttgacagttgaatatcagctatgttctttggggatttgaagcaaattaaatctccttgctagcccactctggggcacttttctgaaggaactgcttaccacgtgtaccatgtgcttaccttcagaggcctaaggatctctaacgaaaactgttccaatgtaatttctttctaataaatggcatgggagtctataagaaagttcccgtaatgcccttctgcttatatgatggtagaagtatgttttttttcacaaaatgtttacaaagccattattatgtgccagctcctgagttagtcactggggatataaagatgaacaaatcacagctcttaccccagatgtacttttagcctaatggaaaaacaggtatcgttttaaaactatagtagaatataattagcacaataatagagataccaagagcaaactcttacttgctagaaaagtaaaataagggcattctagaagaagaagcatatttagcattataggaaattatgaaaggccctcatggaatagtaagatgtttggtgaagcctgagaacagggttttaggaaatagtcagaatgttattaagaaactgattgcttttcatttcaaaattaaaaattaaatatttatgctagttctataaagaaaccgttgtaaaaatatcaaagactgacagtcattgaccaattgagtccttgttgactggtgtactatgcttgctcaaatcacatgtgaagaaagtagttgctacatgatataatctgaggaaagttcagaaggatcctggttcaaaactgtcctgcccattgtccttttttggcacgtagatgctaatattaaatagctctatctttgcattgaattatctataaagaatgtaaatgctctaaggcaagagagtcattaggtatcgttcttccttgtcacaaagttctcttgtctaaaatttctgtttgctctttcagcattttagtggttaatatttttataaaatatggctactccaacatttaagtacatagcttccaaatggtggcaggatgaagtacctttttttttcctgtgctctgtaacatttgatacatagctctattattttatgttttaaccgtttatttaccagtctttcgtcttcactgaactgtgagctcctaagagcctgtctcatatttctttatatccatccctagaattttatgattgatgatatatctcagtagttcagtaataatgtaatagtggcagaagggaagaaaggggaaaagaaaggaggaagtttgaattaaaagagttgtttctgccaggacagttccctcttatttgttccttgcataattctccagttattctctgttcttcttccccactgcttgctgctctactcacaaggctccttttgcttcctaattcttaaatttagaattaaaagtagataaaaaccaagtcaagcagaacagacatagtctaggaatttgggtcattgaaggttggaaaaatctgatgttattacctcagagctagaaaaacaattagaatgttcaagaaggaagtaaagatgctgcacctttttacacagttttggttgaattggccttttatgtatttgaattatttttagtcatatgtgtttggtaattgacttcttatatttagtctcccacattgctaagctctatttgtgtgtgtaaaatatatttaattcatgtcatactcagggggttgagtctgtgttcataaggactaaactacacctcctttcagatgcccaatttaccacactttttacttttttacttagaatacttgccatatctatcatatgtggaaataatgctaaatttgtaacagatagtaaacattacctctcagtgataaatttgaaactttatataaagttttagttaatccatgaagttaaggatattgtctttattcactgctatattctagtgtctggagtatagtacacaataaatactggttcagtgaatgagaaacctcctttttcatgacttacattaagctgtgaccagaactatactgttttccccgttgtgggttggccagaaagaactataataaattgtgcagggctttttgaactatattctgttttgaaacatggtcttcagttccactgtttatccatttgaaagctgagacatagtcttctatttgtgtaacatatcattattattcagagaatgcaggagtctggagaaagttctttttttctttccccaaaaaagaaacaaatacatttgttaacatgtggtgcaatgaattttagaactctaacctttcaagaaaattgagatcaggaagccatctttcagaatgttttactctttgaataatcaacaggatgtatatgtatcattgtagtgaaatcgctagtaattatcactggcatgtctgtttttcatattttcttctcccgtgttattgtgcagctttgaatggatgttgggctacagaaggtgagacaattcagttatatagaaaactgattttgacttacaaaattaaaagaaactggatttctcaatagctatgtaactgtgaacacagcaacaaacactgctacataggaataaaaatcattaatgtaatttaaaatatttgagattattaattatgtaaaacttgccaggcacggtggctcacgcctgtaatctcagcactttgggaggccgaggcgggcagctcacgaggtcaggagatcgagaccatcctggctaacacggtgaaatcccatctctactaaaratacaaaaaattagccgggcatggtggcccgtgtctgcagtcccagctactcgggaggctgaggcaggagaatggcgtgaacccaagaggcggagcttgcagtgagctgagatcgcaccactacactccagactgggcgacagagcgagactccatctcaaaaacaataataataataataataatgtaaaacttaagaaagcatgtgacatttaagaataaagaatttaagtagtatttcaattaggcttgggtaaattgttttgtattatactattaattttctggataatgaaaaacttaccctttaagcactagaatattgttcctatctcatttctacattatgagacatatatcctctcagtaaatatagtatagcattgcctcccttgacaatatcaactgattgtttttactaatatgagtaacgtaaagttccttacaactgcaggcctcccttcttcacaatttatctgatactaaatgatactgattatgaatattattttctgatgaactacttgtaaatcggttatcctttttttgtgggatagggcagagtgttcagataagagcaaggtgggggccaggcatggtggctcatgcctgtaatctcagcactttgggaggccgaggcgggtcgatcacctgagatcaggagttcaagaccagcctggacaacaaggtgggaccccatctctactaaaaatacaaaaattagctggagtgatggggggcacctgaggcaggagaattgctgaacccgggaggcagaggttgcagtgagccgaaatcgtgccattgcactacagcctggtgacagagtgagactccgtctcaaaaaaaaaagcaaagagggacaagtttttccccagagtcttcatttaaaaagactagacttgacatgacatacagattcttcataaatttgtctttggccaaattacttgtaggtctgttaatgccatttgcttcctcactcttctgtcagctttgaatgctatgcttttcttttctccttaactaatgcatctctgtcaaaatctacctcaagggtcagtccctttaggaagctcccaccccaggtggaccacgataacctcaggagtcattaatagggtggcaaaagatttaccttcagagtaatatagtatgactgctcatagtcaactttgaagatagaaggaaaccacaagacaaggaaygtgagaagtcaccagaagctggaaaatttgatcacaggacttccacaacagtaaaataataaatttgtcttgttttaagccaccaaatttgtggtactttgttatagcaaccatagaaaactaatacatccacagactttaaaaagtatcactctttattttaaatagtttgactcacaagaaataactaaattcatccggagtccctatgtatgcagtacccaccttcctataacaatattttacataatcatagtacattatggataccaggaactgacattgatacagtattattattttattattattattattgagacagggtgcgtcttgctttgttgcccaggctggagtgcagtggtgcaaactcagctcactgtagcctcgacctcctgggctcaggcagtcctcctacgtcagcgtccacccaagtagctgaaactatgggcacacaccaccatgcctggctaatttttgtattttttagtaaagacgggatttcactgtgttacccaggctggtctcaaactcctgggctcaagcgatctacctacctcagcctcccaaagtgctgggattacaggcatgagccactgcaccaggcctggtacagtactattaattgagggagggaatgacacttccctaagtgtatcttcttgtattattttgacttctggtagcatatttgtgtcttacatatattaaaaaattcaattaggataagaagaaaggaaagaaaatattaccttaaaattaaaagcatatgtaaacaaactctactgtcattcaaataatgtaaccacactgaagagggaaaaaaaactaagttactttagtaacttatgagtatttgactgtacaaactcagctttggacagttttgggaagagaattgcaaacaaatagtgaactccattttcgtttttttttttttttttttttttagttgaaatggctgaaacaattctgaagctcttttatgtgtaatacaggatttagcaaatgaataagtatgttgatgttattaggttccagcattctcagtggaagaaggaacatacaaatatgaattgggatagtgagggataccctgtggggatggaatggaattaaaagtaatggcatagactcaggatttctcaaatacatatgcatgtatatgttctcatgtatgtatgtgtatgtatatatgtacatgcatatatttcctagctccatctataggcaaaagtggcctagaagcaaagtcaccccagtagaaatgatctaacacatgccctaacacctaaaattttggtctttgataccatttctcaccaaagagaaccaggactcttaggagaaatggttggactagggctaggacagggtaagtacaatatgagcctggaaaaataaaagagctctgtctcaaggacacaggaactaagttaaagggctcctactgcataaatctaggacatgtttagcaccagaaaaattaaggacagtagtgacttacagactgttaggaaaaagtagatatttatgagtccacactgataatgaatgaatgaatgaatgagcaagtaagtagaggaaaaggaggactctgctatgtagaatgccaagtgctgactgggaaatacagagtgagtgctgcatttggaaaattataatcattatagtaaagatctattcaggcagaaattatcagtagatgctaaatctagccaggcattttggtgagagatgagatatttacgtggtcttaaagtgtcttgatacagattgctttttagttgcaggaaaaataataagtattcattggagaaattggacagcattggacaaaatttaggagacaaaattaacatcaccaaagacagtacaaagagtttagcaaatcctttcccccaaagaaccagtataaactagacaaagttgttgaatacaacaatttcagggctctggaaattgaccaaaagcaaatgacaaatttggaaacatttattcatgctagaactttgtgtaaaaacagcaggagtctgcagcattcttatctggtggttgccccctctcccctacatcccagctttgtcagtgagactggtagtggcagagtagggctgggtagaaaaccagctttgctaccagatggagtggaatttatttgggatggagggctaaaacccatggcatcattatcggtaaaagtattgaaaccagtaggagatgaaaggagaaaaacgtcagatgcctgtctgaattacagtcatagttggggctagtggcacatcagccagaaatttaacagagaaattgtgaagaggagaaagtcttagaagaactagacaatgtctctatacatgcctggctgcctgggaaactatgcacatgtctgaaactgaaagcatacttaaaatctggctaaactatgaacgtgctccaacccatgcaaaattggtcagcagtacgtagaagctttattggctcaaggtatttgagtacaacctctgcccaaattatggactgaccaagtgaaccatgcaaacacagggataacccctaggaagccaagctaaaccataaaaataaaaaattttaaaccagacatcagcagcctaacattacaagcagattttgcagcttaaagcagtgagcaccctctcaaagaaaaaaaaaagctttcaggaaaaaaatataattcaaatttagtgcagtatattatttataatgtccaatttttaccaaaaagcaagaggcattcaaacagtgaagtgtaacccatactcaggggaaaaaaaaatagtattaactgactttgagcgcacatactggatttagcagataaggactttaaatcagctgttataaatatgctaaaagaattaatggtagccatattgaaagaattaagacaaaatataatgacagtggtcaaaaacctaggcaatttcagtagtgaagtaaaaactgaaaaagagccaaatagatattatagattgaacagtatgataactgaaacaggccaggcatcgtggctcatacctgtaatcccagtactttgggaggctgaggcaggaggagctcttaagcccagaagttcaggaccggcctgagaaacatagtgagaactcatctctacaaaataaaaaactagccaggtgtgatggtgcaccccttagtcccagctatgcaggaagctgaggtaggaggatcgcttgagcccagaaggctggggctgcagtgagctgtgattatgccactgcactacagcctgagcaacagagtaagaccctttctcaaaataaataactgaaacaaaaaattcactagctgagcttaacagcacatttgagatgtcagaaataaaaatcaataaaatttggtgaaagaccaatagaaatgatccaatataaaaaacatagagaaaaagattgaaataaaaataacagattctcagagacctttgagacaataataccttttaggtacagagcatctccattggatgcatatgggggtgattagaaaaacgtatttgaagaaataatgctcaaaaacttagcaaaatttgttgaaatcattaacctgtagacccaagaagcacaatgaagcccaagttaacagtaaaaaaatccccatgtagacacagcatgattgtgaaactggtgaaaggcaaacccttgagaacagcaagagaaaataattcatctatatgaatcaatagaactataatattattgcagcgggtctctcaacagaaagaacgggagccagaaggcattgatgtgacatattaaaagcactgaaagaaaaaaataccaaacaagaattctgtcactggcaaaactgtctttcagaaacaaagataaaatgaagacatttccaagtaaacaaaaacagatttatcgctagtagacctgctctataagaaatacaaaaggaaggccaggcgtggtggctcacgcctgaaatcctaacactttgggaggctgaggtgggtggatcacttgagcccaggagttcacaaccaacatggcgaaaccccatgtttacagagaaatacaaaaattatccagatgtggtggtgtacacctatggtcccagctacttgagaggctaaggtggaaggatcatttaaacctgggaggcagaggttgcagtgagccaagatcgcaccactatactccagcctgggtgatggagtgagactatgtctcaaaaaaacaataaaaaataaaaacaaaaggaaatccttaagactgcaggaaaaagagactagttaataattcgatttcacacgaacaaacaacactagaaatgggaaatctgtgggtaaatagactatatgtgtatttttttatttcttctcttagtttttaaaaaagcataaaggaatctcaagcattcctatacaccactaatagacaaacagccaaatcatgagtgaactcccattcacaattgttacaaagagaataaaatacctaggaatacaacttacaagggatgtgaaggacctcttcaaggagaactacaaaccactgctcaaggacataggagaggacaaaaacaaatggaaaaacattccatgctaatggataggaagaatcaatatcgtgaaaatggccatactgcccaaagtaatttatagattcaatgctatccccatcaagctaccattgacttttttcagaaaattagaaaaaactactttaaatttcaaatgaaaccaaagaagagcctgtatagccaagacagtcctaagcaaaaagaacaaagctggagacatcatgctacctgacctcaaactatactacaagactacagtaaccaaaacagcatggtactggtaccaaaacagatacatagaccaatgggacagaacagaggcctcagaaataacaccatacatctacaaccatctgatctttgacaaacctgacaaaaacaagcaatggaggaaggattccctatttaataaatggtgttgggaaaactggctagccatatgcaaaaaactgaaactcaacccctttcttaaaccttttaaaaaaattaactcaagatgccttaaaaacttaaatgtaagacttaaaaccattaaaaccctagaagaagatctaggcaataccaatacataggcatgggcaaagacttcatgtctaaaacaccaaaagcaatggcaacaaaaaccaaaatagacaaatgggatctaattaaactaaagagcttcttcacagcaaaagaaactatcagcagagtgacaggcaacctacagaatgcgagaaaatatttccaatctatccatctgacaaagggctaatatccagaatctacaaggaactcaaatttacaagaaaaaaacaacctcatcaaaaagtgggtgaaagatatgaacagacacttctcaaaggaaggcatttatgtgtccaagaaacatgaaaaaaagctcatcatcactgatcatcagagaaacgcaaatcaaaaccacaatgagataccatgtcatgccagctacaatggcagtcattaaaaaggaaacaacagatgctggagaggatgtggaaaaataggaattcttttacactcttgttgggagtgtaaattagttcaaccattgtggaagacagtgtgatgatcctccagtatctagaaccagaaataccatttgacccagcaatcccattactgggtatatagccaaaggattataaatcattctgtaaagacacatgcacacgtatgtttattgcagcactgttcacaatagcaaagacttggaacccacccaaatgtccatcaatgatagactggataaagaaaatgtggcacatatacaccatggaatactatgcagctataaaaaaggatgagttcatgtcctttgcagagacatggatgaagctggaaaccatcattctcagcaaactaatacaggaacagaaaaccaaacaccgcatgttctcactcataagtgggagttgaacaatgagaacacatggacacagggaggggaacatcacacaccagggcctgtcagggggtggggagggtagggaagggacagcattaggagaaatacctaatgtagatgacaggttgatgggtgcagcaaaccaccatggcacaggtatacctatttggcaaaccttcacgttctgcacatgtatcccagaacttaaagtataataaataaaaatatatagaaagcaataagtttaactgttttgccgttgtaacatatttaaatgttatatatgacaataggaacatatccagacctctggattaatgagacagtccatgggcagttcacccttgtgtgtggtttccttgaggcataagatcgcagttcaaaaaggggatgtctgccctggagcctctagtctaaataaaatatctctacccaaaagggctatgggacattctagcaacactaaaaatgagtgagaaaagacagttcccccagataggcagcacaaaggaggagtaaacctcctggttatgtgcaccgcatttatccccattatctggcaggatttggaggataattgcccaggaaaagaggtaagcattgagaaggctgctccagtgtccaaaagaaaacttatagtcctacctgccacatgcaaagcattccttggctctgtcccttcaatagtgatgtttgatctgggagccagctggactgtaggcccccctcagctcaagacaaaggattctctcccaggagccctccagccctcagggcagtcctatttccagttgccaagcttgtggtggagggggcaagccatgcaaggctttttcccatctgtcccattgatgcagttggccttccagtggcctggcttctcataccaatgcaattatttgggaagatattcctagggcaaattggagggagctggtggasttgtaagacagccaatagttggagctgccacttttccgtttgcctctccttttcctgagccctttcttcttccttctggtccttgatgtaaaagaccaaggcaactgttttgagaacatcaggcataggggtattggggcccagtgctagcttttggagtttcctctgaatatctggggctgcctgagttaggaaacggtcctgtaggaccagttgcccttctgatgtctctgggtctaggttagtatgtttcactagggcctcttgtagcctctctgtgaaagtgatggggttttcaagagggccttgatctattaaggccattgtattatagttcacagcctttgttctgctagcttttatcccttctaccagaggaacatgcggtttcttccccatatacctccctgggtattgtaatcccaattggagtcaaccggaggaactgtgatggctcctacagggtagccacccgggtcagtcatatgcattggatttgcaaattgttgggccacctccataatggaatcactttctcccttagacagaatttgccctagtatgactgagaaatccctccaagtgagttcaaatgttaatcccagtttacagaaccctttgatgtatttgtcagggtcctccataaagtcccatagttctgttgtaatttggctcaggccttacatagtgaatggagtctggtttctagtgggtccactggggctactgacctcttgaagggggcgtgacctaagagggtggtgtccagaggatagccctggatatggaggggctccgggcctgggagacttgaatataatgaggtagaaggggcagtggggtttgagccgtcatcttttgctcctctggggcttgaaaccagggtaaacccaataaggagtgtcccgaaccagccagagggggctgcctgactatggcagctatcatcactagatccattttacaagcccaacaaaggtcagggttgtttcatagggctatgaaggcctgtacataggggatttctatccatattccctgctggcggcaaagtaaatctagttgatagatcatattaaaattttggttttctgtccaagattcctggtcgtggagcttgtattcaattcagtctgtgttacagaaaaatattagcctttccctttttagggttttggagtcaaacttttcccagttcttgagaatgcatctgaggggcgtgttctgtggtatgaagatgcagttacccatctgtgaagagagaatagatgagaaaaaaagaaaaaagaaagcgtcttctcttcctattatcctgaatagggcatcccctatttgtccttagggttctggaatgagctgatcttaccatgtacccttaacttcggtacgcccttttcacagaggagataccagagagaacagagagccctctcctgttcatccgtgcggttccagaatgaactggtcttaccacgtacccttaaccttgccttcatctctgttataatgataatctgttaacccgagaccagccttcatgtctgtcgtatgggtctcttgtgccgacggccttgggccatcctatattcttgcctccatgaccttccagtgactctcaacttggagcattcttgcaacaaaatgattatcccttttctcagattcccatttcctttgttctctaactagacaagaagcttgattttcagctaactgctgcaagggggctgaacttccctcccttcaaatatgaccttgaagattttgatcaatattgagaagggcatggaagtgattagagaaatggaagctccaggaggaagtgggaggaagccagaggaataatcatggaaagccttcttatgcttccaaaaacagcatcccttggatttgagagggyaacatttatttgtcttcttaacataaagtggtaacctctggaggacttagggcttgatgtaggaactcacaaatgggaaaggaagaatttcccctcctcccgaaggggtgctaactcaaaaaaagcaagtaagtggggtccttaaagggctagaatgaggccctatgtgggtggaaaactacttcaaaagccaccggaaaactcagccctggaccgtaacaggaacaaaaagcatatggtaagtcataaggagctgactggggatccaattagtgtctgtcctggcaatgtrccaacagacagaggcaggattagaggtcatctgagctggtaaggtaaaaactagtgttaagtctctagatagccacaagggagcccatgtttttgctgctgcacaaattcagcaagagctgagggtgtacaaataacagttacatggcatgcaaagtgaaagcaaaagaggctgacttgcctcgaggtggacggtccggagggtgtacaaggccatttcagaatacatacagagaaaacaggagaataggtggtgtgggtttttggaaaagagccaatttgagttgaaaaagcagaggaaaccccagacattgcatggttttaggctttagccctaccactctcatgaacctcttgtstaggagagccattgtgtctcaggtcaatgatcttacctgggaaggactccaaggtccttcctacccctgtgagctaccgtacatcagcaggagctgagagatgagcttgrggaacagagccactgtggccgagaagaattgttctgggggttggttagtaagcagaagaatgaaaagagcaaacgaaactgtgtacaggggttaaacacctccagccaaagaagttgaggcatagagatgtcttaccactgaggaagcatatttgagtcacgtggcaccaaagtatgttaacattagggaatgtatccaaatcacagcaccaaagtatgttaccgacagcaaatccatagaggtctgcagcaatctcaattcttgcttcttcagaagaaagaattcaaccaaggagcataaggcagagtgagagaccaaggcaaattttagagcaggagtgaaagtttattttaaagtattagagcaggaatgaaaggaagtaaagtacacttggaagagggccaagcagacaacttgagagatcaagtgcactgtttgagctttgactcgggattttatatgttgtcatgtgtccggggtcttgcatctctcctccccagattcttcccttggggtgggcactccgcatgcacaaaggcctgtcagcatttggtagggggcacatgtgcagtgtgtttactggaattgtacgcatgctcactggaggctttcttcctttaccagtccaaatgttcctagagggtcatataccagttaaactctgccattttgcctcttaactacacaggcatgagcccgctcgccaactcctgagattttatcaggaagctgctgatcaccagtttctgatgtttctgtctgttggaagactgcctttctgtggcatcagctatgaccaattattattttagagagacagtttaataatcacctgaccatcacctgatggttgcctgacattcctggtggtggcatgggggtgggggatcctctccttccctgctcatgtctggctagctacctgctgtaacagtgagacatcagtcaatatgcataagatgtacattggttgggtctggaaagacgggacagctcaaagcaggggagggggcttccaggtcataggtatataagagacaaaaggttgcattcttttgagtctctgattagccttttactgaatacacaatttacatgtgagaggaagatagaggaatagtcacttaagctttagtctggcttagtgaaacaatagggcagaggaagaaatcagatatgcatttgtctcacaggagtacagggatgactttgagttttgtctgtcctttgtccacaaggaatttccttgtgggcargttgtgagggaggtatgggaggtatgtagtttktttttttttttttttttttttaatttttgtagctatcttacttaggaataaaatggaggttggttttcctggtgcagttcctagcttgacttccctttggcttggtggtttgggggtcctgagatttattttcttttcacagctatataatcattgtgcaccttactaccctcactcaatattatacttgggagagttagtcatgataatacatacaatactagctcattcatttccactgttgtttaagtgtaccaaaaccttagtgggtttttaaaattcatgttaaagccaaaagaatattttttgcaaaatttgtagcatttattcttgtggatttaatatgaattttaaaaaccacttgaaaattgtatttagatttctttaatcattatttagtttttttccattattctagaaactatctggagggtagatttgaagggaataaggactggattaggaaaatcacttacgaaactattacattagtgaaaatgaatgaagattaaaatctgaactaaaaattctgatgtatcacatgggataagttggaagtgataagagggaatagcaattaataatagactaaggaaatttgcatgtcacatgaagaaataagctatgataaagggaaaatatagtattttaccttgagaaaacaaatggggactcttgctttaccgggtgtgtatgattaaagttgaagtgatataaagaaagataatttggttcagtaataaacaggagaaaataagaaatgatatatataacttcaatttcataagtatgtatatcgtattttctagagttgccactaaaaaaatagaaaaagagtttataaataccatactaacagaggggatgaaagaagagacaggagaaattgaaaagaaggaaaaaagagaagatagaaaaaataaaawccaggccaggcgcggtggctcacacctgtaatcccagcactttgggaggccgaggcaggtgtatcaccaagtcaggagagcaagaccatcctgcttaacacggtgaaaccccgtctctactaaaaatagaaaaaattagctgggcatggtggcgggcgcctgtaatcccagctactcaggaggctgaggcaggagaatgtcatgaacccgggaggcagagcttgcagtgagctgagatcgtgccactgcactccaacctcgatgacagagcaaggctccgtctcaaaaaaaaaaaagaaaaaagaaaaagaaaaagcataaaataagataccacatttatctctatatatagtgtatatctcaataattacaataagtatagatggattaaatgaaatagttaaaagacaaaagttgtcagactggattaaaaatatttcagttacagtctctgatttatgttcaatttaagatttttcaactttacaatgggtttattaggacgtaaccctatcattaaattgcggagcatttgtgtatgctgtttacaagaagtagagaaaggttgaaattaaaagatgagaaaagatatagtaggcaaatttcaacaacaaagctggtgtggtattattaacgtcagacaaacagactctgcaggggttagtttttagaacaatgctagcattctaaaacaggaacctaaatacaggccttagagatgaaattgaaaagaaggtaatagtgtttccaaacaactaatatgttcaatgagtgttacctgatttgaagaataaaggcaaaactgaaagtttgggaaaacaaatactcatagattatatggaatttacagtttaaccaagtattttccttcagagagtccaaaattactggctttttctttccgtgtatactgtctatgattgttgacaacacatataaaattaaatgcatttgtaagtccttgctcttatgttttcaggaattcaaaatgtcctcagcctcttttgtgcagtcctcacagaaaataaggttctcttccattctgcaagtttccagagacttagtgatgcttgtagagccctggaatctttaatgtttcctcttaaatataggtgaggttttcatttgttaattttatttattcctaaactacatatcacttatcgttgataagtcataatgttatggcacaatggttttgaaccacatagggatattttacaaagttatgctgttatatgagtcatagttctgataaaatctagtctagaatttgagactttccaagttgtccattactgaatgttgattagtgtaaaaatatttaatttgaatagtattgtcagcaacttttaacacaattggcataaatgtctagtcaatgctatttgatattaaagaattattaatttttagaagttataatgatagagattctattaataaaaagctcttatctctcttagatacccactgaagtgtattatatgggtaaacaatatgacatctggtatttgcttgaraataatacagtagagagaaaaaaagtgggtagaaatatatatgtagccgtgcactggtaattctcaaagttgacaattactgcagggcttcgttgtaattttttcctctgttttttttatgggatatgttaaaatttttttcytaataaaaactaaaaaacaaaataaaatctaaacagtgatgactaatagtgctgtaactagaatattatacctctaatatactgtttaatcaattgataatcataacatctgggaaattagttcatataaactagataaaattttagactccagaatttctttaaaaaaatttttttggccaggcgcagtggctcacacctgtaatcccagcactttggtaggccgaggcgggtggatcacgaggtcaagagatccataccatcctggctaacacggtgaaaccccgtctgtactaaaaaaatagaaaaagctagccgggcatggtggcaggcgcctgtagtcccagctactggggaggctaaggcaggagaatggtgtgaaccctggaggcggagcttgcagtgagccgagatcgcaccactacactccagcctgggcgacagcgtgagactccatctcaaaaaaaaaaaaaatttatttttaatttaggtgcttttcttaactttttagataaggtaattattggccccccccttttttttgccattcttattgaatgcaaaaatcaagtatagaaagtggaatttgaatgcttgttttatatagataaatcattgcctcatactgagaggggaggccctatcagagagtcagtgttactgtctaatgtcgggtttctatgtaaggaaaaatgctttcaaacagtactagaagacctaaagagactgcttgcctagaagaaacaaaggttaaggaagcaggcttggattccatttattttatgtcttatatctgattgtatctttcacatgaagatttttaaatcattttttccaaaattttagtattaaaaagcatgaaaacattattgataatttctaaacataggtaatataaaacttaacacagcataaagatgaaagaagatatgtttatgttaaagaaaaatatatttgacgcatatttttattatttccagttatccttatatccctattctcccggctcagctactggaagttctaagttccccaacgcctttcattattggagtacattctgtctttaaaactgatgtccatgaacttgtaagtattcatctttaaagtttccagttattgagtccagaagtttatcatatttctttgggtcctataacatttcaactcatcactattttcagatctgtagcatttccagtagaaaagattggatagaagaaaaatatcattgaaaagtctgtatattaattttgccatatagcaagtataggaggttttataaaggaatttattaatatttttaaatatccctcttttggtacattgtttatctttattattcatcttacatatgacaaaagataaaattctatttatacttttgatattagtgcataattgttttatattttgaagtgagacgtgtcttgataccaaattcctgataactaacaaagcagaaagcatatgcaaaagagtgaagagttttagtggaacagaagtttggtatgagcttccacgaaatttttgtattcttaatgccatatgaatagaagaagcaaaagtatactctatattcaagccagttctggaataattcatttagttctgtgtatcacactttatgagggactgtaacaaaataaagcacatcagaaaaggacatccaggattatcaagtatttagaaactatgttctgtaagggcctaaggaaattttctcaggtaataatctgatactatttgataggtaaargtaagtatttaagttactgtcatagaagaagggttgagattcattttttgtaactctaaaaggctgaaataaaatcagtggatgaagtggctatagaaacagatttctgcccagtaaaagtgtttccaacaattagaactgcctggttatggaatggatttccttatgtgagatgaggagtgtactctcaagcactgtaagtagagtgtaaggaaaagattatgtgacacttttcagagagcctgagaaaaattcttcactgtaaagttaggctgcatagcatctatgatccacagatccctaagattttgtaattcttcttctgttttagttttaaatgccagcaaagaagtaattatagttgtaaccaaatcagaggtgtcatttaaactaacaaaatattatttaacattataattataagcaggactttcattcgtatagtcatcattctttctaactttatatgttgatacttagttcctatttaattttggtatcactgtataaaaatatgtgtaaatcaataaacatttaataaaacctaattaatactagttagaagcatatccacctggtttgtacataattttatttctgctaaatataaacagtcactggaggccaggcacggtggcccacacctgtaatcctagcacttcgggaggccaaggcaggcggatcacctgaggtcaggagtttgagaccaccctggccaacatggagaaaccctgtctctactaaaactacaaaaaattagctgggtgtggtggtgcatgcctgtaatcccagctactcaggagggtgaggcaggagaatcacttgaacctgggaggtggaggttgcagtgagtcaagattgcaccactatactccagcctgggcgagagtaagactctgtctcaaaaataaatacatacatacatacatacatacatacatacatacatacatacatacatacagtcactggaggtaggaccaaccaagtgttgccaaataaataaaaacagtcgctggaggtaggacaaaccaagtgttgccaaatgcaaatttcttaaaatcgtaatgaataaattagaatgaagtataatattgtcaatataacaacttcactcatcttggttgttttctcttacacttttatgtaagttatttttaaatagacttttgtaaaatgctaaagatcagctttttctaagtggctaaacagcacccttttgatgtatactaattgttaattcttataataaatactaatttttttagaatattactaaactacttgaataaagtgtctcaaatgcaatcctctgtgcttgctgcagcagcatatatagtaaaatcagaacaaaatgcaatggctcaaacaaaataaagtgttatcgaacattcatgcagcagtccatagagatgttccattatgccagaccagtttgctctatgaagtcactcaagatccaagtttccttccttcttgtttctccaacagaatcctcccaggcattgtcatcatgtgtatgctgaaggctggtttgctgccagttaataatttcagtctaagggaaaaggaaagacagcataggagagctttacatatcccctgtcttgaaggacaggaaaacacrtgtcacttctcatgttttattggcagaatcttagccacatgccacacttaatttcaaaggaacctgggaaatacagggtaggtgggaacttgttagcccagaattctactactatggacaaacaagagtctcttccacatctgattcttctcgttttgaattagtcaagggaaaaataatttgcttaacaacaaatgtattttggtaattataggttaatttttttatctctttcagttagatgtaatcatagcagatttggatggaggcactattaaaattcccgaatgtattcacctctcttccctcccagaaccacttctacatcagactcaatcagctctttctttggtatgacatatttttgtaatagtaactttctctttatttaaatctgaagctaagatagctaaaattaaaaatgtttgtcaatgcagtttgttactttaatttaaagagagctatatatttgaaacatgaacataatctcatacagtatttagaattcttcatttactaggtagttatctaaagcatatattttggatcctaactgaatatttgttctacattccttccttcattcagcatacaggacctagtactgtcctaggtattggaaattcacctttgaaaacaaggctctgccttgaaatccctgattcccctaagatcccccattagatgttggcttctcttctctaacctccctattggcatctcattcctctttggtacctacaaaacactgtaatattgtcttgccaatactttcaggttattacagaaagatgtgtcatattgatacataaagtgtccaaaattcattctttttttttgagacggagtcttgctctgtcgcccaggctggagtgcagtggcacgatctgggctcactgcaagctccgcctcccgggttcacaccattctcctgcctcagcctcccgagtagctgggactgcaggcgcccgccaccacgcccggctaattttttgtatttttagtagagacagggtttcactgtgttagtcaggatggtctcgatctcctgatctcgtgatctgcccgctttggcctcccaaagtgctgggattacaggcgtgagccaccgcgcccggcccaacattccattcttaatgccatatgaatagaaataccaaagaagaagtatatgctacattcaagccaaataaagctttaaaaaatcttgtggcttgggtttttctcattgaaacaaatttaaatttttttgcagttattttaccttagccaaattttgaaaacagtattttgttttactgatagccttttaggtgcttmtgatcagaaaattgaactgtagaaattctgcattgcttttcaagatatcactagaactaaggccttaatagtctactttaagaatattttattctgggctatttaaaacatttttttccctcttaaatagaaacttagaagcctaggattaccaggagggattttattctcagaaaactttcaaatttgtgttagtctttttgttatcatggtggtatctatgaaatgggaacagttagagaagactgacttttccttatataatttgtaatctgaaatgcaagatgtgatagagtgcaaaagacactagtgtgggatacaggatacctgaattccagtctgtgttctgccacttggtattattgagaatcacatttttatctctaggctgtctcctggtctttacctgtaggttgaatgtttttacagagatgactaggtgattgtttgccaaaatgaagcatggtgatgatttggggtaatatgtggtcaaccttttttattttaataattatgtttttattataatgtgtacttaaaatagcatatagaacctgtcattgctcaactatcatctaagaaaatactgggtttaagaaggygagtttggcagggtgcrgtggctcacgcctgtaatcccagcactttgggaggccgaggcaggcagatcacgaggtcaggagttcgagaccagcctgtccaacatggtgaaacccccatctctactaaaaatacaaaaattagctgggcgtggtggcgcacgcctgtaatcccagctactcaggaggctgaggcaggagaatagcatgaacctgggaggcggaggttgcagtgagccaagactgcgccactgcactccagcctgggtgacagagctcgactccatctcaaaaaacaaaataaacaaaaaaagaaggtgagttgatttaaagacaatttaaagaaaaatattaactacataattgcatagatggtatatggatatagcaaaagctgagaaggtagtatttgaatgactgaagaaagtttaatgtttctagaattcctacagtgattaaatcttatgtgtggttacttactagtgatatgaatagttatttaggggttaagtagcaaaattaacaaagattaagattgtacttcttaagccaatggctcctggtaagggttctgctgcatactcgtatacctaaacctgcaacacccgtgccaccaaatttgatcaatgtgtaaaattcctttttggtaaaactgagtatacgtattgttatagttactaagcacagtggtggattagatactacttaatgtactgtgaataagaaataggagcatacggccgggtgcggtggctcatgcgtgtaatcccaacactttggaagactgaggcgggcggatcatctgaggtcaggagttcgagaccagcctgaccaacatggtgaaaccccgtctctaccaaaaaaaaaaaaaaagacaaaaaattagccgggtgtggtggtgcacacctgtaatcccagctactcaggaggtgagacaggaggctcacttgaacccaggaggcggaggtcgcagtgagccgagatcacgccgttgcactccagcctggacaacaacagcaaaactctgtctcaaaataaaaaaaaaaaaagaaaagaaaaaaagaaataggagcataatgtattgtcaaactagaccaaaaagagactaaatttcatggatgattgggagcattgacacacaagtatataagctttgtttcattcgtaaataattataatcaaatggcaacactgtacttaaactgtgtaatatggattattttgtagacactaagatattttgtactgtggtagtgattcagtgacttgaactgccaatattttagtgttgcctttaagtgttgctttgagtcttttggtctattctcagcatagcatcaaaaatcttagtagttgaaaatgattctgcaagaagaaaatttgctacatactgatataatttcatcttctctgtgcaagtcctwcacaggtccttctttcccagatgctccccaacctgctttccttcaaagcctaactcaaatgttactttgttttttgtttagtcttccctaagttgaattaattacacatttcatgtattgcactttatatatttttgcacttctgtgacatagttttatactttcacctgtctagactgcaaagttcaaaatcttattttctgtctcctcagtaatttttattttttttttttgagacagagtcttgttataactgtcgcccaggctggagtgcagtggtgcgatctcagctcactgcaacctctgcctcccagggtcaagctattctcctgcctcagactcccaagtagctgggactacaggcatgtgccaccatgcctggctaatttttgtattttgagtagagacagggttttaccatgttggccaggctggtttcaaattcctgacctgaagtgatccacccacgttgccctcccaaagtgttgggattacaggcgtgagccactgcacctggcctctcctcagtaatttttaattacacttagaaacataaaaacaagcagctgtttttaaaaattcaactatatagacaaatagctctggcctagattattcccttaccagaaatgactactattttatagtttagtgtatttttttcagaacttttcattttcatatatatatatatatgtacatatatagatttagggtttattttgttttattttcaaataaattaggccatactatgtgtatttttctagaacatgttttcttttctttttttttttttgagatggagtctcgctctgtcgcccaggctggagtgcagtggcgcaatctcggctcactgcaagctccgcctcccgggttcacgccattctcctgcctcagcctcccaagtagctgggactacaggcgcccaccaccacgcccggctaatttttttgtatttttagtagagatggggtttcaccgtgttagccaggatggtctcgatctcctgacctcgtgatctgccygcctcagcctcccaaagtgctgggattacaggcgtgagccaccgcgcccggccgaacatgtttcaactgaatattttgtcttggagatctttctacaatagtacatatagaactaccccagctaattgaattgtattcatggagggaatatattataattcatatgctgacattttcatcttaatgtctcaataatagatttcattgatattatgatattttacataacaaaacttttttgctttagattttacacccagatttggaagtagcagatcatgcttttcctcctccacgaacagctttatcccactcaaaaatgctggtaagaagtttaatatttaaatttaatgctgttaaagagagctgtatttttatttatagggttgttaaagaagctaagtgaagttagagttagatggacagcagagtaaaaagtgccccaaattagaaattaggatacttgccgctgactgtccttatgtcctgctcaaggaggagccacagggaagttcactgggcaagaggccactagggctaagactgttgccctgaggaggcatgagttaagtgtaggacagaaaatcagagcctagattatagcctggaaaactgtgccaagcatcaaattgaaatggccacacaaggattcaaaacaaaagagatgcttacaagaatggatataaagaatgttggttataggagagaatcaagtttgaagagtctgtggatgaaaatagtttcaattagaagccataaaaggttacgtatataacagaggccccttttttattttgctcagtgcatttcttagcagtgggctttgtagccaataaggaacctcagggagctgaacacatatacttaagcattcttgaccttcatttcctgatcaattaagtaaggcattgactaacagaatctgtaagtttccttacagttctaaactgtgattccaataaaagctggattaaatacaatcttgagagttttttcttcttatgtttggttgtgactgtaattgttttggtggatataaaaatcaaaggacttggaatatatgcccttttcacctttttgacttgatatttcatttgtttttaaaaagttaaattacctaacatttcttcttatatttttaggataaagaggtgcgagccgttttccttagattatttgcacaactcttccaaggatatagatcctgcctgcaacttataagaattcatgcagagccagtaatacatttccacaaggtaagatagagtactatattgtatctgtccaaaaaatatattctaatttaataaaactacttggttttttttccgagccatttattttgaccttgatttatcaaatgtgattatttaaaatctctgtgtggttagatatcagttcttaataataatatggaactcataatatcttagaatatgttaactttaaatcaatttttcttttaaaattgaatgttaatttctgatttcttctcctgacatgtagacagattcatttttattcttttcaatatatgtagtatttcagaataactctctttgagagaaatatattttatgacagcatatatttatacatgaagggatttatataggctttgatctttttattgtatttctgttttgaccatttgtccgttaccaagtgataaattattatttcacattttcttttttcacagacagcattcttggggcagcgtggtttggtcgagaatgatttcctcactaaagtactcagtggaatggcatttgcaggttttgtttcagaaagaggtcctccttatagatcttgtgatctctttgatgaggtatagctcttattaaatgaaggcattatttatagacataattagactagtagttaaaagtaaaaagtaacattttccatatttatatagtcaaatataaattaggtattaaataatcccaatgttatttattatgcttatcaaatctcgatattttaatgtggattataaaaattacaaaaaattataagatgccttggaaatacatataatttttgaacaactgaattttaaataattgaacaatgtatactactcaggtgatgagtgcactaaaatctcagaattcgccactatgtaattcatccatgtaaccgaaaaccactcatactccaaaagctactcatattttaaaatattacattttaaaaaatggttgtttaaaatatttttgaaaatttaatagtgattgtataaatagaagtcttatttttaaaggccctaatacagtaattcttttgtcagtgttttagggagaaaggtctaatttgaagctaagatagctgaaattacttcaaactggagttacatttagtctatcaaaatcatagagccatagtttaagtttgtggcattctcactaatcaattatcaacatttctctacctgtcttaggagacattaaatatatggaagacaaatttttgtctctatcttcaaggaattagccatataaagggagaaatagggcagatgtgactcaaaataaggatgctgttttgcatttattgtgctcttttttaaaagcatctttccttttatcatttaactctatattcacagcagcccactctggtggatagaacaagaatattattctcatttcartttttgaaagagtactatattagaaccaaaaatgtaaaaagtttcttgaaatctataaaagaacaacactcctagaacccaagatattggagaatcgtggcagtgatcatgttttgcttctggtgattttcttttatatagagaaggtaggaatcaaggtcttaaatatctttggttcagaggagaaggatcttttattttttgtaaagatagtgaagtattcacaggtaagaatttttaaagaagaggcacatattttagttctgtgtagaatatgtttactgcatcagatgctttaattaaaaacacaaagcatatgaagatttaggaaacatcctgaggtggacaagtttttctaatcaattattggtcattgattctctaatattaccatctaatatgattggttattgattctactaacatatcagcctttagattctgtactaagtaattcataacataatattttatgggattaaaatagatgctctccaaggtcttttctagcacctacattttgttagtctttgaagctttatgaatagtaacattggtttatatactctttcttttctattcaaatttatcttcctctgacagcttcatcacaactaaaaagtgagattagttacttgcagaaaacttgcttgccacagcctctatttttgtaggtctttcccttgcttggagtgccctcctctgttcttcatactctgctcttatctcaccatctcttccaaactctcccaaagtcgttgactctgagagccactcgactgcgttaggcttcattttgtctctaactttatatggtaacttattttttatttatttattgtttgtacaaatatagtctagattggaaacaatgataaggcaaggactctgtccaaggttcctactgagtcaccccttagtgttcatccagttctctgtttggcctacagtggtgactttgggtgtcttacttatgttacttgactgccagctaatcatatgtatgtatcagtcaagagcctaagaaaaatgagccatcagaactaaataatttctcattctaccctctttggccgtttgcatgggaatgctttggtagaaaaatagcatttgctcctgggaaagtgatccttgttttcacttagcctgaggcagcctaccacaatggggtgttatgggggctttgagaggcagcttgcattgtgcatggccttgtcctcacacttccatcagatagatgtcttagaatgaaaagaatgtttgcccttgacagtctttctttatcctagcctagaataggtaagccatagttttatatgcctatgcagtgagtctattagttcctagaagaatcctgtattgtacctttttatttttgtcatccatctatttacccccccacaattttttttttctgtcagccttcttttctttacccctaagtatacagactcacacagttctcccagtaaattagttaataaagagatagtttgagaactagaaggagtctaagggtcatcttgttcttccatcttattttagagatgagaaaactgaagcttaggagtttaagtgccttgtcccagatcacacactgtcagcagagctaggactagagtctgagcatcctgacttgaacatttggttcatgttttgtgagttaaggaaatgtttagacactttctgactgtctgaatttctctgactgaggcctgtggaatgacagggtctctctgagttccagaaatgacttttccctagaagaaatagggccctaaatcctcagggaggaaccactagacaattcaagggtttgattgaccctgtaaccccagaatggaggtgaaaccccaaaacctgaaatattttgttttaaaaataatgtatatgttggatttttttggcttgcaaattgtatgaaattatcacagtttttgaatttggcatattttggaattgatgttttgccatttgattctttttcctagttggtagcctttgaagtagagagaattaaagttgaagaaaataacccagtgaagatgataaagcatgtcagggaacttgctgagcaactattcaaaaatgtaagtaagtatatttatttagacagtcattaattttatttatttatttatttttccgtaagttattggggtacgggtgttacgtggttacgtgagtgagctctttagtgttgatttgtgagattttggtgcactcatcacccaagcagtatatactgcaccatatttgtagtcttttatccctcgcctccctcccactcttcaccccaagtccccaaaatttattgtatcattcttatgtctttgcgtcctcatagcttagctcccacgtatcagtgagaacatacaatgtttggttttccatccctgagttacatcacttagaataatagtctcctatctcatccaggttactgcaaatgctgttaattcattccttttcatggctgcacagtattccatcgtgtacgtgtgtgtgtgtatgtgtatgtatgcatatgtatatatatatatatatttggcacagtttctttatccactcattgatgggcatttgggttacttccgtgattttgcaattgtgaattgtgctgctgtaaacatgcatgtgcaagtatctttttcgaagaatgacttcttttcctctgggtgaaaccccgtagtgtgattgctggatcaaatggtaattctacttttagttctttaaggaatctccacatcattttccatagtagctgtactagtttacattcccaacagcagtgtagaagtgttccctgttaccacatccactccaacatctactgtttttttatcttttgattatggccattcttgcagaagtaagatggtatcgcgctgtggctttgatctgcatttccctgatcattagtgatgttgagcattttttcatatgtttattggctatttgtataccttcttttgagaattgtctattcgtgtccttagcccacttttggatgggattgtttttttcttactgatttgtttgagtttgttgtagattctggatagtcgtcttttgtcagatgtatatagattgtgaagattttctcccactctgtgggttgtctgtttactctgctgactgttccttttgctgtgcaaaagctcattaattaggtcccagttattcatctttgtttttattgcatttgcttttgggttcttggtcatgaaatccttgcctaagccaatgtctagaagggtttttccaatgttctagaattcttatagtttcaggtcctaggttttaagtccttaatccatattgagttgatttttgtataaggtgagagatgaggatccagtttcattctcctacatgtggctaaccaattatcccagcaccatttgttgaaaaggatgtcctttccccactttatgtttttgtttgctttgtcaaagatcagttggctgtaagtatttaggtctatttctgggttctctattctgttccattggtctatgtttttataccagtaccatgctgttttggtgactatggccttatagtatagtttgaaatcaggtagtgtgatgcctctaaatttgttctttttgcttagtcttgctttggctatgcgggctcttttttagttccatatgaattttagaattgttttttctaattctgtgaagaatgatgatggtattccgatgaggattgcattgaatttgtagattgctttcagtggtatggtcattttcacaatactggttctacccatccatgagcatgggatgtgtttccatttgtttgcattgtctgtgatttttttcagcagtgttttgtagttttccatgtagcggtctttggactcctttgttaaatatattactaaggattttaacttttttgcagctattgtaaaggggttgagttcttgatttggttctctgcttggtcgctgttggtttattgaagagcttctgatttgtgtacattaatctcagatccggaaactttgctgaattcttttatcagttctaggagctttctagaggagtccttggggttttcaaggtaaatgattataaccgtcagcaaacagtgacagttttacttcctctttaccgatttagatgccctttatttctttctcttgtctgattgttctggctaggacttccagtactatgttgaaaaggagtggtgagagtgggcacttgttccagttctcagagggaatgctttcaacttttcccaattcagtattatggtgactgtgggtttgttatagatggcttttattacattaaggtatgtccctcgtatgccagttctgctgagagctttaatcataaagggatgctaaattttgtccagtgctttgtctgcatctattgaaatgatcatttgatttctgttttttattttgtttatgtggtgtatcacatttattggcttgtatgttaaattatccctgcatccctggtatgaaacccacttgatcatggtggattatctttctgatatgttgttggatttggttagctagtattttgttaaggattttagcatctgtgttcatcaaggatattagtctgtagttttcttttttggttatgtcctttyctggtttgggtattagggtgatgctggcttcatagaataaattagggagagttccttctttctgtatcttgtggaatagtgtcaaaaggattggtactggtgtttcattgaatgtctgatagaattctgctgtgaatccatctggtcctcgacttttttttgttggtaattttttaattaccatttcaattttgctgcttgttatcggtctgttcagggtatctaattcttcctgatttaagctaggagggttgtatttttccaggaatgtatcaatctcttctaggttttctagtttatgtgcgtaaaggtgttgccttgaatgatcctttgtatttcagtggtgtcaggtgtaatatctccagtttcatttcttagtgagattatttggattttctgtcttcttttcttggttaatcttgctaatggtctatcaattttatttatcttttcaaagaaccagctttttgtttcatttatcttttgtaatttttttttgtttcaatttcatttagttctgctctgatcctggttatttcctttcttctgctgggtttagatttggtttgttcttgtttctctagttccttgaggtatgaccttagattgtctgtttgtgctctttcagactttttgatgtaggcatttagggctgtgaactttcctcttagcaccgcctttgctgtatcccagaggttttgataggttgtgtcattattgtcattcagcttgaagaattttttaatttccatcttgatttcatttttgactgaatgctcattcaggagcaggttatttaaattccatgtatttgcaggttttgaaggttccttttggcgtcaatttcctgttttattccactgtggtttgagagagtgcttgataaaatttcagttttcttaaatttattgaggcttgttttatgtcctatgatatggtctatcttggagaaagttccatgtgctgttgaatagaatgggtattctgtggtagttggatgaaatgttctgtatatatccattaagtccatttgttccaagatgtagtttaaatccattgtttctttgttgactttctgtcttgatgacctgtctaatgctgccagtggagtattgacgtcccccactattattgtgttgctgtctatctcatttcttaggtctattagtaattgttttataaatttgggagctccagtattagatgcatatatgtttaggattgtgatattttcctgctggagaaggccttttaccattatatactgtgcctctttgtcttttttaaccactgttgctttacagtttgttttgcctgatataagaatagctacccagccaggcgtggtgtcgcacacctgtaatcccagcactttgggaggccaaggcaggaggatcacctgaagtcaggagtttgagaccagccttgccaacatggtgaaaccctgtctctactaaaaatacaaaaattagccaggcatggtggcgagtgcctgtaatcccagctacttgggaagctgaggcaggaaaatcacttgaacctgagaggcagaggttgcagtaagccaagatagcaccactgtatgccagcctgaatgtcagagcaggactctatctcaaacaaaacaaaacaaaaaaaaacaactaaaaagaatagctacccctgctcgcttctggtgttcatttgcatgaaatgcctttttccacccctttaccttaagtttatgtgagtcgttatgtatgttaggtgagtctcctgaaggcagcagatagttgattggtgagttcttatccattcttcagttctgtatcttttaagtggagcattcaggtcatttacattcaatgttagtattgaaatgtgaggtactgttgctttcatcgtgctcttcgttgcctgtgggctttggttttgttttttgttattgctttttaacttgtatttttgttttgtaggtcccgtgtgatttatgctttaaagaggttctgttttgatatgtttccaggatttgtttcaagatttagagctccttttagcagttcttgtagtggtggtttggtaatggcaaattctttcagcatttgtttgtctgaaaaatgactgtatctttctttcatatatgatgtttagtttcactggatacaaaattcttggctgataattgtttcgtttgaggaggctgaagatagggctccagtctcttctagtttgtagagtttctgctgagaaatctgctgttaatctgataggtttttctttataggttacctgttgcttctgtctcatagctcttaagattctttccttcgtcttaactttgaataacctgatgacaatgtgcctaggcgaagatctttttgcaatgaatttccaggtgttctttgtgctgcttgtatttggatgtctaggtctcttgcaaggccggggatgttttcctcaattattcccccaaatatgttttccaggcttttagaattatcttcttcctcagatacagcgattattcttaggtttggtcatttaacataatcccagacttcttggaggctttgttcatattttcttacccttttttctttgtctttgttggattaggttaattcaaagaccttgtcttccagctctgagtttctttcttctacttgttcagttctattgctgggactttccagggcatttcccatttctaaaagtgtgtccaaagtttcttgaattttttattgttttctctttaagctatctatttctatgaatatttctccattcacttcttgtatcattttttggatttccttgcattgggcttcgcctttctctgctccctccctcattagcttagtaactaacctcctgagttctttttcaggtaatcagagatttcttcttggtttggatccattactagtgaactagtgtgatttttggggggatgttgaagagccttgttttgtcatattaccagggttggttttctggttccttcttatttgggtaagctctgtcaragggaaggtctaggactgaaggctgttgttcagattattttgtcccacagagtgttctcttggtgtagtactctccctcttttcctatggatgtgactccctgtgagccgaactgcagtgattgttgtctctcctggatctagccacccagcgagtctscctggctccaggctggtactgaggattgtctgcacagagtcctgtgatgtgaaccgtctatgggtctctcagctgtggataccagtgcctgttccggtggaggtggcggagggtgcagtgagctccatgagggcccttagctttggtggtttaatgctctgtttttgcgctggttggcctcctgtcaggaggtggtgccttccagaaagcatcaggtgtagtagtgtggagagggaccagtggtgggcggggcccttgaactcccaagataatatgccctttgtcttctgctaccagggtggatagggaaggaccatcaggttgggaaggagctaggcctgtctgagctcagattctctttgggcgggtcttgatgtagctgctgtgggggatgggggtgagattcccagctcactggagttgtgtacctagggagattatggctccctctgctgagtcatgcaagttgtcaggaaagtgggggaaagccggcagtcacaggcctcacccagctcccacgcaaacagaaggsccagtttctctcccgctgtgccccccagtagccctgagtctgtttccaggcagagggcaagacgggctgccagacgggcttgaaaacttgcccgaggctatccgcctcccagctgtgaaagaaaagtgctttagttcttcccctgcctgtgaagtctgcaacccggatttgcagcccccaccacccccggggcttctcaccccattcaaatagttaaaaagttcagctagagaattccttctccctgtggagttttacctgctgctcctctggccacccttctgagggatccctgtggtgccaggcaggaatgggctgctttgggacccggcaagctcccagggcctttctgctgctttctctacccctgtatttcgcttggctctctaacttgactcagctttaggtaaagtyggaaacttctcccacaaacagaccttcagcttctccggtgtgtgttcgggagaggagggtctccctttcccacttagacagttggggcactcacagtatttggggtgtctcccgaatcccgcaggagcagttcacttccttccgaggatctgtggttcctctccagattgctggtttgttcttgcagttgatctagagctgaaactcacaatgcaagcctccacatgcttctctgtctggagctgcaatctagtcctgcctcccatctgccatgatccactctatttagacagtcattaattttaaaaatatactgttaaataaagtattttgttcacagaactagaaagcttcctgtgatagtttttttgctctggattgtaaattatgagatattacagttggtactgtatatcaaaatagaccacatttttcaaagtaattttcctgtcagtcagtgtgttatgaaaacatgttagtcacaattttttcagttagtcatttgccctcattatggttttcatttgggtctcttgtaagacataaagattagactcactggagaacagaaccacctcagacagaaccgaccagtgtcctctgctttggcttggcactgcggttgtcagctggtcaggagttgcattgttttgaacagagggagcgaaaagctgaaagaaaaaaagcaaattgacaagtgaccacagaaacacaaggatgaaaatattccatggatagaggaaatgcagtaagttaaaaggactcggatgtggtaaagtgtgaaataactatttgaacaccaggaaagaaaagagcataaaatgacagagattatattcatatggaaaaatggatttgggctaatgagtgttccttatttcttctgctgtgaagttttgagtcctaagaaaagtaaagtaagtcagaactatagtcctccagggaaaagttgagggaagatgtgattttttttcattacgattaggtcctgactttagtaaacaaaaaaatattctggaagacagaaatgtaacattcgatactgtttctaatctaaacattgtcaaagtagaaattttcttttaatttgtggttctaacatatgctttatctgtatagcaaataactctgcaaagacaactcagccgatctaaatttaaagccatatcattgatttaaatataatattggcatccaaagattaaaatataataatggttatacattttctcattagtcttttcataagggaaatatagaattgaacattaaaatcttactaataagatggtggttattggttgtatatctcttgaaaaaataaaagaaattataaatcaagtaaacttttgtttttgccgatttcaaacgttttttaaataatttcaacttttattttagattaaggggcacatgtgcagatttgttagctgggcttagtgtgtgatgctgaggtttagggtacgattgatgccatcacccaggcactgagcagagtacccagtagtcacttttcacccctttccctactcctttcctcccctgtctagtagtcctcggtgtctattgttgccagctttaatgagtaccacttatttagcttctggggaagatgtatttttaaggaaatagtgaagaagaattcagggtcagtatcttgactcacaacaggtattgtttaatttagtgatttgactagatggacctttttggacactggattattagtcagtgctttgtcacattcatttgaaatttgagaaccaattggatacaagcagggatactaaaacatttgtttctttatgttattccattatttctgagttttaagttctacatttagaatgtgatctttctttgagggaataaatacttytttgaaagagaacaaagtaaagttcagaggtttcatattaaaacaaaaaaatccatcttttatgaattatgcttatctaaattttggtaaatagaaaattattgctgggcgcagtggctcatgcctgtaatcccagcactttgggaggccgaggcaggcagatcacaaagtcaggagatcgagaccacagtgaaaccccatctctacaaaaaatacaaaaaattagccgggcgcggtgtcaggcgcctgtagtcccagtaactccggaggctgaggcaggagaatggcgtgaaccggagcttgcagtaagccgagatctcgccactgcactccagcctgggcaacagagtgagactccgtcttaaaaaaaaaaaaaaattcttaagttctgttttatcaattgctagtggttcattataaattctggaaatagatatggtctgccagtaatattaagggagcagtaatattactaacacatgcagaaatcattagccataacatttcttgtgcctgttaaaagatgaatttaggctgagtgtggtggctcatgcctgtgatctcagcactttgggaggccgaggcaggaggattgcttggggctaggagttcgagaccagcctgggtaatatagtgagactccatctctacaaattttttttttttttttttttttttaattacaagaggctgggtatggtggctcatgcctgtaatcccagcatttgggaggctgaggcgggcagatcacttgaggtcaggagttcgagaccagcttggccaacatggtgaaatcccgtctctactaaaaatacaaaaattagccgggcatggtggcacgtgcctgtaatcctaaccatttgggaggctgaggcaggagaactgcttgaacccgggaggcagaggttgcagtgagccgagatcacaccactgcatccagcctagatgacagagcaagactctgtcttgaaaaaaaaamaaattacatgtggtgatggacacctatagtcctgcctgttcaggagactgaggtgggaggattgcttgagcccaggagttcagccaaggagtttgaggctgcagtaagctatgattgagccaccgtactccagcctgggcaacagagcaagaccctgtctcaaaaaaaaaaaaaaaaagatgaatttaatttcaattttaaattacttaacacagaagtactttaattgactgttacttgtagattattagcttctttactaagaagcaatattttcagatttctaaatacatcacacattaaatcataatactggtttagcaaaagtataaataaattatttttctggcaacttgcatgccaagatctgttactttaatttattgactgatcacatttttagttatttataaccatgcctgatataataaatgtgtttcctgattagtatactaaaacttaaaaaagaaatctggtagaattctgttagaaggaaaacttgtgttgtatgctggtctttgccacttatagtggctgtgtagaagtaattacagcatgatcatatgagaaatttcttttgacctattataataataataaatattgagttcatgtataaacatactgcttttctttccatgctcagttgatgatgcaggagttggcccactttggctttcagaatcttcagtgtctgcatgagagcagttagctatattgtgccaggcatggaattaagcactttacatacaattatctctcatcctcataacgacaatgtaaggcaggtgtcattatccccattttagtggggctaattggctcagaatcatatgactcttaagtgattaaatccagattttaaattaggaattttcatctattcatttcctaagcctatgttctttcactataaggctggatcgcctccaataggaaaaaacgatgtttccagtagttgactttacatgttgttctttttgtttgtttgagacaagatctcactctgttgcccaggctggagtgcagtggcacaatctcggcttactgcagcctcgacctcctgggctccagcaatcctcctacctcagcctcctgagtagctgggactacaggcgtatgccaccacacccagctactttttttgtattttttggtggagacggagtttcaccgtgttgcccaggctgatctggaactcytgggctcaagggatccactcgcctcggccaaggaggtcgaggcttgagcccagaaggttgaggctacattgagccgaagtcctgccaccacactccagcatgggtgataaagtgagaccctgtctcaaaaacaaaaacaaacaaacaaaaacaatcaaacaaacaaaaacatggacaatccctattctttaaaattgacactttaaaagtgatcatcgtgaagtattattattaagagattatattactaggtaagagcccttcaaatgtcttctacatttcataggccttattggaaatttttttcacaatctaattatatttcatttaatttaataaattctattagttaagtacttattagtgccaggcatattctaggtacrtaattctcctaatatccttcagaaaaggatacacagacatgacaagtaagaatttgtgactgtcccagtggattgtcattagattgtctgagattccttctagtgctaagattctgaagtccgtgatgacaaaatcatcattcatgaagtaaatactttataaagttaaaaaacagaacatgatagtaaagttactttcttaggttatgcaggaaattgggggaagggaggcaggatggtatcaatgcgaggaaaataatccacatggttctatttttaactagtcagttgttgtttttttaatcacatttctaaaattcccttttgataagcaagaaccagccatctaatttgactctttccttgttattgggttggaattgagacctggtgattccattcagatgtttgtaaatactttattgcactgaagtctggtatgtgtatctaggccctcttttcatttccctttgaagcacctcaaaaatacaccttaattttcctgtctcttctcaccactcctttatattgctttttagtgagattttaggaatgtgagtaggatgaattgtaactgagcttagctgctcttttagctttctggagcttcccaaataattaagaaaggcatttggtgactttgggggaatgggttaggtggaaggaaggagaaggaaatgactaaacccactagagacaaacagtgtaagcattggtaacaaagattattgtaaaaaagatattgtaacagagattatcggcaacacctctatgcagcttctttccattcccaattsataatgtaggagttggcctacttttttggctttcagaatcttcagtgtctgcatgagaacacaagtaactacttccctgccctatccctatgattctttttttttttttttcttaaagagacagggtcatgccctgtcacccagaaaggagtgcagtggcttgatcatagctcattgcaaccttgacctcctaggttcaagcaatcctcctgcttcagccttcctagtagctgggactacaggcacacatcaccatgcctagctaattttttgtaatttttttgtagagatagggtctcactatgttgcccaggatggtcttgaactcctagcctcaagcagtcctcctacctcagcctcctaaaatgttgggattacaggggtaagccaatgcccctggcctctatgattcttgatatgcacatataaaggaccactaataaatgttttcacaaagtgagaacattaagataggccaagacaaaaagataggccaagacaagaacttcataaaacttctacttcagggcattaagaaatcagttgggtggggtgcggtggctcacgcttgtaatcccagcactttgggagactgaggcaggtggatcacgaggtcaggaaatcgagaccacggtgaaaccccgtctctactaaaaatacaaaaaaattagctgggcatggtggtgggcgcgtgtagtcccagctactcggagaggctgaggcaggagaatggcgtgaacccgggaggtggaggttgcagtgagccgagatcacgccactgcactccagcctgggcaacagagcgagactccatctcaaaaaaaaacaaaaaacaacaacaacaaaaaaaaagaaaagaaatcagttggacatgtgttttattgttttacatagtacagtttttgtaatttgttttgcatctgcaatagtataaaaatatttgctagatatgtaatttgacaatttttgttttattgttttttgctttttattttggaggtggtgtctcgctttgttgcccaggctgaagtacagtggctattcacgggcataaacataatgcactacagcctcaaacttctgggctcaagcgatcctcccacctcacgctcccaagtagctgggactacagacacttaccaccatacctggctttgtctgacagttttagaaaaarttaaaggaaatattaaagaacttaaaattctgtgtaaaataatatcagatatctgggccaggcgcagtggctcacgcctgtaatcccagcactttggaagaccgaggcgggcagatcatgaggtcaggagttggagaccagcctgcccaacatggtgaaacacatctctactaaagatacaaaaaattagccaggtgtggtggcatgtgcctgtaatcccagctactcgggaggctgaggcaggagaatcgcttgaacctgggaggcaaaggttgcagtgagccgagatcacgtcattgcactccagcctgggcagcaagacaagacttcgtctcaaaaaaaaaaaaaaaaaaagaagaagaagaagaagaagaatatgagatttataattgtgccttatggatatttcattgcccagcattgaaccaaatagaatcctaatgggagaacaaaactcaaatacaagaaataactagtccaaatcaaataaaatctacgccctttacatttccgcaaaatgttaatttcactaccaggttaatttcactacatgtcatctacactgatgatatttatactgtttgccaactgtgaataaaggaattttttaattataggaaggaagtaaaatattgtgattacctttagagagtcaagacatagacataaacgacttatatagataatgatgatgaaatgaagccctgcccgcaaagcataggcttcaaattgaacccccctcccgtcctatctgatttctttgttcacttataagtcaggtttatcatgatctaatttttatatacagtaaaatgtatactttttaatctacagttacgagttttgacaaatgcatgaagtcatacaaccactagcatcacaataagtaggtagagtatttctatcactcccccaaagttccttaattctcctttatagtcacatcttcccaccacctcaaacacttggcaaccactgatcaatttttttgtctgtatagttttgccttttccataatggcattatgtagttttttgagtttagcttcattcacttagcacagtgcatttcagattcaatcatgttgcttcatacagttgtttattcctttttctgagtggtaatccactttatggatggactaaagttttatttacctgttgaccaactgaaagacaattttagcaataatgaataaaaccaccccaaacatttgcataagtttttgtataaatataagttttcatttctcttgtatgaatacctaggagtgggaggctggaatatatggtaatacaatatttaactgtataggaaactgccaaactgttttctcaagtgtctacgttattttgcattttcaccagcagtatattagcattccatttgtgccacatctttactaacacttggtattgtcagttggtttctttttttcytttttttttttttttttttttttttttgagtcagagtttcgctgttgttgcccaggctggagtgccatggcacaatcttgactcatcacaacctctgcctcctgggttcaagcgattctcctgcctcagcctcccaagtagctgggattataggcatacaccaccacacctggctaattttatatttttagtagaggcggggtttctccatgttgatcaggctggtctcgaactcccgtgagccacccgcctcggcctcgcaaagtgctgggattataggcatgagctactgcacccggctggtttctttcttttcttttttttttttttttgggcggtgttgggggtgtcttgttttagcctttccaacaggtatgtggtggtatctcattgtgattctaatttgtatttcagcaggtgagtgagagtataggactgttagctggtcactgtatgttgccttcgtacttgtgacaagagtacttgtcttagaataggaaatctctatctggagtcatgaattagagcagtggttctcaacaggagcaaccctcccaccctacttcatgaaattggtctggagacatttttggtggtcacagttggaggkactgtgctactgtcatctagtggataaaggccaaagatacttctaaacatcttacaatacacaagacacctactctttatcgcaaataattatcaagcccaaatgtcaattagtgcataggttgagaaaccctgaattagggcaaccagcatatcaaatattaaagtcatctacttgtattaaggataagacattcagttgaatgtctcagtcatctcacaaggatgtgatccttgaaagtcctatgaagttggaaaattgaggatgagtcattccatcaatgtcatgtacactaccaggcaactctaaagagtccagttacgttttgacaatgtttaacaatttactccagtgacagtattgccatcaactgtattagaaaaaaaatttgtgtcacttgctatcccacatagctctaagtataatttgtgcacgttaaataatttcaaatacttgaattaatctgggaaacttgataagctctaacaatatcatattgatttgtctttcagtgctgagaccaatrcataggaaaaattttctttttcccaaggtggctgttgcctactttgaatttccattggggtttggggcttttgttgtgccttgctttgcttttatttgaaattagtttcaagccttgtattctgtaacccctaggcatattctyacttagcctaccaaagctgggggtagctgggcgtgctgcaggggggaggggtgctgcagaccagatgatgtgtgtatatgtcactttttcatgtctgagaaaaatcattctacctcgaattactaaagtatactcttaaagcaggattatagagaccattccttgaaaatcattatccaaattcaaaatgtaaaagacagtgcattctgccaaactcttttcagtagtttattttggttactttggaaaaaaatgttgccaggttcactgtaagtgtttagttgtctagcccttgtttattactttatatttgcatttctctggaatcaaagatgaaaatttggctgctgctttgtactgtcggaaaataacggatttccttatttcaacaaggagattcaacacaaaatttggctgtagcttttaatgagcttggtgacgttcaagggaccagtccaaacacatcttgtgttacaagtaaaagcagatgtttttaagtatatgcagaatacagtgagccctaccctaaacttcctctcattgctattgtcttctcaaaagtcatttcgcgaccaagttaggttcaaggtagcaaatgtggtcctttacatttatcatgctgcccgttagagggcagcagtatacagactcaggagccagaaaaccaaatattactgtattctggggcataagtctttttcgaatcttctaaacacagctaaatatatcataatttaacaaaatccctaatctgcattttggtgtagaatatctatataactacagatattcaactttgaactttgttttaacatgatcttttttacaagcttgtaaattaatgcttgtaattctaaattgtgtatggatttggtttacaatatttctaattgcttctgggaagactctatttaaaacttattggagggctgggcgtggtggcttacgcctgtaatcccagcgctttgggaggctgaggctggtggatcacgaggtcagaagtttgagaccagcctgaacaacatagtgaaaccccgtctctactaaaaatacaaaagaattagccaggcgtggtggtgcacacctgtaatcccagctacttgggaggctgaggcagaagaatcacttgaacccgggaggcagaggttgcagcgagcagagatcgcgccactgcaccccagcctggacaacaaagtgaaactctgtctcaaaaacaaacaaacaaacaaaaaacatattggatactactactataattactaaaatgtaagtagttggtaatgtgttggaaatcttgggagaaagagatggctttagttatagaagcatggtaccatgccatagaatatgcagagaataagagaatamatattttttaaatgaatgtagccaaaatttttggaaaacagcctttagattcattctggggtggtgtgtgtgtgtgtgtttgtgtgttctaacagctttactgtaacagctcgttcaatactcataagaaccttatgaagtaggtactatattattatcttccttacagatgtgaaaactacaacacatggggtaagtgaattgacactgcaccaggtcacactactagtaagtggccaagctagagtttgaaacgaggcgttctgaaatcagagatcatgaactaaaaatactttgttatactacctctcattgaattgtctaacctttccccctgaattgtcatgccacctatctctatcatattttctcacatagtcctgttttggggctctctattctattccattcatccttttaacccttcactaataacagttgttgtactgtattaattattaaaggtttatgtaagttttgatatctggaaatcttaactctcccacttaactcttcttcagaatttccttgactatttttggtctttgtatgtccctatgaagtttaggatgaacttaccaaattataggaccaactctttagagattttgactagaagtgatatgtgcatccttctttttctttttctttttcctttcttgagacaaggtctcactctgtcacccaggctggagtgtggtggtgcaatcacagctcaccacagcctccatctcccaggcttaaactatcctcctccctcagtcccctgagtagctgggaccatgggcaggcaccaccatgcctggctaattttttatttttttgtagaaatggggtctcactatgttgcccagactggtcttgaactcctggactaaagtgatctgcccactccgaactcccaaagtgctgagattacataagcataagacactgtgcctggccaatgcatcctgctttttctaaaccaccccaagtcatttttggaaaaagacagaagacagataatataacaatagagaaaaatatatatatataactagaaaaaatactggtgttactaagattatttctacttttatttttccaagttttaaattttattataaatatttacttcatgggaaatatatttagagttttaatttttattataaagaaaatatagatagaaaccaaagtaatgaatatactttaaataattcagacctcaagatccatatgaattacctggccagcctgaaaaaaaagatacctacccaatatgttttagagaattgatatttattatttttgggaagacagtatatgagtaagagtcatgcctaaagaacagagaagaacaaaaacactactttttgaaaagggcagttttagacactacaggccagtgacattggtgttaagtccagacagaattgtaaaacactttttcaacatttggtttagaaagagtgattactaagagttggactaaggatttacttacttatttttccctgtctttgctagatatggggggaaatacagagcatgtatgagagctgctttggcaagaacagattttaaatctgatttcaccttctgaggagccttatataagataagcttaattatataacttaggcaaagttgttttccctgcatcacataataaggactagagcaagaactggaacccatgtgttttgacacttacggcagtgggaggaagcagtgtgtttctattatattgctgaggcatactagctatatcatctgccttagcccaacattttctttatctaggtctgggccatataaccaaaaagaattgtggggagcagccctaagaagtgatggcagttggccattttaagtgtcaagaggatgtatgggaggctgaggcgggtggatcacgaggtcaggaaatcaagaccgtcctggctaacacagtgaaaccctgtctctactaaaaatacaaaaaattagccgggcgtggtggtgggccctgttgtcccagctcctcgggagactgaggcaggagaatggtgtgaacccgggaggtggagcttgcagtgagccgagatcacgccactgccctccagcctgggygacagagcaagactgcgtctaaaaaaaaaaaaaaataggatatatgggatagtattgagtttaatctacagcatgaataacataagttcagtgggaataaggaattttctggtcgcaaagaataagtgttagaattggtcaagaatagttgtaaagcagccttccctagagaactttatgaaagaatggattccattctacctggagtgtttgagatctaatcctgcttaactagatgactaaaaagttcatgccaacccaaagagtctacaaaaatattagctgacacatttaattcaattcttgcaatccttatgtgtgttcagcattgtgtccccctcattaagatgcagtgggaagagctttagagtgcctgctgtgtgccaggcartttctagatgcagtaggtatacgtctactctcatggagctttattttatggagagaaggatagacaataaacaagttaaataaaatgtaaagtatgtgagagagtgataagtgatatagagaaaaatataacagggatagggagtgtgttggggaagagagtataatttaagataaggtgattgggaaaggtggcttttgagctaagaaatgcaagaaaggaaggaggatgctgtacagattcatggggcacaggcattccaggcagagagaacagttaagtgcaaaggctttgagtcaggaacaagaagttctgtgtgtctagagcagaaaaaaatgaaagaaatcatggcaggacacatcatatagaaaggccagatcttgtagggtgttgtaagttgttttaagaactttgggttttattgtgagtgagatgacaagccattggaatgaacagaacggttatgtgatgaactgacatactcttaactagatcacatagtctgcagtgttgaatgaaggagtacaggtggaagcagggagactaggagactgttgtattgctgtaacgtgaggtgttgacttgaaccaaagtgttgtgaaactggccaagttgtaaacattttaaaggtcaagtccacaagatctgcagaggaatggatagttgggtgttagagaatggcattaaagataactctaagctttttgtctaaatgattggaaaaaataaatgtgccatttactgatgtgaggaagactgaagaaagcagggatagaggtgggtgaagattaagagctgcattctggacataggtttagaattttttaaaaaatccaagtgaaaatattgtatagagagttaaacatgtgggtatggggtttaggagaaaacttgtttaaagaaaaaaacttgtgaattgttggtatttttatggtttaaagataggagactggaagtgatcaccaaggaatgaatgttaatagaaaaaagacccaaggactgagccctgagatattcacattgttaagggattagggagatgagaaatagacaaagatgtagcaagaagacctagaaaccaagtaaagaaagtgttcatggaagaggaagacagatgccaagctgtatcagatgctgctgatagagcatgtaagaagaagtaagattttggtacttcatgttttatggcgtatatatgaatgtatgtataactacccagctcgtgtccctgtaagctcccactcccttcctggtgatctgccattgttattttaacttggagtaattttacctatgtctgatattacaggagaatccaaatcctcatatggcattccagaaagttccacggccaacagaaggatcccatttgcgagttcatattcttcctttcccagagattaatgaagcccgggttcaggaattaatacaggaaaatgttgctaagaaccagaatgcacctcctgccacacgaatagaaaagaaatgtgttgtgccagcaggtccacctgttggtatgtatttgtctgtctgttttaaaagtaaactgtttataaggatgtaagacccaaaaaggaaaagtgtgcaatttgatgaattttcacaaagtgaacaaactcctgtagctagaatcagagcattatcaatactcagaaactgtttcattcactgcctcccaaaaagggtaatcataacccaaccactgccactatagaatcttttctttttttaataacagctttattgagatatgttacatactgtaaattcaccaatgtaaaatgtgcgatcccatgatttttagtatatttacagactcattcaaccattattactatttaatttgagaatatatatatattttatatatatatatatatatagagagagagagagagagagagagacagacagacagacagacagacagacagacagacagattgagtttcacccttgttgcccaggctggagtacaatggtgtgatctcggctcaccgtaacttctgcctcctgggttcaagcaattctcttgcctcaacctcctgagtagctgggattacaggcatgtgccacctcgcccagctaattttgtatttttagtagagacagagtttctccatgttagtcaggctggtctcgaactcccgacctcaggtgatccgcccaccttggcctcccaaagtgttgggattacagkcgtgagccactgcacccggcaagaatgtttttataacctaaatagaaacctcacacctattagcagtcactccccatttcctccccaaaccaccttctccccagccttatacagtaatctactttctgtcttcatagctttacgtattctggacattttatataaatagaattatacaaaatgtaatcttttatgactggcttctttcatttagcataatatttccaatgtacgtctatgttgtagcatgtatcagcatttcgtttcttttttttttttttttgagacggagtctcgctctgtcacccaggctggagtgcagtggagcaatctcggctcactgcaagctccgcctcccgggctcacaccgttctcctgcctcagcctcttgagtagctgggactmcaggcgcccgccaccaggcccggctaatttttttgtatttttagtagagacggggtttcactgtgttagccaggatggtcttgacctcctgacctcgtgatctgccctcctcggcctcccaaagtcctgggattacaggygtgagcctctgtgccaggcctcatttatttttaaatgtctgaataatactccgttgtttggatatatatcacattggttatttatccatcarttgatggatatttgagttggttctacattttggctattatgaataatgctgctgtgaacatttatgtgcaagattttgtgtagatatgttttcagttctcttggatgtatacttaggattggaattgctgggtcatatggtaattctatgtttaatgttttgaggagctgccaaaccattttccaaagcggtcgtgccattttagatttctttcgttctaatttcagccactgatactgaacattttttcatgtgctattggtcatttcactgtctctttgcccattttgaaattgggctatttgcctttttattattgagttgtaagcatactctatatattctatatataagtcccctaccagatatattatttgctaatttttccccattctgtgagttgtcttcctttactaacttttgtctttttttcagctattgaggaagaaatattaaagtctcccattataatagcagaattccctatttttcagtttttcctgtttttcttgatatattttgaagttggttaattagatgcatgtataaaatgtgaatkaggttggattctccaaaggaaaaaaattccagatagtaaacatatttattacaagaaaatatgttttctggctgggcgtggtggctcacgcccataatcccagcactttgggaagccaaggtgggcggatcacttgaggtcaggagttcaagaccagcctggccaacacggtgaaactccatctctactaaaaatacaaaaaattagccaggcgtggtggtatgcacctgtagtcccagctacttgggaggctaaggcaggaggagaatcacttgaacccaggaggcagaggttgcagtgagccaagatcgcaccactgtactccagccttggtgacagagcaagactctgtctcacaaaaaaaaaagaaaaagaaaaagaaaatatgtttttttctaataactcagcctaaagaaaatttaaaatactgctaaagatattttagatttaaaagtttataaacataaacacattgctctctcaataaagtgtgttattaattggagattgtaagttttctattctaatatagatagattttcagttaatgccaccaacctatgtgtgtgggaagcaccagagcccacaattatgaatgagcatttcagagagaaaagtcacgtgaaataatcagtttaaccaggaaattaatgttacatgattaaaaatgatttgaagaaaactggtaaaattcaagtaaggtctatagtctcattcattgtattatgccagttgttttcctgatcctaataaakcataattatgaaagatgtcaccrtagggggaagctgggtgatgagtacaaagatcttctttrtattacatttgcagcttattgtgagcatataattagttttattaaaaagtttaaggctgggcgcggtggctcatacctgtaatcccagcactttgggaggccgaggtcggcgtatcacctgaggtcgggagttcaagactagcctgagcaacatagagaamcgctgtctctactaaaaatacgaaattagccgggtgtggtggcgcatgcctgtaatcccagctacttgggaggctgaggcaggagaatcacttgaacctgggaggcagccgagatcgtgccattgcactccagcctgggcaataagagtgaaactctgtctcaaaaaaaaaaaaaaaaaaaaagtttaaaacattatttgacgaatataggttttgtattgatgagatgaaaggaatgctaatgagtaaaatatgatagtctttcttcttaggtatgggagaaggtgaagggattgtgcctttagaatccaaagagtagccataaaatataagtagtctttttggcttgagaaccattgatactattctcacttataaatgggagctaaataatgtgtacacatggacatcaagtgtggaataataagacgctggtgactcagaaggctgggagggtgggaagggagtgagggatragaaattacttaatggctacaatatacatcattttggttgatggatacactaaaagcccagacttcaccactatgcagtatgtccatgtgacaaggctgcacttgtaccccttaaatttatgcaaaaaaaaactattgatactacctcatttaaacaaatggcatagtatagttctttgtgaaagtataaattttatataaatactactttcatttatatccttctaatattattttaataagttaaatttatttaggtaactagcttagtagcctaggtaatacactagaattttctaaccctatggtaaaaggtgaaaggtgctaggtttgcatgactaaaaagtgactttcctaagccagtgtaacagttcattgatcatgatcgtttctctttgtttgcactactttctttcaagtcccctctactcaaatgtgtaatatctaatattttgtggaatgtagtttttctttggtaatatcttagaaatattaacaatattactagttgtaaacaaagtttaaaatagatgtttgcctttgtttaatataattttactttgcaatgtgarttagtttgcataaaagttaagtgtctcattagaatctaccctgtgaaattattaatcagctagcctgatacttcaacactggaacatgtaatcaaaataatgatatggaatactttcaatgctctgtaataagggaaaaaataaggtgtaggtcatatcaacagtttttgtttgttttctaataagagatgtggtctcactctgtcacccagctgcagttcagtagtgctgtcctagctcaccgcagacttggactcctgggctcaagtgatcctccgacctcagcctcccgagtcactgggattacagtgcaagacaccatgcccggctaatttttgtattttttgtagacaagggtcttgctatgttgcccaggcttgtctcaaacctctgggctcaagggatcatcccacctcagcctcccaaattgctgggattacgggtgtgagcctccacgcccaacctacagtcttaaagtagtagtctctttgcttttgtaattaccaaagaagtttaatttatttgtgctttctttatattcttttactagtttcgataatggacaaggtgacgacagttttcaacagtgcacaaagactagaagttgtcagaaactgtatctcattcatatttgaaaataaaattttggaaactgaaaaggtaataaaatgtgatctttcccaagtaagcatttatcatttccctttcagatttacgtgctgaggttaccagcttctctcttctttaattctatcccttttcctaataaagtatcctctcattgtttggatcattttaaatgaatagtgtctaagatttaaagctgttgggccaagcttaattatatgaccaccagaaatatattcatagtaattttttctgtcaaacttttaaacattgttcacaaaacactattttgggatattacttagaaacttaaaatttttttcattttatttttatttttggagccagagtcttgctctgtcacccaggctggagtacagtgrcatgatcttggctcactgcagcctctacgtcccaagttcaagcgattctcctgcctcagcctcccaagtagctgggactacaggcacgcaccactgcgcccgcctcatttttgtatttttagtaragatggggtttcaccaygttggccagactggtcttgaactcctgccctcaagtgatccagccgcctcagcctcccaaagtgctgggattacatgtatgagccaacatgcttggccaaaacttaacattttaatataattttatgtattgcaaagaatctagttagaatatgtaatgaattataggaactgtagtattgaacttaaatgtgcctccttagagcatgttttcttgccttcttcaatgaaacatgctgaacataatgtaaccctttcttactgactcattgtcatagttctgaatatctattttcaggggttggttaaagcatgtagaaatgtttacctttacactgactgacccagtgctctttacattttgtgctttttggtttctatgttttcttagagttgaagtctttcacttcttttgctttcaactttcacatcctatttcttatacccacctttagtgatatcatgccctcctacttcttgttttctcctttgttctgattttttagctaaataagcttattattattatatgtgaagtaaattaactaagtcctacatggtgaactgaaggaggcatctttatggatgtgcctgttgtaaagcgaaaagagttttaatgcatacacctagagatatctgtttttgcaactccgagtcctttttctttccttttttatgatatttaaatgasaagagattgtagaacttttcagtcataatttaaagctgaatagtgattaagcagccaaccagtttaaaagtatgaaatcacttgtatttcttattgttttaatttttctttctgttcttgccatggaaaatttactagttatagaaaggtgtcttacgtatctatggctttgactcatgatctgaagcaacagtcaatttggtaaccaaagttttgttaacttgaagaaaaatagtgaaattaaatgtttttcaatttatcacataattatcttatatttcttgctggtttacatataaaaataaccacaaatctattttataattgtcttaataataaatcacctattccctaggagtttaattttactaataactatgttaaataaattataggatgcrtttgaattttcaggatgattgtttgaaagttgttgtttcccccagtggtaccatttggtcatttgtacctctcttgtcctcagacccttcctgctgcactcagagcccttaaaggaaaggcagcaagacagtgtctcactgatgaattgggtttgcatgtccagcaaaaccgggcaatattagaccatcaacagtttgactacataataaggatgatgaattgtactctacaggtaatttgtagttctttcagattattcctcttatttgagaatacttttcatttttccagaatattttgtaattaccaatatatcagttcttgagcctaccacagctaataggatgaagcgtcagtatctctatcatttctgtcaaatacttttttattacttggcataaatattaagagtttttgttctttctttgttttctctttgaaaatgctagattattttactagttctgtaatataagcaagttctttgaaaatgaaaagtcatctttaaagcattcagttatatattacttaatgtctatagtcacatcagcccttttcagtcagttttcagttgtccaagcagaggacaatgaatggtggataatccaaaygataaatgaattacttaattaagtatttaagtactttgtgtttgtaaagcacaacaacaaaatttccacttggcttcaaaatgtgtgtatgatctttcagaaacaaacttcccacaaaacagtgaggacaatttaggagaagctaataatcttgtttcctcatcctgcctcccttgttagagagtctatgacattggcattctgttgagaggtaatgtaaagttcctttctcaaacattttgcacaaggtggaaatgtaattaaatattaagacttcaaagatcatccgtgggactccagacaaagtaaataaatgcatgttaaatattggtacattggaaagcaagaattataggatataattaatcaaatttatgaawgaaacaaggcctaaataaatgagaaaatgtatcatttgtatggaatggaagactcaatatgttaaagatatcaattctccccaaaacaatctacagagacaatgcaattcctatcagaaccttaaacagaagaataaaagccttaaaattaccaatatactcctaaagaaaaacaacaaagcacagcaatttaccttgtcaggtatcaaaaatttagtttaagattatattatttggccaggcacagtggctcatgcctgtaatcccagcactttgggaggccgaggtgggcagactacaaggtcaggagtccaaaaccagcctggccagcatggtgaaaccccatctctactaaaaatacaaaaattagccaggcttgatggcaggcgcctgtaatcccagctacgcaggaggctgaggcaggagaatcacttgaaaccagaaggcggaggttgcagtgagctgagatcgtgccactgcactccagcctgggtgaaagagcgaaactccgtctcaaaaaataataataawtattattatttaagacagtgtagaattggcacacttataaacaaattgaccaacagaataaaatagaaagcccagaaacaaatgcacacatatatggaaacacgatttatggcaaaattggcaccagcagtgaaaagatgagcagttcaattaatagtgctgggacatgtacacataacataccattgatacaaaaaatgcatagatacctcccaccacacacaagaatcatttccacatgtattaaagacttaaatatgaagagccaaaaaaagctaatctataaagcttaaaagttttcaaacataatacaggaaatatccrtatgaatttggggtagggaaagatttgttaaactagtcacaactagtgccaatgttaaaagaaaagattgataaatttgactacattaaaattaagaacttctgttcattaaaagataccayagagagagggaaaacataaacctcagagagagaggttaatgctccgattacaagaactataagccaggcatggtggtgtgcatctatagtcccagctactcaggtagctgagataggagaatcacatgagcccaggagttaggctgcagtacactataattgcgcctatcaatagccactgaactccagcctagacaacttatcaagaccccatctctttaaaaaagaaaaaaccctacaaatcagtattttttcaaaaagacaacctaacttgaaaatgagcaaaagatttaagtatcttaaaaggcagagccgagaatgggagaagagcagagtttctgagcgcacagtggcctcccctcctctctcctctcctcactctcgcagcctacctttacctacccgcctgctcagtgcccagaacaccttccaccatgaccatctcagcaagctcccacttaaacagaggcgtcaagcaggtgtacatgtccctacctcagggtgagaaagtccaggccatgtatatctgaatcgatggtactcaagcaagactgcgctgcaagtgaacccaagcgtgtggaagagttacctgagtagaatttyggtggctctagtactttgaaggttccaacagtgacatgtatctcatgcctgctgccatgttttgggaccccttccacaaggacctccacaagctggtgttctgtgaagttttcaagtgcaatcgaaagcctgcagagaccaatttgaggcacacctgtaaacggataagggacatggtgagcaaccagcacccctggtttggcatggagcaggaatatataatctcatggggacagacgggcacccctttggttggccttccagtggattccctgagccccagggtccatcttaactgtagtatgtgagcagacaaaacctatggcagggacattgtggaggctcattaccgggcctgcttgtattctggagtcaagattgcagggactaatgctgaggtcatgcctgcccagtggaaattccaaatcggaccctgtgaaggaatcagcatggaagatcatctctgggtgacctgtttcatcttacatcgtgtatgtgaagacttcggagtgatagcaacctttgatcctaagcccattcctgggaactggaatggtgcaggctgccataccaacattagcaccaaggccatgcgggagaatggtctgaaatacattgaggaggccatcaagaaactaagcaagcaacagcagtaccacatccrcattcccatgaaacttctaacatcaacgacttttctgctcttatagcccatcatagtgccagcatacacattccccagactgttggccaggagaagaagggttactttgaagatcattgcctctctgccgactgtgacccattttcggtgacagaagccctcatctgcccgtgtcttctcaaaccggagttgagcccttccagtacaaaaactaagtgaactagacctccagctgtcaagcccctcctagtacttcatccaactccaactcttcccctctcccagttgtcctaattgtaactgaaaggatgctcacgcctgtaatcccagcactttgggaggccgaggcgggcggatcaggaggtcaggagatcgagaccatcctggctaacacggtgaaaccccgtctctactaaaaatacaaaaaattagccgggcgaggtggcgggcgcctgtagtcccagctactcgggaggctgaggcaggagaatggcrtgaaccccagggggcggagcctgcagtgagccgagattgcgccactgcactccagcctgggcgacagcgagactccgtctcaaaaaaaaaaaaaaaaaaaagaaaggatggaatatgagggtctttttaaattccttgtgcccagttaatcttgctttctttctttggctgggataaggggtcaaattattaatttcttcacatctttaccctccttttctttccctatcactgaagctttttagtacattagtggggagctgggtggtgaaacataaccactgcttccatttaacggggtgtgcctgttcaataagcgtagctatcggaacagactgcatgtttgaaggagggggattttttctttgagggacctgagaggggaagacctgacttattctggttaggttaggatttccctttgtggtggaaatgtttcttaaaagattataaccaactttctacaaaagtagggattaggagagaaggtaggggttggggatcagggaggagaatgcccttggtctcctgcttgtgtgggactagcctagcttggggtgaaatgctctcctctgaacacaaagcttagtataaactgatggatatccctaccttaaaagaagaagaggttctttttgcttggtcctctatttatcacacaaaacagagtagtgtttttatatttaaatgtaaaaacaagggtcgggtgcagtggctcatgcctgtaattccagcactttgggaggccaaggcaggtggatcacgaggtctggagattgggaccatcctggccaacatggcgaaaccctgactctactaaaaatacaaaaaattagccgggcatggtggcaggcgtctgtagtcccagctattcaggaggctgaggcaggagaatcgcttgaacccaggagttggaggttgcaatgagccgagatcatgccactgcactccagcctgggcgacagagcaagaatctgtctcaaaaaaaaaaataaaaacaaraagattatatatatagttttgtggcttatgtgtgttttgctaagggagaaacaacatacaggtcacgggataccaaattcaaagcaaataatctagacagaaattaagtagccccttttgagtaaggagtgagggaagtggtgcttgaaagttgttgatttgcggttagtccttcatgaccactctagggtttctgtgccctgcccaccctctggagaagacgaatactggtcagttaacagacgacatgttactagcagtcacttgatccccatggctttggtttaaaagacatatacttgtccacatgggtttagaggtaagagttagctggtcaacttgagcatgttactgacagagggaatattggggttattttctggtgggaataacatgtcactaaagcaggacttttgatatattaaatttttaaaaaacaaaatagaagtttagattttaatcaaatctgtagagtttctaagtaatttttgcagaattgcctgtttgctttaactgtctccttctgcctctgctcttgaaggatatggggacagggctagagtcaaaacacttgaaattttgtatcccaatgtcttttctcccagtgtgaaatattccattcttttgttaagactactgagcagttatttttttcttttgtaataagaaacaaaccccacctttatctctacatttccgctaccattctctggtttttgtgtttgcttcagggggccagctgtggttttctcttgccatgatgacttctaatcgccaagtacagtatgctcaaagtcagacaactccttactataaacaaattgtgtaactgcccagagcagcacttataaatcagcctaacataagatctccaaaaaaaaaaaaaaaaagagttaaggaaacccacttggatgataagtgtataacaagatgatctgtgtcaataattgaagaaatgcaaattaaaactataagcagagccttttacactcactggcaagaattaaaaagtctgataatatcaaacaaatgtatggaacaaatagagtatataaactctgctagtgaacgtgtaagttggtatagctactttagaaattttaataagatatgagaaataagattattggtcattatcttataaagctgcatatgaagcgtactctatcacctagtgatttccttcctagaggagctcttgcccacatacatcaagagacatgtacaaaaatgttaatggcaagattgttcaaaatagcagaaaacttgaaatgactcatatgccaaccaacactagaatggataacttatatcttcttacactagaatattatatatcagagaaaataaatgaactgcagttacaaaggatgatgtagatgaatcttaaagaagataattctgtacaaaaataaaaagacaattcagcactgtcatgagttacagaaaaataaaaaggaaaaaagaaaaaaaaggacaattcaactataatatggatccactttacaaaattcaagtgcatgttatatactatttaaggatatttaatctaatgatacaaacatacgtggtaaaagtatttttttaaaactaaggtaataagaaacaaaatatttaagaaaattacctctgcgggacacagaggaggggcagtaaacatggggatcttccaatgtaatgataatatactatttaggtacatgggtgttcattgtatcattcttcataaccttatagcttatgtatattttatgtcttaaagtactgactgctattagattctttacagggcatatttatcttctcaaactcacttcaaacattttgtagattgtataagttaattgccaagttaggggatgattcacttttactggatatacattctttagagtatgagacagtagatataatactttataatggcaaaaatcaaaaacagcctaactgcctaccatttggctagcgattaaatatggtgcacctcttctttagaacactgttcagctactaaatagaaacaagtacatctatatatgtactgatatggaaaaatttcttatatattgctaagtaggcaaaagggaagttacataaagtagatatgaatctatttttgacctaaaattadatgtatgtatgtatgtatatgatagtaaaaatctggaaggatatttacactaaaacctgttacgattatcctgataagagagataccaatgattacctctgggatgtggattagaagagttttgatttccattttaaacccttctctgcttgaaacatacacatataactacattatataagatatataacaagcatgtattacttttataatttgaaaaaagtcctcagttttttagaaaggaaattttagcatcctatgagaagaacttgccctaaaagaaaagccctgtcttttgttactttattacagttactttgttaccattattatagaggataaaggaatagaattaacagattaaggtctctagaagtcctaaagtcaggcaatttcctaattccccaatgattggtattaaaatgacaaaaaccattttggagctttttgctattagtactttctgtgctgtttattagctgaagaactaacttttaaggctttctctaaacttaattttagcatttacaattatggcacttatagaatagcagatacccttaggctacaaatatttttcatttgaataatcatatttctagaaacaaaaagacatggagtttttttgtttttgtttttgtttttgcagctttcaaatacaattgatttactcaggagttgtttgaaaaaaaccaaatacatttggattgaggggcacttaatattttataattcactatttcatgtatacataaaaagagatcctgtgcttcatcaagcacatgctgttgttgaacgttgtatagaggcccttcgcagttatgaatggacttacatgtgatgttcttactttaatgtgttatttgtttaatgtgtcacccacttgggatttgttagtatttatattcttgatgcaacaacgtacttatcaacagggatttaacatgacattctgaacatttttttacaaaagcatagagtttcaaggcagagtggccaaacatctgtgttgatgttttaagaaagaaacattaactaaatgaactaatttttaggtagtgattcaaaaactttggtaatttttacttttcatgacctagaagttattcttctgtctttcctatccacaagggaaaattaaatggaacatgagtactgccaaaaggctgtttatcaggttatttcaatgccagtgtaattttttatagcactgtttcatagaggttatagactattcctacctatcatttcatttcaaagaactgatcatattttagtattttttgaaactgagattactaaaaatctctccaaaaatatcatggccttaactttttattttgtcaaatatacaattaaagctttttatgtgtctacatcctagctaagatcttttaaaaataaattataattttaaaacccagtgaagtcttctatgtccagcattatgttaaattgcatatacgatgaggaaccttctcactaacatagaaatagatctcagaaaattacaaacaaatataaaccattattttggtacattgtttctcctaagaagaaaagaaaatctctaatgtatacctctttatactctgaagaaaaggacaagtagagaaaaccaagccctgagcagttaacagttgggacaatcagatttgtgagtacacccttggcctctataagtcttggccatctggttgaacctgaaagttttgcgtcaagctggaacattggaaaaagaataaagtaatccttatttacttagaataatagtctccaatctcatccaggttgctgcgaatgccattaattcagttcctttttatggctgagtagtattccatcatatatatctgccacagtttcttttttttctttttcgttttttttgagtctcactctgtcacccgggctggaatgcagtggcgtgatctcggctcactgcaacctctgcctcccaggtttaagcaattctctgcctcagcctcccgagtagctgggattacaggcgcatgccaccacgcctggccaatttttgtatttttagtagagatggagtttcaccatcttggccaggctggtcttgaactcctgaccttgtgatccacctgtctcagcctcccaaagtgcygggattacaggcataagccactgtgcccaacccaatatgccacagtttctttatccactcattgattgatgggcatttgggttggctccgcatttttgcaattgcaaattgtgctgctagaaacattcatgtgcaggaatctttttggtatgacttcttttcctctgggtagatacattgctggatcaaatggtagttctacttctacttcttgaaggaatctccacactgttttccacagtggttgtactggtttacattcccaccagcagtgtagaagtgttccctgttcaccgcatccacaccaatatatattattttttgattatggccattcttgcaggaatagggtggtatcatattgtggttttgatatgcaggaaagagcctgtgattttgaaaactgaggaatatttccatattagtgagtatagtgtagaaatgtggttggagaagagatgagaacagtagatggagtaacctgtggttaaagtaagcagattgcatatgtacattaatctctgctaccacccaaaagcccattaaaacaaaagtaagccacttaaaaaaatacataaacccacaggcagaacaggagaggaggcaacagcaacatcttagaagctagaaagctgatagatgagtgatctttacttagcagacccgagaaagccttttcccaagtagcagcgggaaaagccttgaggcagcccagtttacaaaaccccaaaaggctcaggaattagtaacatcaggtatctctgcgagcagaaggacaaggtgaggctaaaacataaaaaatagaggattggttgaaagctgcttaagattctgttggatccccctcccagttcctttcttaattcggtgtaaacagccagctgcctctcctttaccatggcagaagattagatgtttgtttgtttgtttgtttgtttgtttgtgtatttatttttatgagagagaggctgtcattggcctggaagatactaggtctggttgagggaaattctgtcttgctgcaaacaaggaggttgtgtgaatgccaaatattgagaatgccagtgggctttccccctttagyttccaggactctggcagcctgccttccaggcaagagattgtaaaactgttctctgagaaatgtgaccagccaaagagaaaaatactttattaaagatgtggaggttgacgtttttcagtagaacagctctcccagggcatactataatgaagctgtcactcaacaagcttcatccatgtggacattattttcttctgtcattctttgatttacttctcctttcagggaatgacctaaacagaagggaccatcaaacaaagtcatttgctgctccccaccattgttcccccagtctgctttcattttccattttttcttgtaaaagaaccatccagtcagcacttataattgtcctgtcctcttccttcttgggtgcctgtatcactctgtactgcctcagataatctcagcttttatttgtccgtgaaactgggtaagccacaatcatggttgccctctggaaatagacttaaagaaattaagtacatttttgaaatcacacaactagtaaattaaagcaatgaattctaaatgaaaatctggtattttcatttgcctctttagatccatctttagatcttctctcagtctaaaattctccctaggcagtcttactcatctgcattaccatctcttgcttctgccttccaaatctcaagcctaaattcatctcctaaattctgctaccgcaccaacttcttaactggttaccctacctccatcctgacccatttctataatataactgttctccatttccccaaagtgatactcgtatatttcaagttgtatcttttcacttcacaatttaaaatcctttgccttcatagtaaattctgatcttatcttggcccctgcctatatctacagtctcatcgttcactgctgtcagtccccaggccttacacatctattgcctttgtttggaacactgtttcttcctcctttcctttctcctccctgctccctcaatctttcctttcccttggccaactcctactcatcctttaatttcagcttggatgtcatttctttctggaagccttcctcagcccatgaagcctggattggtagcaactctgtgcctctacttcatcttgtacttcccctatactatccaccatgatcctgcagtagcacttaaccacatataatgatattgcctgttgacatgtatatttcccattttgtctggcatggagtagtctctcactaaaaatttgatgaattaataaatgaataaatgaatgtgttgtaagtagctgcttacttcagctggttagaattttagtccctatactgagtttctgtcccttcacaggccagtagcttttgcccctttcttggctataatctaatcatcaacccgagccaagctctattcacctttatgtctttgtgcacagtaatctctaggttagagaatgttgacggacatgttgataattcatgacctagcttgaaagtaaacttaaagtttacatacagctggtcaatattgtgccagtggacaggagtgtcatcgatatatttaaagtgcaaatgttcatactgctgagttacaatcatcatagctgaagcttacacatctgtattttttaatgtcccacaagtaaatttgatatatacctagagttgaaatatcagtgtcctattatctgcagtagtcattttaaaactttttcatgttcatttctgagccccatcatcagatgttctgatttgttaagtttgggaagkggggagatcagagctaacatttgaaacttttcaacagtgaaatgggcagctttgtagaaatgccatcctcatctcatacagtgtgccatcaaacactcttatagtcatttgtcaggaaagctgtaaaggatttctacattgtcagggagattggactaaatgccctctaaagtgtctcctcctctgaatttcatgatctcaggacacttttttttttttaatccctgcttacgagaagcattcctggttctccagttcataacacagtatcatctttggtccctgcaaggtcccttccttattttatttatttgtttatttttatcagcattatgctcccaatctccctcaagcatttaaatgtgcttttttaattgacagataaagttgtatatttatcatgtgcaacatgatgttttgaagtatgtatacattgtggatattttaatgtgttcaatatattattttctatgcaggtgtccttgaaaaatgtatattgtttactacatgtgtattttaatttatgtaaatggtgtattatgtatttcattgtttttgtcttttgtcagtcagcattatgtttttaataaaacgtgaatctcgagtaactctgattccaaaatcagatagatacaatataaagaaaggaaaaaaaagcccctttttcttatgaatgtaaatgcagaactcttaagaaaaatattggctaatctaatccagtagtgcattaaaaaagtaaagcgtcataatatagtggagtttaacctaggattctttcagtgtaatgcaccccattaatagattaaaggaaaagaattatgattatctcagtcagttaagaaaaggcatttaataaagtttaatgctatttatttaaaagttcttagaagctgttattagaaaagagcttccatgtttggtaaaacctacagcaacccttgtagttaatgaagaaactttatatgcattcctttaaaattagagcaagacaaagatgcttactattacactattaacaatgttattagtgtgtcagtagctgtcattatttttagatagaaaatcagatttctgatcctctacctagaaaatgtatgagaacaaactatttttactaataagatgactcagttaggttttcaaatataagattagcctataaaaatcaatagcatttattttcatcagcaaaaaacaactaaaaagtaaaattttttagaaattgtgctttctacctttcttctcccccctcccattccttcttcttttctcttgcctttcctttctccttccctcccttctttccttctttctttccttgtccaggcaccattaaacaggctcagggagagaagtaatggcagccaaatagaagctgggccttatgcttataaacattgagtttaaatgaggtagtataggtggcctagtgaagtcaggatattgtttatcctcagaagacaaagcaaataagtaaatctattgagggtaatggtagccaagtttttcacagatatagaagtgagtacaaatatggaaaaggagaaagctagaatgaatcatatggttttggatgaatttaagctaatgatgcttatctttttataaatactaaaataacagttggaaatgtgggtatacgtctatgtgtatatgaggggaggagttaggaatgcatacatatatttcctggctctgttctgagagagtctggcaacagagacaccctatagcaatgagcatgtctagtgtccagatcttggtttctaaatatgagtctactaaaaggaactaagaattcttgaagaaatggctagcagcaggagtagggcaaggaaaatataagaagggcttgaacatctttttatttcagaaagtacagaagtacttaaagaatcaatgaactctagttggatttttaaaaactgtggttaaatatatataacattaaacttactattttaaccatccttaagtatacagcttagtggcattacgtatatttatattgttgtgcaaatgtcaccaccatacatctccataactttttccatcttcccaaactgaaacttcctatctattaaacgataactcccgtttccccctgcccccagctcctggcaaccaccatgctaccttgtgtgtctatgaatttggctaccctaagtacttaatataaatgaaatcatacagtatttgttcttttgtgacttgctgatttaacataatattgtagcatgtgtcggaatttccttcctttttaaggctaaataatattccattgtatgtatataccatgttttgtttacccgttcatctgtcagtggacactttgggttgctgtcaccttttgcttattgtaaataatgctgctatgaacatgagtatgcaaacatctcttcaagctcctgctttcagttattctgagtatacagccaaaagtagaattgctggatcttatggtaattatccttttaattttttgaggaactgttatactgtcttgcgtagtagctgcatcattttacattcccaccagcacaagggtttcagtttctccatatcctcaccaacgcttgatttttttttttaatagtagccatcctaatgtatgtgaaccggatatcacattgtggttttgatttgcatctccctaacgggagtggtgttgagcatctttttggttagtgacagtatgagcaagctgcaagagtacctgaccctacattgacctctgagcataagcatagatgccgcttcacttccaccttccaatcacaaagtgacactaacagcaccatacagagaaaggaactagaggtaatgtagtaccagcttagctaaattgacagtatatagtcaccacacccttcttccccatcagcatctaatttaacctaaaagacctgtgaggttgtgaactcagtgtgtcttgttagctgagtcagctaaaagattagactttgtatattatatttagacatctcagcactgcagctgctatatcttacttgatttatcttttagagcggtcatagacatttttctgttcccttacctgaaactcgtgataggaatctaaagcctgagctcattgtgatctttctccaaattctctagcacactttaaaacaatggactaaccccattgttcttatttgaactaaaatattttatggcagtaactatttggttatctataggcacttgattatagttgtccataggtgataatttatttaattaattgttttgccattgcatgccatggactaccagtttctcattaaccgctggcaaaaaacttattaatgcttttcaatctaattagatcaaataactaattctagattccagtccttaagtttcatttctcctaaaacaacttttgttacaggttaggaaattccttaagtaatactctttattttctgcaagtctttattatacttatcccagttatatctgtctaagtgtatagaaaagactcacagtaatttccaaatattctggataattgcttttgcaagtagaatttaaaatagtatcttacctagttatatcaaattgtattaagtgtttgttatacatatataagtgtttgttaatagaaacataggccaggtgcagtggctcaagcctgtaatcccagtactctgggaggccgaggcgggcggattacctgaggtccggagttcgagaccagccttaccaacatggagaaactccatctttattaaaaatacaaaattagccaggcatggtggcgcatgcctgtaatcccagctactcgggaggctgaagcaggagaatcacttgaacctgggaggcagagtttgccatgagccgagatcgcaccactgcactccagcctgggcgacaaaagtgaaactccatctcaaaaaaaaaaaaaagaaagaaagaaagaaaaaaagaaatataatagcctgtcagcagttgtagatttggcatttttttccccaatttttatttcaggttcagggggtgcatgtgcagacttgttatgtggttaacttgtgtgttgctagattttgtatgataatggcctccagctccatccatgttgttacaaaggacgtgatttcatttttgtatggctgcttagtattccatggtgtatgtgtaccacattttctttatccagtcaaccattgatgggcatctcagttgattccatgtctttgctgttgtgaatagtgctgcaatgaacatacaggtatacttgtctttttggtagaacgatttatattcctttgggtatatacctagaaatggaattgctgggttgaatggtggttctgttttaagttctttgagaaatctcttactgctttctactgtggctgagctaatttacattcccaccagcaaagtataagcattcccttttctccacaacctcaccaacatctgttttttttttaactttttaataatagtccactctgactcgtgtgagatggtatctcattgtggttttgatttgcatttctctaatgattagtgatgttgaacattttttatatacttgttggccatgtatatgtcttcttttgagaagtgtctgttcatgtcctttgcccattttttattatttgggtttgcttgttggtttaagtctcttttagattctcaatattagacctttgtcagatgcatagtttgttaatattttttcccattctttaggttgtctgtttactctttagatagtttcttttgctgtgccaaagctgtttatttagatcccacttgtctattttttattttgttgcacctgcttttggagaattcaccatgaaacttctgccaaggcttgtgtccagaatggtatttcctagattttcttctagggtttttatagttttaggtcttacatttaagtcaccaatccattttgagtttatttttgtatatagtgaaaggaaggggtccagtttcaatattctgcaaatggctagccagttatcctagcaccgtttattgaataggaagtcctttcttcattgcttcttactcttgactttattgaagatcagatggttgtagatgtgtggctttatttctgggttctctaacctgtctcattggcctatgtgtctgtttttgtaccagtgccatcctgattttggttaccatagttttgtggtatagtttgaagttaggtagtgtgatgcctccggctttgtttgctttggatgtttggccttttttttggtcccatatgaattttatttttttgagatagaatcttggctctgtcactcaggctggagtgcagtggtgcaatcatggcccactgcatcctcaacctcctgggctcaagtgatcctcctgcttcagcctcccatgtaactggaaccacaagcatgtgccaccacacttggctaattttttattttttgtagagacagggtctcactttgttgcccaagttggtctcaaactcttggcctcaagcattcctcctgcatcagcctcccaaaatggtgggattacaggcatgagctcccactcctggcaccacatgaattctagggtcattttttctaattctgtgaaaaataacattggtagtttgataggaatagcattgaacctgtaaattgctgggcagtatggccattttaatggtattgattcttcgaatccttgaacatggactgttttttccatttatttgtgtcatctctgatttctttgagcagtatttggtaattctcactgcagagattttttcacctcccaggttatctgtattcctaggtatttcactcttttgtgaaaatttgatattatatgtgtttgactatttgaaaatatccataatatgtagtaatgtgtgtttttgctagtcaaacacgagtgtgtaaaccttgctaatcactacccattctgcatctcaacttggtattgttttctagtagtcattgtatgacctgtgaaatgaaatctgtagtatttattaatatatgttatgtttaaagaacaatagtaaaatatatctgtgtgcccaccacccagtttaagaaatagaacatgaacattgaagtccttcagagctatactgcaactgctttcactcttcctctcctttagaaccactgtcctgaatttggtttaatcatttctttgctttttcctacagttttacccaataaggatgtactcttaaaatataattcagtttagttttgcctgattttgaccttcttgtgattggaatcatcctgtttattcactgataaaataagtattcattgagcagcagcttatgatattcatacatgttgcttcatgtagttacggcttatttattttcactgatgtttaagcccattctgctattgaaggatatttcattgccctggcaatgaaaacggtgttgtaactaaacacagtgttgtaatgaccattcctaatagatgtctcctgatgcacttgtgcaagagcttctcttggataaatacataggaatgaaatcagagtcaagagtatgtgcaacttcagctgtgttagattataacaaattattttccaaaatggtattacaaatttatactctgacagcaatatatgagagtttctattgcctcacatccttgccaacttttagtattaaaaattctgaattcttaaattctaccagtccagtgattataaaaggacatatcattgtaattatcatttgcatttccctgatgactaataagtggaacaatttttcatgttcattggctttgcatgttttctgtgtaaggaaatgccttttgcttcttttgcccttttttctttcgcattgtttcttttttttctcattgatttatgggagtttttagtatgttctgaataccagtcctttgatacttatacatgcagctggtatttcttcctagtttgtggttgtcttttctctgtctttctgatgtcttttggcaaatatgtttgtaattttaatgtcatcaacttcgttaatcatttccttgatgttttgacactttttgtgtcttgtgtaagaaatccttcactatcatgaggccataaaaatattctcatactctcttaaaatgtttagttattttacctttcctatttaagtccttaatctatctgaaattgatttttgtgaattgtgtgaggtagagatccagttaattttttgcaaatgaataaccaattgccccagaagaatttatttcatactgtgtcttttcaccactgatttgcaataaccccttttttatatatcagatttctataaatatgtgactccattcaggatttctattcagttcattcgcctatttatgtaagagcatcacaatctttctttctctttctttctttctttctttctttctttcttcctctttctttttccttctttccttccttcgttccttccttctttctttctttctttctttctttctttctttctttctctctctctctttcttttcttttctttctttcttcctttcttcctttctttctttgttttttttgagacagggtcttactctcttactctgtcgcccaggcttcagtgcagtgatgtgaccatggctcactgtagcctctgcctcctgggctcaggtgatcctctcacctcaacctccctggtagctgggtctacaggtgcacgccaccatgcctggctaattttttgtatttttagtagagacaggattttaccatgttgcccatcacatagtcttaattaaagttttataataaattttaatatctaccagggcaagcccccatgctgtatcttcctaagaaatgtcttctgtattctttccccttgtgtttccatatcattttagaataaccttattcacttccatgagagcctctactggaacttaaattaagattacattgaatccatagattaatgtaggaagaattgacattttgcaagttttcgtatctataaacatagtattgtacatctagatctttaatgtctttcataacactgtatgggctgggcacagtagctcatgcctgtagtcccagcaccttgggaggcctaggcaggaagattgcttgagcccagcttggacaacatggcgaaaccctgtctcacaaaaaatacaaaaatcagccagccatggtagcacacacctgtagccccagctacatgagaggctgagatgggagaatcacttgagcccactcgagggtgcagtgagccgtgattgtgccaccgcactccagcccaggtgacagtacgagaccctgcctcaaaaaatacatgtatgatttttctccatgaaggtctcatacatattttgttaaatttattgttaggtgccctgttttgttgttgttactgtaaatgctgtcttttaaaattgcattttctaattgctttttttaaaatatatagaaatacagtaaacttatctattaatattgcaaacttccttaattttagtaatttgccacatattcttttctgttttctatgttggcaatcatatcatccagtaataggaatggtttttacctcactttctaaacgttatatatatattttttttctttcttattttctggcaaggacctatagtataacattaaatagaagtgacagtaagtgcctttcttttaaagtttaatcattaagctttatctgtgctagaagttttggtagatatttgctatcaggttattaagtccatttccattcctggtttaagagtttttgtcataataggtgtcagttttatgaaatgctttttgtacagctctatctcattcttaatgtgcaattatttttatgattgaaatcagtttataatttctcaaatactccttggctggtattggagctaagttatactaacgtcaaaaaatgaaatagggagtattcctctgtatctcttctctgaaacactttatgttagagtgaaatcgtgtgttccttgaaagtttgttaaaactcaccagtaaagccaccttaacctaatgttttctttgggataatttttttttttttatttttactgaagagacagggtcttgctccattgcccaggctggggctggcacgcaggggtgggaatcatagcttactgcagcctcaaacttatgggctcaagtgatcctcccacctcactctcctgtgtagctgggaccacaggcatgcgccaccatgcacagctaatttatttttttatttttttgtagagacagggtctcgctttattgctcaggctggttttgaactctcaagcaactctcccaccttggcctcccaaagtgctgggattacaggcatgagccaccacatccagcctttgggagaatatttttaatttctaattatagtctcttcaggttttcagcttttcttgagttcattttggtaattatttcctaagaacatgtctactgattagtggcttttttcttttttaaaattagttttgtccattttattagtctataaactctttgcctttgtatctttgctttctgtctaattaatttcttttctatctttattatttccattcatctaagtttttcacttgttctattattttttacttcttgggctgcaggtttaagaggttcccaaattttctgagttcacaatgagtccttagtatctcagcaatattttcttggtgccccctgggccaaaccaaatacctgacagcttcatttagtaaatctttcaggccaagtaatgtgtattatattcctacaacttaatagctatttgggaaaaaatatacacttaaattttttcaaaaatagtaatatttttatttcatttaaaaataactacaactgcttactaatggtatacgtgctcctgttgggtactacacagctgctcagactttggtattagactggctgcaccaccaccatttctatcttttagcatagtatgtactttaaaaaaaatttttttttgaggcagagtctcgctgtgttgcccaggctggagtgcagtggcgcgatcttggctcactgcaagctccgcctcccaggttcacaccattctcctgcctcagcctcccaagtagctgggactacaggtgcccgccaccatgcccggctaattttttttgtatttttagtacagacggggtttcaccgtgttagccaggatggtctcgatctcttgacctcgtgatccgcctgcctcagccttccaaagtgctgggattacaggcgtgagccaccgcgcccggccttagcatagtgtgtactttttaatcacagcaaccactcaatacccagctttgcaaagacacaatatcattaatagtaatgtggcatgatctaatgttgaaaccgaattacttcaagcatataatatcaagagattcagtgtcaatatacattcaaaaatgctgtgtttcccctgaaaattaaaaatatatgacatcactcttgacatttccacatagcacctaggatgacttactccacagtttaggagcgaggctttcagacattctttttaattattacttaatatttcatggtgcaggccagcttttttcccctttgaacaaaatttcaacaaacatccttgtatatacgtctttatttactgatacctgtagttaataagtattggcaggttgctgtccaaagggctatgtttcatatctccaccagcagtttttcagagtatctcctttcccatatccttaccaacaacagattcagttgctcttgtaaatgttgtttgttatatgggcaaaaaaggtggtaaaagtacatataaagaacttgtttggtttgcttctgatccccagcacctgaaatagggcctcacccatgaaaagtttcagtaaatatttgttgagtgaatggatgcaggaatcagtcaactaacttatgttattgttacttcaatttgtagtccctgcagtattaattgaatttgagcattattttaaatgcatgtttaggccgggcgcagtggctcacgcctgtaataccagcactttgggaggctaaggtgggcggatcacaaggtccggagatcaacaccagcctggccaaggtggtgaaaccccgtctctacttaaaatagaaaaaaattagccgggcgtggtggcaggtgcctgtaatcccagctacttggaaggctgaggcaggagactcgcttgaaccttggaggcagaggttgcagtgagccgagatcgcaccactgcactccagcctaggcgacagtgagactctgtctcaaaaagtaaaataaaataaataaaataaaataaaataaagaaataaagcatgcttgtttggcttttctatttttctttgacttgcttatgtatactttttgcctttttttcttttgggttaactttttcttgacattttgtaagagcactttagtttagatattgccctttacaattttttcccaaatacattatttatctgttgactttgtgttttaacttttgccatagaaaaacttttaattatatttgctcattttggctagccttttttttaataacctctatattttcagtctgtttagaacattttcttcatcaagatatatatgttgtctaaattttcttgcaagattcttattgcagctggaatttataactatacagtatattagaaatatccagtttyattttcttctgaaagaatggccagttattctggcaaaatttattaaataatttgtcattttcctactaaattgaactataatatttgtcatgtattggatttttatacatactgggatttatttctggattgttattctaatccatggatatttatttctaaacgaataccatatttatttgataaaaggacattatgttccaaaagcaaattatcctacattgattttttttttttgtactttttaagccattcctgggcattgattatttaatataaacattaagacaatactgttcagttccccgaaaaaaaaatccactggaattgagagtgcaaaccatttggaattgcattccatttatatgttaattttggaaatttaatattatcttttttttttcttttttttttctgagacggagtctcgctgtgtcgcccaggctggagtgcagtggctggatctcagctcactgcaagctccacctgccgggttctcaccattctcctgccacagcctcttgagtagctgggactagaggcgcccgccaccacgcccggctaattttttgtatttttagtggagacggggtttcactgtgttaaccaggatggtctcgatctcctgacckcgtgatccgcccgccttggcccccaaagtgctgggattacaagtgtgagctaccgtgcccgaccctgaaaatttaatattttcttataagtcttcccatctaataacatccagttttcaattttttgtgtgcctttcagtagcttttaaggttttcttacaagttttttggtttattagatgtattctttagcatgttatagtttatactgatattgtgagtgaagtatttttctgtttccattttcagttgcttttttgctataataaatcaaaactattgcttttacatacttatttaatacctatccattttaccgaattctcttattaatttcagttttttattagtttcttgggttttctagacatgcaataataccaattcaaaagaaagttttatatcttttttgcccgtttttatacaatttatttatttcatcttcttgtcatattgtattctccagaacctccaagacaatgttaaataaaaatctgataaaaattatcactgtcttaatcctaataaaaatggttagtgttttgttatttaggataattattttttatttggctttagtaaataatttttattatcttgaactagttttcttctgttcccattttgcttgttatttgtattggctgataaatatttttcaattgcttttcagcacttattataatgtttttctcttccttagtgtcctgatttaatagatgaaattgataaatttttttcattgatccatgattgcattcctttatgcttcccacaaaactttatcttttctctgtggaagcttgtaggatcttccctttgaccccagtcttcagaaatgttatagtgatgtccgctgatgtcattggggtatttgcatatattgtgctgaatatgtgtcaaacccttttaatctggaagcttttgtccttaaattctgggcaattttctttaatcttccttctttttctcattttgctcttctgggatttatactattcagatgttggcccttcctatactttgagtatgttcctcagaattcatgtgttagaaatttggcccctgatgtgttggtgttgggaggtgggacctttaagagatgattaggtcattgacagtgattaatgccactctttcttaactgagttaatcctcaagggagtaaaggagttcttgctctcatgtgccatgttggtttgctgcaactatgaacttgtcatttacattaggtatttctcctaatgctatccctaccccagacccccacccctgacaggccccagtgtgtgatgttccctgccctgtgtccaaatgttctcattgttcaattcccacctatgagtgagaacatgcagtgtttggttttctgtctttgtgatagtttgctgagaagatggtttccagcctcatccatatccctgcataggacatgaactcatccttttttatggctgcatagtattccatggtgtatatgtgccacattttcttaatccagtctatcattgatggacatttgggttggttccaagtctttgctattgtgaatagtgctgcaataaacatacatgtgcatgtgtctttatagtagcatgatttataatcctttgggtatatacccagtaatgggattgctgggtgaaatgctatttccagttctagatccttgaggaattgccaccctgtcttccacaatggttgaactcatttacagtcccaccaacagtgtaaaagcattcctatttctccacatccgctccagcatctgttgtttcctgactttttaaagatcaccattctaactggtgtgagatggtatctcattgtggttttgatttgcgtttctctgatgaccartgatgatgagcattctttcataagtctgttggctgcataaacgtcttcttttgagaagtgtctgttgatatacttcacccactttttgatggagttgtttttttcttgtaaatttgtttgagttctttgtagattctggatattagccctttgtcagatgggtagattgcaaaatttttctcccattctgtagattgcctattcactctgatggtagtttcttttgctgtgcagtagctctttagtttaattagatcscatttgtctattttggttttgttgccattgcttttggtgttttagtcatgaagtccttaccaatgcctgtgtcctgaatggtattgcctaggttttcttctagggtttttatggttttaggtctaacatttaagtctttaatccatcttgaattaatttctatataaggtgtaaggaagkgatccagtttcagctttctacatatggctagtcagttttcccagcaccatttattaaatagggaatcctttccccatctgttgtttttgtcaggtttgtcaaagatcagatggttgtagatgtgtggtgatatttctgaggcctctgttctgttccattggtctatatatctgttttgataccagtaccatgctgttttggttactgtagccttgtagtatagtttgaagtcaggtaccatgatgcctccagctttcttctttttgtttagaattatcttggcaatgtgggctccttttttggttccatatgaactttaaagtagtttttttcaaattctgtgaagaaagttattggtagcttgatggggatggcattgaatatataaattaccttgggcagtatggccattttcacggtattggttcttcctatccatgagcatggaatgttcttccatttctttgtgtcctcttttatttcgttgagcaatggtttctagttcctcttgaagaggtccttcacatcccttgtaagttggattcctaggtattttattctcttagtagcaattgtgaatgggagttcactcatgatttggctctccgtttgtctgttattggtgtaagaatgcttgtgatttttgcgcatcgattttgtatcctgagacactgctgaagctgcttatcagcttaaggagattttgggctgagacgatggggtttyctaaatatacaatcatgtcatctgcaaacagggacaatttcacttcctcttttcctaatttaataccttttatttctttctcttccctgactgccctggtgagaacttccaacattaagttgaatagcagttgtgagaaagggcatccttgtcttgtgccagttttcaaagggaatgcttccagtttttgcccattcagtatgatattggctgtgggtttgtcataaatagctcttattattttgakgtacgttccgtcaataccttgtttatcgagagtttttagcatgaagggctrttgaattttgtcaaaggccttttctgcatctgttgagataatcatgtctttttgttgttggttctgtttatgtgatagattacatttattgatttgcgtatgttgaaccagccttgcaccccagggatgaagccgacttgatcgtggtggataagctttttgatgtgctgctggattcggtttgccattattttattgaggattttcacattgatgttcatcagggatattgatctaaaattctctttttctgttgtgtctttgccaggctttggtatcaggatgatgttggcctcataaaatgagttagggaggattccctctttttctattgattggaagagtttcagaaggaatggtaccagctcctctttgtacctctggtagaattcggttgtgaatccgtctgcttctggactttttttgttgttggtaggctattattgcctcaatttcagagcctgttactggtctattcagagattcaacttcttccaggtttagtcttgggagggtgtatgtgtccaggaatttatccatttcttctagattttctagtttatttgagcagaggtgtttatagtattctctgatggtagtttgtatttctgtgggatcggtggtgatatcccctttatcattttttatgttttatttttatttatttatttttgagacagtctcgctctgtcacccaggctagagtgccatggcacaatctcagctcactgcaagctccgcctcccaggttcatgccattctcctacctcagcctcccgagtagcatttttttattgcatctgtttgattcttctctcttttcttctttattagtcttgctagcagtctatcaattttgttgatcttttcaaaaaaccagcccctggattcattgatttttttgaaaggttttttgtgtctctatctctttcagttctgctctgatcttagttatttcttgccttctgctagcttttgaatttgtttgctcttgcttctttagttcttttgattgtgatgttaggatgctgattttggatcttccctgctttctcttgtgggcatttagtgctgtaaatttccctctacacactgctttaaatgcgccccagagattctgatacgttgtgtctttggtctcattagtttcaaaaaacatctttatttctgccttcatttcgttatgtacccagtagtcattcaggagcactttgttcagtttccatgtagttgagcggttttgagtgagtttcttaatcttgagttctaatttgattgcactgtggtctsagacacagtttgttgtgatttctgttcttttacatttgctgaggcatgctttacttccaattatgtggtcaattttggaataagtgtgatgtggtgctgagaagaatgtatattctgttgatttggggtggagagttctgtagatgtccattaggtccacttggtccagagctgagttcaagtcctggatatccttgttaaccttctgtctcgttgatctgtgtaatatagacagtggggtgttgaagtctcccattattattgtgtaggagtctaagtctctttgtaggtctctcaggacttgctttatgaatctgggtgctcctgtattgggtgcatctatatttaggatagttagctcttcttgttgaattgatctgtttaccattatgtaatggccttctttgtctcttttgatctttgttggtttaaagtctgttttatcagagactaggattgaggattgcaacacctgttttttttttttttttttttttttttttttgcttttcgtttgcttggtagatctccctccatccctttattttgagcctatgtgtgtctcttcatgtgagatgggtctcctgaatagagcacaccgatgggtcttgactctttattcaatttgccagtctgtatcttttaattggggcatttagcccatttaaatttaaggttaatattgttatgtgtgaatttgatcctatcattatgatgctasctggttattttgcccattaattgatgcagtttctttgtaacattgatggtctttacaatttgacatgtttttgcagtggctggtactggttgttcctttccatgtttatgcttccttcaggagctcttgtaaggcaggcctggtggtgacaaaatctctcagcatttgcttgtctgtaaaggattttatttctccttcatttatgaagcttagtttggctggatatgaaattctgggttgaaaattattttctttaagaaggatgaatattggccccctctctcttccggcttgtagggtttctgccgagagatccactgttagtctgatgggcttccctttgtgggtaacctgacctttctctctggctgcccgtaacattttttccttcatttcaaccttgatgaatctgacaattctgtgtcttggggttgctcttctcgaggagtatctttgtggtgttctctgtatttcctgaatttgaatgttggcctgccttgctaggttggggaagttctcctggatgatatcctgaagagtgttttccaacttggttccattttccccatcactttcaggtacacctatcaaatgtagatttggtcttttcacctagtcccgtatttcttggaggcttcgtttgttgctttttactcttttttctctaaccttgtcttctcactttatttcattaatgtgatcttcaatcactgataccctttcttccagttgatcgaattgggtattgaagcttgtgcatgcgtcacgaagttctcgtgccatggttttcagctccatcaggtcatttaaggttttctctatactgtttgttctagttagccattcgtctaaccttttttcaagtttttagcttccttgcgatgggtttgaacatgctcctttagcttggagaagtttgttattactgaccttctgaagcctacttctgtcaactcatcaaagtcattctccatccagctttgttccattgctggggaggagctgcgatcctttggaggagaagaggtgctctggtttttagaattttcagcttttctgctctggtttctccccatctttgtggttttatctaccttttgtctttgatgttggtgaactacagatggggttttggtgtagatgtcctttttgttgatgttggtgctattcctttctgttgtttagttttccttttaacagtcaggtccctcagctgcaggtgtgttggagtttgctggaggtccactccagaccctgtttgcctgagtatcaccagtggaggctgcagaacagcaaatattgcagaacagcaaatactgctgcctgatccttcctctgaaagcttcgtcccagaggggcacccatctatatcaggtgtctgtcgatccctactgggaggtgtctcccagttagactacacaggggtcagggacccacttgaggaggcagtctgtccattctcagagctcagccgccattctggaagaaccactgctctcttcagagctgtcagacagggacttctaagtctgcagaagctgtctgctgcgttttgttcagctatgccctgcccacagaggtggagtccatagaggcagtaggccttgctgagctgcagtgggctccgcccagttcgagcttcctggtttctttgtttacctacgcaagctgcagcaatggcagatgcccctcccccagccaggctgccacctcaaagttcaatctcagactgctgtgctagcttgcagtgagcaaggctctgtggacatgggaccagccaagcctggcatgggagagaatcttcttgtctgccagttgctaagaccttggtaaaagtgcagtatttgggtgggagtgtcccgtttttccaggtgcagtctgtcatggcttccctttgctgggaaagggaaatcccccaatctcttgctcttcgcaggtgaggtgacaccccacgctgcttcggctcaccctccgtgggctgcacccactgtccaaccagtcccaatgagatgaaacaggtacctcacttggaaatgcagaaatcacccgtcttctgcatcgatcacgctgggagctgcagaccagagctgttcctkttcagccatcttgaaacggatctccccaagttaataactttttaacatgtatagacacctttgaaactatcacaacaatcaaaataatgaaccaatttattatccccaaaagtttcttgtactcttttgtacaagaaaagggatacaaaggatactctcccctcttctcaacaccctgcctctatacccattcccaggtgactgctgatcttttctctgccactatagattaggttgcattttctacattttatgtgaatggaatcaaatatgtaatttttttggtctggcttcttttactcagcatcattattttgatgtatgtagtatgcatcaatagatcattcctttttaatggtgaatagtactgttatatattgtataaatattaggttggtaaaaaagtaaatgcagttttggaccatgaattttaaatcattataactaggctcaaacacattttttttcacctgtttgtactttttttaaaattctttatattaatttctgaggtacatgtccaggatgtgcaggtttgttacataggtaaacgtgtgccatggttgtttgctgcacctgtcaacccatcacctaggtattaagcccagcatgcatcagctcttttccgtaatgctctcccacccccaccatcccccaacaggccccagtaagtattgttcccctacctgtgtccatgggagctgaacaatgaaaacacatctttattaatcagaataggaaccgttacaatcaacacatttttgccagttaataataagtttctttattcctgtagcataaatgtctgtgcttcaagattcaacgaactcttggaaagcattttctgcatcctgctggttgtggaagcattttccctgcaaaaagttgttgagatgcttgaagtggtagtcagttgaccaggggttgggtgcatayggtggatgaggcagcactttgtagcccaatttgttcaacttttgaagcattggttgtgtgacatgcattgtcatggagaagaattgggccctttctgttgaccaatgccagctgcaggccttgcagttttcggtttatctcatcgatttgccaactatacttctgagatgtaatggtttcgccaggattcagaaagctgtagtggatcagactggcagcagaccaccaaacagtgaccatgaccttttttggttgcaagtttggctttgggaagcgctttggagctgcttcttggtccaacccctgagctggttgtcactggttgtcatataaaatccactttttgtggcacatcacaatccaattgagaaatgtttccttgttgcatagagtaagagaagatgacacttcaaaacgatggkttttttttktttgttttttgttttttttggttcagctcatgaggcatccacttatcgagctttttcacctttccagtttgcttcaaatgccaaatgaccatagaatggtcaatggtgagctcttcggcaccttctcgtgtagttgtaaaaggatgagctttgatgattgctcccacttggttgttgtcaacttctaatggctggtcactacactcctcatcttcctcttctcctttgcaaaacttcttgaacaagcactgcactgtatgttcattagcagttcctgggccaaatgcattgttgatgttgcaagttatctctgctgctttatgacccgttttgaactcgaacaagaaaattgcttgaatttaatttttatctaacatcattttcatagtctaaaacatgaaatgaacagcaagtaataagtcattaacaaaagaaaaataaagtgagaaatgcccattaaaatgatgtataaaacataaccacatttatttaagaacgtattccagtatcaaacggcagattccaacaatgcaaatacctcagttacttttgcttatccattcacatgttaatgaatatttgattcatttccagctggggcctggtacaagtaaaactgctctcaacattcatgcataagtctttgatggacataatgcattcatttatctagtttaaaataacaggagtgtattggctggaccctatagtatgtgtacttttaactttttaagaaatgtccaagctgtgtttcaagcagctctatcattttacattcccaccatgagtatatgagagttccagtatttccacatcctctccaacacttcctgtagtcagtctttccatttgaagccatcctaataggtgtgtggttgtatctcatgtggttttaatttgcactttcctaatgactgatgatattggacatcttgatttatacttatttaccatctatatatctttgttgatgtatgttcaaatattttgccctttttaaattgggttgtttgttttcttattaccgagtttggaaaaatttttatattctgaatacaagtccttctcaaatatatgattttcagttattttcagatattgtcttatatttttattctctgaacagtgtcttttaaagatcagaagctttttattttgataaagtccagtttatcaattttttattcatgaatagatatgcacttggtatcatatctaagaagtcttctctaaacccaaagtgacaaaaattttctctcattttctttaaaaatgctaaatgtttaggtttcatatttagatctcagctgtttctagtttatctttttaatttggtataaggtatgggaccaagttcatttcttttacaaacagatatagagttgttgttgcatcatttgtttactcactgaattggctttgcacttttgtgaaaaatagtatagatttaagtgcagacattagctgtagggtttttttgtagatactctcttatctgtttatgaaagtgtcctttgattcctaggatactgaggaatcaaataattgatgtggtattttgtcagattttttttccgtatcttttaaggtgatcagatagtttttctcttcagttttttaacagggtgaattacattggttgatttgctaatgtgaaaccagctttccattctagttgatcatgatgtattttttatttttttatttaattttttattttattagagacagaggacttgctatcttgcccagactgactccagtgatcctcttgcttcagcctcccaaatagctggaactataggcacatagtactgcatccggtttaacttgtcggatttgatttgctaatttctgtgtctggttttggtagcagggtattgctggcctcataaaatcagttgggaagtgcatactccggctcaattttccagtagagtttgtctagaattggtattattgcttccttaaatatttggtggaattcataaataaagatatccaggcctagatctttctttatgagaaggtttttaacttcaagttcaattattttgtagatgtaatgtatttgggttatttattttgtaagaggtmtttagcaattggtatcttaaaaggaatttgttcattttgtcaaaattgtccaatatatagatataacatgttaatcctagttctttattatctttttaatatctatagaatctagaataatgtcatctctctcattcctcatggcaaaaatgtgttgtctcccctttttatcctgttcagtcaagctagagagttatacattttattaaatttctcagagaaccagtttcgggtttcattgattttctctctgttgtttttatgttgtctattattgatttctacacgacattttatttcctttcttctacttactttatatttaattagctctttgtccattttcttaaggtagatgctaatgtgattgatttgaaacctttcttcttttctaacacaggtatttagtgctagaaatttctcactaaataccgccttattagcagccaacaaatttttatataatatgtcttcatttttattcatttttaaatactttctcatttcccttttgatttcttctttgaacgcttaggttatttagaattatgttatgtagtttatattatactctttgcgtggatctttcagaggtttttctcttaatgctttctaacttctatcatgttcagataacatgcttttaaattcattgggagatgttttatggtccagtatatggtctatattggcagctattccttatgcacttgaaaagaatgtgtgttctaatataagaattttgattggtatagcattatgaaattttaagtaggggccatccttttgctttttccctacttaagattttcagtctttccaatggtagtttgttaaaaggaaaaaaaaaaagacaattttttttattcttaaggctaaacttcaattttgaattctcaccagtgacaaaaaggtttgcaagtttctaacagctacaggaaaatcaaatacagtctacccgaaatatttttctacttatgcagtgtagaaatgaccaaagttcaatgtgaaaagggaaaaaaacaaggagactaaaacacttttataagtacaacttaagccagattacagatagtctgcaatggagacagcccagtttcataacaaaatcaaaggggaaagatccacatatcagtctttgaggctgtctgactttgataccctttgaagttcaaactgttctctcttttatctataactaatttcatggaaaacgttatcacgttggttccaaaccttattttttagcctggggagactgacatttttcagttgccctataacaagttcagtaccctgatttgatgtcccctgccataattttctaaacagtattstaaaaatagcagccaaaagcctaaggaaagggcaattgtgggaagaaaagagatagaaaatcacactttctataactttaggactataagacctatattttaagggtattgtagtctaatgtagtccaaaatctttatgtgacacatgtggaactagattcgactaggtgaaatgtgtctaattcaaaccaagatgtgctgttagtgtgacatatacattggcttttgaggacttagtccagtaaaggaatataaaatatctcattagtggacgggcacggtggctcacgcctataatcccagcgctttgggaggcccaggtgggcggatcacctgaggttggagtttgagaccagcctgaccaacatggagaaactctgtctctattaaaaattcaaaattagtcgggcgtggtggcgcatgcctgtaatcccagctacttgggaggctgaggcaggaaaatcgcttgaagccgggaggtggaggttgcagtgagccaagatcacgcaccattgcactccaagagcaaaactccatctaaaaatatatatatatatatatcattagtgacttttacattaattttaggttgaactatcatattttagatgtgtttggttagataaaatatatttaattttacctgtttccttttactattttaaattaggctaccagaaaatattaaattacacatatagctcacatcatacagatcctgcttgacttaaaatggggttacattcctgataaactctttgtaagttaaaaatatcctaagttgaaagtgcagttaggccaggtgcggtggctcacgcctgtaattccaacactttgagaggctgaggagggagaactgcttgagcccaggagttcaagaccagcctgggcaacatagtgagacctcatctctgcaaaacataaaaaaaatagctggacatgatggtgtacacctgtggtcccagctacttaggaggctgaggtgggaggattgcctgagcctggaaggtggaggctgcagtgagctgtgatcatgccacttcattccagcatgagtgacagagcaagagcctgtctcaatcaatcaataaataaataaaaataagaaaatgcgactgggcgtggtggctcacgcctgtaatcccagcactttgggaggctgaggggggtggatcgcctgaggtcaggagtttgagaccagcttggccagcatcgtgaaacctcgtctytactaaaaatacaaaaattagcggggcggggtggtgcatgcctgtaatcccagctactcgggaagctgaggcaggagaattgcttgaacccaggaggcagaggttgccgtgagcggagatcacgccattgcactcaagcctgggcaacagagcgagactctgtctcaaaaataaataaataaataaataagaaaatgctttcaatacacctagcctactgaacaacatagcttagcctagcatactttaaacatgctcagaacacttacgttagcctacagttgggcagaatcatctaatacaaagcctattttataataaagtgtcaaatatctcatgtaatttattgaatactatactaaaagtggaaaatagaatgattgtgtgggtactcgaggtatagtccctaccgaatgcatatcactttcacatcatcttaaactcaaaaaattgtaagtcaaaccatcataagtctaggaccatctgtatttcagtcagacatcattgctctagaatcccatgctcaaactctagcttaagacactagtcttgctttccttttccaccactcattttcctttgatcctgatgatagaagcccctgaagtagtggtggatgtaagtgagaacagttgagagcatcaaagcccttacagagatttagcaaaaattgctttttaattaatggaactagcatgaaattcaacccaagctaataaatctggtctctaattttctgcctcacactttatacttcagtgaaatcctcttagtttggattttattgcaatatttgattgaagtttaggtggccatttggggccgggaactagagattctttttttaaaagggtaaagaaaatcaattaggtacagatactttgccaataaggggttacattccawagtttactgctaaacccttcctcctgcaattcacagcatgatctccatgtgccaggaggagcctgcctagaaaatggtgaagatctacaaccattttttgttttagagtcaagaaaatatgtcccattgtaaatagcttttcattctttaaggttgcttactcaaacaactcttgacagattcaaaatttcacaaatgtagtaaacagtggccgtgatgtttctaagaattacatttagactgaaaccattctaaccacatttttgtagagtatcatttgtccctaaagtttgtctcactgtagccaaaaattctgccactggatttaaattgcttagtctctccattgtagaactcagcacgccttgtctgttttgttgttgttgttgttgttgttgtttttaactagggtgtaaccaaaatgcaggtttarttgctcgtcacttgcagagtccaattaacaagggagagatctagtataaagaaaatgattttttattccaaagctagtttggggaagaagtacaggcttcctgccttaagggtaccgcttcacttttggagcaggaagtgagtgcttttaaaagggagtttggcaggaatggcatgcgagggaggaagaaagaggaggggatccacatgacttgcttcagtactctgtctgcccagcattcaagctggcgagcactgtgcctttgtaggcagaactaggttataaaggtagctgaaactctccaggtaggagaaagtttcctagtgggcatactttgggttgtagattgactgttgtctctcgaggcaacctcctggtgggtgcaagttccactctggagcttctaagcacatagttaaatgaacttgctctgtagggagtatctggtaacagggaggtaaaaggttataattgcatttctaaagggctaagtaagaagtggaaagagggggaaatagagaaaagagaaaaaaacgagctcattctctctgtctcagaaaaatgggggtgctcagttacaagggtatgtttcaaagcaggtcctgtgcttttttcagtacactacagatggtctttaaatgataatggtgtttggtctataaccataataacatttctttaaatttgtgtgaaataaaaaaaagttttgaattcacataaataatgataaactagtttaattttgtaaacttctatttaggcaaaacataatgcttaaaaatgaaaagcagtagaccccatttttattgcagatatgtgtaaaagtcttatttaaattatagtcatagtttaaactatgtgcaaaataacagccattaagtactggcatataagagaaaaaaattagaggaaaatgtgaaagaaaaatgagtccaaatagactattcatcttccagtccagctaaaatatgcctcactcgtggatgctgatttttttcttttttctttttttcctttttctttttttgagacagagtcttgctctgtttcccaggctggagtaccgtgtcatratcgtggctcactgcatgcagcctccatctcctgggctcaaccagtcctcccacctcagcctcctgagtagctaggactgcaggtgcgcaccaccatgccagttaatttttaagttttttgtacaatcggagtcccactatgttgcccaggctggtcttaaaacgcctgggctcaagcagtcctcccaccttggcctcctaaagtactaggattacagacatgaactaccatgcccagcccgtgaaggcttttctgattgctattggaatcactccctcttctataatcccataacatctttttcttctgttgtggcaagttaaacacatggatttatattagctataggtaagcctgcttatctgttagttgcaatagcttgtaagccctttgaagacagaataactccaattgtaagagactgtatgcaagtttttactttgtatgcactgggctcatacttactggtgaagaaataaagacataagtatgaagtaagtaacacaagcatatttccttaaaacacttagattttaatcttaaaaatgtggcgacaatttactttaagcaaatagagtaattttaatcatgcaaagaatttcacacattgcttgtatccaaaatcaggtataattctagttttttagaatgtttcaaggccatatcagaaaggataattttagtacactataaggcagtgattctcaaagtttagcgagcattagaataactagacagcatgttaaaacacaggtcgctgtggccacacccagagtttctgattaagtagaaactaggatggagcccaggaatttgtatatttaacaagttctggctggacgcggtggctgaagcccgtaatcccagcactttgggaggcccaggcgggcggataacctgaggtcgggagtaggagaccaacctgaccaacatggagaaaccccatctctactgaaaatacaaaattagccgggcatggtggcgtatgcctgtaatcccatctacttgggaggctgaggcaggagaatcgcttgaacccgagaggtggaagttgcagtgagctgagatcaagccattgtactccagcctgggcaacaagagcaaaactccagctccaaaaaaaaaaaaaaaaaaaaaagaagttttcaggtcatactgatgcatatcatccagggaccacattttgaaaactattactataggcagtaggctgagaagggaagagaagtaaactggaaaagagaaagaaagaagtagggcaaagtatgcaatgaatgggaaaattaagggtaggaggaacccttaagggtaggttgtggaaccctgacagaacaccagggcattagaaagacgtggtctctctccatgtcatgcttccctgactagggtatcactgtcctcgtgcctggacattctgaaataacggtacagggcatggtgtccacattgcaatttaatatccactcacttttgtttcgggaaattggcctccttctgcagctagtattttaaaaccagtactttgaagggctactttttccacacagcactgaaatcttagataaaatcataaagaaattttagattaatgtctcttctcacatgtgaaagaagatactttataactcaataagcagagagtctaatgatctgcaacctaattataaaattcctttaagtatatgttctgaaagacagactaggttttatgtaggcatatgctaatccatatgtgtggtaattaataktatatacttcttgcactggtgcctagaatatctagatcaggtctcataaactacacacaaagctggtagcttctctgtatcaggaacttggcctgactcttgcctccctatctccctgccaaagctcagttatacaacttagagtaaattcttcccccttcccaattctgcctgtttttccatgccaaaaataagtaaataaatatacatatatgatatacatatatgtgtgtgtatatatatatatatayacacacacacacacacacacatatagtatttgcagttttgagccttatgagttatatgtagttgctgtactctcccagtatacctggcaacttactgagtcttatttctatttctttggactagaggtatatataagataagaaataagtaagttttttttaaaaaagaagaggccgggcayggtggctcacacctgtaatcccagcactttaggaggcccaggcaggcggatcacctgaggtcaggagttccagaccagcctgaccaacatggagaaacccctgtctctactaaaaatacaaaattagccgggcatggtggcacatgcctgtaatctcagcttcttgagaggctgaggcaggagaattacttgaacctgggaggtggaggttgtagtgagcctaagggaggagaccacccctcatattgtcttatgcccaatttctgcctccaaagaaagaaaaagtaaaaactaaaaggcagaaatgaaatccacaagcagacagcccggggccacaccctggacctggtagttaaagatggacccctgacctaattggttatgttatctatagattccagacattgtatagaaaagcactgtgaaaatccctatcctgttttgttacgacctaattaccggtgcatgcagcccccagtcacgtaccccctgcttgctcaatcgatcacgaccctctcacgcacacccccttagagttgtgagcccttaaaagggacagaaattgctcactcggggagctcggcttttgagacaggagtcttgccgatgcccccagccgaataaaccccttccttctttaactcggagtctgaggagttttgtctgtggctcgtcstactacaagccaagatggtgccattgcactccagcctgggcaacaagagcaaaactctatctcaaaaaaaaaaaagaagaagaagaagaagaaaggagaggctatttcaaatcttgatggaaaatcagctagagaatgtgagggaaaagagattaaaatattctaacaatagtggtataaagaaatgtctaggaattacgaactgaagaatgacctaattctgggatcctggtaatttacctccatacatttacttctgctcttttcctaaaagttggatagtagaggattaaaaaataaaaaaagccagatgcagtggctcacacctgtaatcccagcactttgggaggccaaggcgagcggatcacaaagtcaggagatcaagaccatcctggctaacacggtgaaaccgcgtctctactaaaaaaaaatagaaaaaattagccgggcrtggtggcaggcgcctgtagtcccagctactcaggaggctgaggcaggagaatggcgtgaactcaggaggcagagcttgcagcgagccgagatcacgccactgcactccagcctgggtgacagagtgagactccgtctcaaaaaaaaaaagacgtaaatccacaaggaaaagaaaatagattaagagatattagctacaacattttagaagacagaaggcaaaggggccaggcgtagtggctcataaatgtaatctcagcactttggaaggccaagatgtgtggatcatatgagcccaggaattgagaccagtctgtgcaacatggcaaaaccttgtctctgcaaaaaaataaataaaatacaaaaatacaaaaattagccaggcatggtggcgtgcacctgtagttccagctactcaggaagctgaggtgggaggatggcttcagcctgggaggttcaaggctgcagtgagccatgattgtgccactgcactccagcctggatcataaagtgagaccctgtctcaaaaaaaagaaataaaaagaaaatggacaagtagacttagtagacatgggaaagctaaaaataggaggatgggggggaaaacagagaagcaatctgatttgtactacagagctcccccaaaggctcaaaaatggataggagtaaaggttatagccatggtgagagtccaaaggtagtaagttagtaagagggagccgatgacaaatgtggcgaagatagaaataacagtacttgattaagcttcaagagggcaatgatcatataactgcttaattcgtggtccctagatgcgcctatttcaactaaacatattgttgggtggatagatagaaagaaggtcactttgcaggcatcaagttcatatgtgatggaatcgtagggtatgatgtgatggaaaggtttttggctaggcgactgaataaatgctggtcctgtttaccaaaatagtgtggaagaggatcatgcttaagggtgagtgtcggaggcctgggtacagataattgagttcaggatatatcaagtttggggtttttaaagacatcaaattggaggtgtccggtcagatggagctgaggagggtggtctaggctggcgatacagattccagtggtgctttatattacaaaaatggtcgcgctaacctcaggaaggcacgtaccataagaagagatctgaagatgaaaaaaaaaagtgaggaatactaatattaagaagggaagatagaataataaaaacttgtggctgggcgcagtggctcatgcctgtaatcccagcactttgggaggccgaggcgggtggatcacttgagctcaggagttcgagaccagcctgggcaacatggtgaaaccccatctctggtaaaaatataaaaattagctgggcctggtggtgtgtgcctgtaatcccagctactagggaggctgaggcaggagaattgcttgaactcgggaggcggaggttgcagggagccaagaccgtgtcactgcacttcagcctgggtgacagagggagattctgtctcaaaacaaaaacaaaaacaaaaaaacttgtaatgggacctgagacaaaagaaggtcacagaggccaaggaaggaaatcagttcaagaataaagtgactttataaaagataaattatataaataaatatatgatctgcaattaggaagaaaatgaagtattgacaccaaagtgttacattgatattcaaagatggcaggatttatcacaagatattttgctttcttttcacttacatgtatttcctagatctttcatattgaaatggaagtttgtgagttttttttaaatgaaaataaaaaaaagaacacatgtgtaatcttaaatggtacagaggttaaattaaatgtctaagtataatccatttggttgataagggtgggggttacagaaggcccaagccaaacaagaggctgttgatcttctgactagtatccaattttatgttgtcattaagaaacaagttcagggtcaggcatggtaatttgctcctgtactcttagcacttgggaggctgaggcaagaggatcacttgaggccagaatttcaagaccagcctaaacaacgtagtgagaccccatccctacaaaaaatttaaaaattagccagatgtgtgtaatctcagctactcaggaggctgagcaggaggatcacttgagcccagtagttcaaggttgcagtgagccatgactgcaccactgcactccagcctgggcaacagagcaagaccctgtctcaaaaaaaaraaaaaaaaggaaaagaaagaaaaagatgtaagttcaggacttgcacattgtttcttagtatttccaaggccgctttcatgttactatcctgaccacctgtaacacttcacatttcaccgagtgtgaaaaaaatgtattgaagcacagggaaatatgtgaaatatagatataaatatatttcattcattgtgtgcaactggattttgaatttcaaaaacattttcattaataatgctcagcaggaacaattacattcttaaaatttaaaatttttctgccagtgtttgattttgaccattgacaataacatttcaggrtatttttcttgaaactgagagctagctaagcttttctctgatcttctattatcatctttttatgatataagtcataaagaaaattatccctagttatttgtgatagttgattatataagtatttgattagtttatctttgctagtattataaaggcaacattatgatagctcatagatttaaaatgctaaaaattactatttggtttttttgtttgtctgtttttggagacagaatctcactctgtcacttgggctggagtacagtggtgcaatcttggctcactgcaacctccgcctcccaggttcaagcgattctcctgtctcagcttccagagtagctggggttacaggtgcacaccaccacacctggctaatttttgtatttttagtagacatggggtttcaccatattggtcaggctggtctcgaactcttggaccttaggtgatccacccaccttggcctcccaaagtgctgggattacaggaatgagccaccgtgcccagcctatttggtttcttatgacattttttatatatatgaagctttttctaatgtacagaatggttttttatacattttatttatttggtcaacctactaacctttctaaatatgacagatttataattcagtttccttttttctcacaggaaccttaagtctggtctttaattttttttctgaaagaaaagcaaaaaaaattacagtagcaactttgaaactatgtaaactgtacaaattattaatgttatctcttcatgggtaagtccatcttttccttgttttaaagttagaggaagcagtttatcagctagaatttctttttttttttttttttttgagacggactcttgctctgttaccagactggagtacagtggcgcgatctcggcttactgcagtctccacttcccgggttcaagcaattctcctgcctcagcctcccaagtatctgggactacaggcacgtgccaccacgcccagctaatttttgtatttttagtagagatagggtttcaccatggtggccaggaccgtctcaatctcttgacctcatgatctgcccgcctcggcctcccaaagtgctgggattacaggcgtgagccactgcacccggccttctttttcaagtactctctttccttggcttccataatgaaacatttctagcatatccttctgtctctctggccatttcatctccatcttcacaagttcatccttctccacttgtcttttaatttttgaagccttatattctttttctttttaatagactttattttttaaaacagtttttagttcacagcaacagtgagcaaaagttacagagattttctgtataccacctgccccccgcacatctatagccccccccactataaacaccctgtaacatagtggtatatttgttacagttggtgaacctacattaacacatcattgtgacccaaagtgcgcattttacattagggttcattcttggtgttgtacagatttatattttgccaatattttctcttaatctgtggcttattttttcattctcttgatggtatctttcacagaacagaaaattttgatttttgtgaagcctcacttatcagttatttctttcatggatcatgcttttgatagtgtgtccaaaaagttattgccaagcccaaggttgtctgtattttcccctgtgtaaccttctaggagttttatagttttgcatttacactaaggtatctggtccgttttgacatattttttgtgaagtgtgtaaagtctctgtccaggttctgcttttgcatttggatgtccagttgggccagcatcatttgttgaaaagactattttgcttccatcctactgcctttgctcctttgtcaaagatcagtttactgtatctatgcagatctgtttcttggctctcagagattctttcctcagccatgaccrgtctaccactaagcccatcaaaggcattctttatttctgttaactgtgtttttgatctctagcattactttttggttctttctaggaatttccatctttctacttatattgtccgtctattcttgtgtgctgtctactttatccagtggagcccctagcatattaatcacagctgttttaaattcctggtctgataatttcaacatacctccatatctaagtctgtttctgatacttgctgtctcttcagtctatgtttttggccttttagtatgcctyataattttatcttgatagccaaatgtgatatactatgtaaaaggaactgctataaggcctggtgtggtggctcataatgcctgtaatcgcagcactttgggagtccagagcaggtggatggcttgagcccaggaattagaaacctgcctgggcaacatagtgagaccctgtctctacttaaacaacagcaacaacaacaaccaaaaggagctgctgtaagtaggcctttactaatgtattgtggtaaagtgtcagggaagagaagcgttctgtagttctgtgatttggtcttagttttctggtgagcccatacctctggactgtcactcctacattttattcatgtggacattttggttttttccacatctcagctattttattttattttattttattttattttattttatttttttaatctcagctattttaaacaactctgttaaaaaacatcattgccatgcaattctagtacacttgtatataagtgttagaatatatacctaggaatggaattgctaggtcataggatatgcatatgttcaactttattaaatgaggtcaaatgtttttttctaagtaattatactagtctcattcccacaagaaactccattattgtttcacatccttatcaacacttgtcagcctttttaatttttcccaatctggtggctgtgtaatgctatctctttgtgattataatttgcatttactactgaagttgagcaatttttcatgtctcttggacattctagttttctcattttgtttgtttgtttgagacagagtctcgccctgtcgcccaggctggagtgcagtggcgcgatctcagcccactgcaayctccactcaaatggtcctcccacctcaacctcctgaatagctgagactacaggcacatgccaccacaccgaggtaatttttgtatttttcatagaaacagggtttcaccatgttgcccaggctggtcttgaactcctgggctcaagccatcaacccctgtcagcctcccaaaatggggttacgggtgtgaaccaccacacccagcacggttttctcttttttgaagtacctgtttacatttttacccaactttttctgagttacctcttttgttcttaatgttttatagtaattctttatatagtctggataacagttatatgttttacaaatgtcttcttgtatgcaatatgcagtgacttgtcatttgactcttcatgatgccattttataaatttttaarttgacagtggggatacatgctgagaaatgtgtagcttgacaattttgttgttgtctacttaggcaaactaattttttaaaataagtaggagtgtactgtagatggtaccaggaatgtccaatcttttggcttccctgggccacattggaagaagaattgtggtgggccacagataaaatacactaaaaatagccratgagctaaaaattagaatttttttcttttgagacggagtcttgctatgtttgcccaggctggagtgcagtggagtgatctcggctcactgcaacctccgcatcccaggttcaagctattctgcctcagcctcccaagtagctgagactacaggcacctgccactacacccagctaatttttgtatttttagtagagatggggtttcaccatgttggccaggctggycttgaactcctgaccttgtgattcgcctgccttagccttccaaagtgctggaattacaggcgtgagccaccgcacccagctaaaaaataacaaaaaaaatttatagagtgcagtggagtgatctcggctcactgcaacctccgcatcccaggttcaagctattctgcctcagcctcccgagtagctgagattrcaggcacccgccactatgcccagctaatttttgtatttttagtagagatggggtttcaccatgttggccaggctggtcttgaactcctaaccttgtgatttgcctgccttagcctcccaaagtgctgggattacaggcgtgagccaccgcacccagctaaaaaataacaaaaaaaatttayagtgtttttaaaaagtttatgaattgtgttgggcacattgaaagctgtcctgggctgcatgtggcctgtgggccgcgkgttggacaagcttggttagcgtattccacgcctaggttatatggtatagcctatcgctccaaggttacaaatctgtacagcacattactatactgaatactgtaggcagttgtaacacaatggtaagtatttgtatatctaaacatatctacacatagaaatggtaaagcaaaaatacagtataaaagattaagaatggtacacctgtataggacaattaccgtgaatggagcttgcaggactgaaagttgttctgggtgagtcagtgagtggtgagtgaatgtgaaggtctaggacatcactgtatgctactgtagactttataaacactttacatttagactacactgaatttatttttttaatttcttcaaaaatacattaaacttagcttgctataacttttttgctttacaaaatttttaattttttaaactatttgactcttttgtaataacacttagcttaaaagccacggtattgtatagccatacaaaaatattttctttcattatatctttataagtgttttcaatttttttttttttttgagacagagtctcgctctgtcacctaggctggagtgcactggcatgatcttggctcactgaaacttctgcctccttgaaacttccacctcccaggttcaagtaattctccgcctcagcctcctgagtagctgggattacaggcacccaccaccacacccgactaattttttgtatttttagtagagacggggtttcaccaatcttggccaggctggtcttgaactcctgacctcatgatccacctgactcggcctcccaaagttctgggattacaggcatgagccaccgtgcccagtcgtgttttttttgttttttttgtttttttgagatggagtcttgctgtgtcaccaggctggagtgcagtggggcgatctcagctcactgcaacctcttcctcccaggttcaagcaattcccctgcctcagcctcctgagtagctgggactacaggcgtgcaycaccatgcccagctaatttttttttttttttttttgtattttagtagagacaagktttcaccatgttggccaaatggtctcaatctcctgacctcatgatccacctgctttggcctcccatggtgctgggattacaggtgtgagccaccgtacccagccccagctgtgttttctatttttaatagaaaagtagaaaaaagtaaaaaaaagttkttttttttttactttttaaacttrttcattaaaaatgaagacacaaatccacacattagcctagacctacacagggtcaggatcatcmatatcactgtcttccaccrccacatcttgtctcactggaagttcttcaggggcagtaacacacatggagctgtcatctcctgtgataacagtgccttctagaatacctrctgaaggacttgccttgggctattttaccattagctattttttttaataagtagaagtgtactctaaaataatgattaaaagtatagtgtagtaaatacataagccagtaacatactcatttattatcattcagtattatgtactgtacaaattgtatgtgctatatttttatgagactggcagcacagtaggtttgtttacaccaacatcagcccaaatgtctgagtaatgtgttacactgtgmtctcttggatgttacaatggctaaaatgtcactaggcaataagaatttttcagctccattatagtcatatgtgaccaccatcatatatgcagtccatcattgaccaaaacatcattataaggccacgtgactatagttgaatttattagtctttttctcggtgactgtgcttttttgtatcataagaaatgttcccctaacctgaagtcatgaacacatttttttatgttaccatctaaccttcacccacgtggaactgattttgcatgtagtttgaagtaagagtccaattttattttatttttccatatttctgcccaacagcctcagcatcatatattaaaatatatatcatttcttctttgatctgccatgccaggaatggcatgtcaggaatggcaatattttttgatgggaagtcctaggcctagatactattccaatagttattgaagactctgagctatagaaggttaggtttcagtaggttaacttctgaaaataaacccacagactacagatgtttacaacttaacttctcactaagatttgagtgtttttaccacaaagtcgtcagggtatcttttttttttttttttttgagacagagtctcgctctgtcacccaggctggagtgcagtggcgcaatctcggctcaccgcaagctccacctcccgggttcatgccattctcctgcctcagcctcccgagtagctgggactacaggtgcccgccaccacgcccggctaatttttgtatttttagtagaggtggggtttcmctgtgttagccaggatggtctcgatctcctgacctcatgatccacccgcctcggcctcccaaagtgctgggattacaggcgtaagccaccgcgcccagccgcctcagggtatcttatattgtaagtcaggttttttttaccttycttctaaggtcaaaaggaaaaaaaaaagagagaaagtatgggggtaaatacaaaaccaacagaatagaaaacaaaaaccytccaaaataagtggttaggctaaagtgagttccttagaataaaactgcacatttgagaagtgatttcataaaaaggaatcactatactaatactttattttctcttttagctgtatttgtaaaatagctttcttttcatttttagagtaatctttcttttgtttagtaatattcactgaacatctattatgtataacacaatcattgccctcaaaaggccttatgactaattagggaggatatgcagtatacataattttaatacaaagtaaagaataggctgrgtatgatggctcacatctgtaatcccagcactttgggaggctgaggtgagaggatcgcttgagctcaggagttcaagaccagcctgagcaacgtggcggaacctcatctttacaaaaaaaaaaaaaaaattagccatgcgcagtggcacatgcctgtagtcccagctgcttgggaggatcgcttgaactcgggaggtcaaggctacagtgagccaaaatcacaccaccgcacttcagcctgggggacagagtgagaccctgccctttctaaaacaacaacaacagcaacaacamgattatgaacagatggcatttgggccaaaaatttaaataaagataagactttttttttttgagacggagtctcgctctgtcgcctaggctggagtgcagtagcgtgatctcggctcactgcaagctccgcctccygggttcacgccattctcctgcctcagcctcctgagtagctgggactacaggcgcccgccaccacgcctggctaattttttttgcatttttagtagagacggggtttcaccgtgttagccaggatggtctcgatctcctgacctcgtgatctacccgcctcggcctcccaaagtgctgggattacaggcgtgagccaccgcaccaagccccccatctgccttctctattcacaatttccagtactcctgttaggtatattttagaagctttaacttcatcctctatattttgtaatgtttttaaattcctaaatatagagataaaatgaacacataagaaaaaaattttcttcaagcccttccattgcattttaattgtaacaattatgtttttaattgctttttcatagatgtatagtttcaaactctcttgaggatattatttataattcactagaaggtttctttttcatgaattatgtttccacagactccatttttatattcagttcagtatcttacttgagaggcaagagaacgttgaggtttcaagcacaaatactggagtaagactayccaggttcaaattctggctctgccatttgtggctatataatcgcaarcaaataatttaacctctgagaggctcagtttcattatcaacaaaaaggacataattacagtacctatctaatcgagatgttgtgaagattaaatgaaataatatctgtaaattcatacttcaaatatgtgtgatacttagtaaacacttaataagtgctaactaattattaycatatgccaggtgcagtgttctagtttccaggcatataaagttaaaagtgacttggtccattcactcaaataacttaaaataaagcttgatattatttgtcaagcctagcattcaccttctattgcaatgggagtcattgtgcatataaataacagtggtattcaaaactgtggtacatcctttatggttttgtaggtttatttaatgttaaaatataacttgaagctgaaactgtaataaaaaaatccttttgcctattttttgcttaacattgtacttggaaagaagggagaaatatgggggcatgcatatgaaaataccaaggagaaagcatgtaaatgacaaaccaaagcatggatgggcttcctcaaccgtattagatatggtaggagtaagtatgatgtggaatagaaggtgataaataaaataggttgactaaagcagcagcttgtggcaggggcccatatggtcgggtgggtagagaggtggatccgtaccgagaagggctaataagcctggcagaagagtttggtcattattctataatggtcagaaaatagctgaatttttgaataggagagtaatgtgatacagagaggaatttgtgtttttaatttttgtccttatgtagaagatgcaaatgttttcagtgttttgggcaattcaaaaaaacttttttctgagctgtgtctaatctaaactctaaaggaaagtcagttctgtaacacattgttcctttcaatctagttttttctttaatgtttaaatataacattttttagagattccagagttttatcaaactggaatgttggcaacaacagttcaaaggtatctaggttaaaagtacgaagtaattgaggataatgggaaattaagattgcagggctcactcttcaattgtagcaggaaaattaaaggtaaattacaaagcaaagttcagaataaaacatgtatcagtattcaagaccttgcaagtttataaaatgtctggtatgtttattactacaatgctattatttggccaaagcacaggggacttcagattgtgtatttatggactgattccccaacagataaccacacaattctggaatgcggttgctgtgtcaatagttgtagacttattgttgtaaattttttccctctttcaacctaattaacttagaatgtctctaacgtgatttgcaaagaattttttatttatattttgcaatcagcatttgagcagcacacaggtttgagacatgcactacaatgagtaaacattttgtaagataataaatagtgcccactagtctaaatgttttatgattgcctgttscctgctaattggtcatggattgaaattccccattgtttaatttttttaatttgtggaaaattattatamatgagtktgtagggcttcatatcacagctgttgtcatttaaagtttggacagtgtcattacaaatgaagccctgctgtgaaatcaaagtcaaaaggcatcttggcatcccaaccatttccttgggagaagattacagctcaagtctgttgaactttattgccttgggcctcatgacagtcttcagaaacatgcaaggcatttctgttaaagaaattcagatgtgctaggacacagatgacattcttgtgcatagcagtgtcctaagggggtgaggaataagtcaggaagaaaaagatgattcatactttttgctgcattctgggattattrtatataatccatagagaggatggagaccttgcagagataccacataggaaaaaggtgcggtgttttcctacatggcctgactgtattttaaaataaaaacctaaacacgactccaaggtaatgactgccttcaaagtaatattttagttgattttaatattctctttgaaggaagttctcattgactcatatttcttttctccctctcctttctcacacacattcatttccagaggtttgactgagggagagctgctactgagttttaacagtcactctttttatatgtaaaactcatgttcttgaatttaaaacaaaagattacttgttctgacttaaaaatctatctaaccagtaactgggctccaacaaaggtccccacagagacatcataaaagaacatcattgtcctctaatttaargatgtatcttattcagccatgaatttatctcatccctttaaaatgtgttcttatttgtcatccctatttcctcctgggataaagagattcctgagttcattagctacagcatgcctggcacatagtagatactcaataaatatttgttgagtaaatgaaaatcgttattcaaaggaaaatcctgattacgctcaatgttaattctggaaatccaagacctagtaagatcatttgttctactgttctttcagctttgtatgacattcaaaaaggcatatcactcattcaacaacttgccataaatattgataactgcttcttaataaaaatgccattaaattgcttataatctagtgaagagacatacaagtaaatagataatcacaatagagtgtgatatgctaagcatttcctagcctcagtgataataacatttattgagtactttctatgtaccaggtacaattttaagtattttacatgcattaatgatttctaacttaattgcattgtgagctgacaactctgtctatatgattcaaaacattttgaaatttactgatagttttttgttttgttttgttcttgagacagggtcttgctttgtcacccaggctggaaggccacgtgatacaatcatggctcactgtagcctccacctgctcggctcaagtgattctcccatctctgcytcccaagtatctgggagtacaggcacatgacaccacacccaactaatttttaataatttgtagagatgagctcttactatcactcaggctggtcttgaactcctgagctcaagcaatcctctcacctcggcctcccaaagttctgtgattataggtgtgagccaccatacccagccctgatacttattttatggaccagtatgaggtcaatttttttaaatccatgtgaacagttctgggtacagtgttagaaagtgcagtgtccattagagcaagcaagtttttgtatacagtgttctatacatatctattagctctaacgtttacagtatttcttttaatcttcaatatgatgactgatttttctacctgcttgamctatcagttactgagagaggtatattaaaatattttagcatgattgtaaatttatctgtttttccttttacatctgtcagtttttgctttgtatactttgaggctaagttattaggtttatatacatttaaattgttatagctttctggtagattgagctatttattattatgtagtgcttcattttatccctagtaatgcattttgccttaaagagtattttatattctgattattaatatagctaccccaacttcttttggtatttgcctggtacatattttttcatcctttaaatttcgtgtatccttaagttttatatatatatatgttgtttataagcaacaaatatttagattctgtttttagattcagtgtcaatctttgtttttttaaccagaacatttggtccatttgtgytattgtatttgtatttgttacaagtagttagacaggcatgagcggggcaggagaaagctgtcccccaccctctaggaatgtcaggtgatagttgggcagttatcactttgcctctctaaaagtgataaattggcagctggcaccagggagagtccatttcctgattgtccacacctggtacactaaagtgttaattgaatgcaggcaccagggagaagcaacttcctgggcatgagcattaagagacaaaatggcagagtatgacctcccaggggcacaccacccaaaaagggaagaaagccacagatgggcgtgyatacaacttcctaaacacactgcgcatgctcacctcccaagtgtaaggagggcactgcacttatgagtagcccagcctaagggaagaatcatgggaaaggggccagcgtataaataaagtcctaggatcaaggttaaaatggcacttgaccttcacgtgcccgcttgggtctcttccaagcattatttcatttctttcccgttctaaagctttttaaaataaacttccactcctgctctgaaacttgcctcggtctctttttatgccttatgcccctcagtccaattctttcttctgaggaggcaagaattgagcttgctgcagacgcatatggattcaccatcagtaataccttggataccttgactggtaacatatttggtgctgtgagactcagatatttgccaccactaacacatttattcctaccatcttattttttttctttttctgattgtttcccttttctttttctttttttttgagacggaatcttgctctgtcgcccaggctggtgtgcagtggcacgatcttggctcactgcaagctctgcctcccgggttcacgcccttctcctgcctcagcctccctagtagctgggactacagatgcctgccaccacacctggctaattttttgtattttttagtagagacggggtttcactgtgttagccaggatggtcttgatctcctgacctcgtgatccgcctrcctcagcctcccaaagtgctgggattacaggcgtgagtcaccgcgcacggccaattgtttcccttttctgagtttctttttccacttcttttttgttttcccttgggttcaggtttgttgttttttttttttattttcctattattccattttttcctccactagtttggaagttgcaacccactctatttctgtttctttcrtgataatacagaaattcttaaaggcttacttaatttatcaaaatctatcaaaatctaactccaatccactcccttagaaartctatgctaccatggttgtatagtttagttgtatcttaactttctttgctatcaaaagacagtattgtcattgttttatacagtcaatgtgtgtttagatttacctacatatttatctcttttttggctcagttatcttcttacatctcagactttctatctggtgtcatagatggctttagagatcccaggattattgtcattcttgttaattgaaaaatcaaatctgtaaaatattttaaagaggcttattctgagccactaggagtgaccacagcccggtagttgggttgcagtttaattttatatattctagggagacagaaattgtaggtaaaatcataaatcaatacatggaaggtgtaccttggttcgtcctaaagaggtgggatatcttgtggggtggtggcttacaggtcataggtggattcaaagattttctgattggctactgattgaaagagttaagctttgtataaatacttgatgtcagtagagtagaaagaaatgcttgagtcaagatamgggagttgtggaggtcaaagcccttattatgtagaygaagcctcataggtagtagccctcagagagaatagatggtacatgtctctttttagaccataaaagtgtcagactcccarctaatctctcccacagctgagaaagtcctagaaagggaaggcctggctgcattaatggagattctttacagatgcagatttctcccacaacagatgactttgcagggccatttcacaatatgtcaaagaaaaatattttgatttccttcagggtcttctatctatcatgtgatgctgtatcagaatcaggttggaaaggaagctgctttatgctgggataattttaaaaacctgttttcatgcctatgatcccagcactttgggaggccaaatgtgggaggatcacttgagttcaggagtttgattccatcctggccagtaaggtgaaaccccatctctacaaaaaatacaaaaattacctgggcgtggtagcacatgcctgtattcccagctattcaggaggctgaggtgggaggatcacctgagcccaggaggtcgcagctgcagtgagcgcacactgcaccacagcactccagcctccagagtgagaccctgtctcaaaatataaaaatttaaaaaaaacccatttaatgagattttatggtttatagggtatgacttaacccctgccttgcatggccttaggtcgtgtttataatctggtatcttattgccacaaagagtctgttttgtcagatctgtaattttacctaaacaccaaaagggagagggcgtaatggggcgtgtcygacctcccttcctgttatggccaggaattcagtttttcaggtttcgctgggatccctttggccaggggtctattcatttggttgtagggctcaggatttcatttttggtttatattcttctaatggacttcctccctttagcaagtgctagtctttttgtcctatcccttgagtctcttgagttcacaactaatactaaaatttgctcaccaccagttcctaagttaaaatttagcttcagtgctctgtttatctttccaagtttctacttatattttggtctgcatattccttgctttcttgccaatttattgcattgtattaaagattttaaaatattttatctatcatttaaaattatttttagaaaaattgcctttcagattatgaaaacaaccataagtcaagaaataaaaatccataagtaaattttaaaatgatcttttgggctgggtgtcatggcttatgcctgtaatcccagcattttgagaggtggaggcagaaggaagcaggagtccaagaccagcttggacaacatagtgaaaccctgcctctacaaaaaaaaaattaaaaattagctgggtgcrgtgatgcgtgcctgtagtcccaactacttggaaggctgaggcaggaggatcgcttgagcccaggagttcagggctgcagtaaactatgattgtgccactgcacagcctaggcaacagagcaggatcctgtctaagaacatttaaaaaaaatttttttaaatgatctttttgttataaataaagtttcagtgccgcaaaagaaatagcactcaaatataaaattgtctttttctcagcaaggcaagttacttctatagaagggtgcacccttacagatggagcaatggtgagctcacacttggacaagggaagggaaggggttcttatccctgacgcacgtggcccctgctgctgcgtccttcccctattggctagggttagaccgcacaggctaaactaattccgattggctaatttaaagagagtgacagggtgagtggtttggtgggaaaaatggttatgcagggtggagaatgagtcagggcggagcaggtatcacataattggaatgagtcagggcggagctggtaactggaatgagtcagggtggagcagtaatcgaaaaaggttgctttatgaggaagttaagtttaaaagtagaaggcaaagaattgaacatactgacatattgattctttaaaatgaaatttagaactcgtatctaacattttggttggaattctttcataggatttttgatgatcttaaatcatcattttccaaaatatattctacaactgctttyttttaaaatactcagtgaaactgggtttacaaatgctgtataccgaattcccttcatggagtcacagtttaaaatcctgccaaatcctgttttttttttttwwwwaaaaaaaaaaagaagaaaaggaaaaccttgtttaatttkgtttacccagcatttccccaattccccccaagtaacagctatcagtactctacagagctagtattagcagaatagtttaaagagctctccccactcatcctcccctcaccataaaaataggaagtcctgagtcttccttgcagaaccaagctgctttttcctcatatgttatatctgatgatatcatcagggatcttgctgtttaatataaattctagatatttgctttttatgatgttttcagggtctaaccatgccttagaaatggggaccatattgactaccagacgtatctcagagtcctcagtctactagtgatctttctttttcctctctctcctccattggagtttcccttttagtgtacttgggacccttctaattctcaagaatcaaaggattggataaaatctcaccgttcatctagttgagccctgttgagattcattaaacaataaatttagatgtaataactcttcaagtggctttttttttttttttgacagtgtctctctgtgtcacccaggctggggtgtcacggcrtgatcatagtttgctgcagcctcaaactcccaagctcaagcgatcctcccatctcagcctcccaagtagctgggactacatgcatgcaccatcatacctggccagttttttttttttttttaattttttgtagaagcagagtcaccctatattgcccaggctgatcttaaactcctgggctcaagcagtcctcctgccttggcttcccaaagtgctcagattataagtatgaaccaccacacccagcccaagtgactattttattgctctcctttccaaccttgaagatttatagtcagggccttttgttttattctactcacctgttctctaataatttcagaaatcaccagtgacctcttatattcatcagtttctcatgtttttgttgttgttttttttttaatctttattttactaaacttcctctaaagcatgtaacactgttggtcatttcctcttaacatctgtgataccattctcaccagttctccttccccatcttgattttcctctctgcctttatataaatacatatctttcccaagtttctgtccttagcccctttttctcattgttctccttatgtttattcctttatttattcacttattcatttctccaataaatgtttattcaataggatgaattagttaaaatattatttttagcataatataggaagcttgagcctatcttttacttttttatttttaactgggtcacagaatgtgagccatatgagaatgactttttactgctgagatttatcttataatcctttttttaaaagacaggtctcactccgttgcccaggctggagtgcaatggcaccatctgagttcactgcaacctgtgcctcccaggttcaagcgattctcctgcctcagcctcctgagtagctgggactacatgcacaggccactgtgcccagctagtttttgtattttttgtaaagacagggtttcaccatgttgcccaggctggtcttgaactcctgagctcaggtgatccacccgcctctgcctcctaaagtgctgggattacaggtgtgaaccaccgtgcccagccttataatccattattgtttcagtagtcattgcaatagaacatgcagtaaattctaaactgtttttcagaattgacaatacatgaaattcaattgaaaactcttttagctgatcctagtaccaaaagcactcaggctagaaagactagctttagactagatggccacttctaggctaagctcttgaaagaaagtttcttcctttttcctcagggcagtactacgccctccccatccgcagcagtagtttgaaataggcaaagattatctttgcctatttcccttctgactcttcctcacttctgactttcccttctgactcttcctcctgttttctggagtgcttctcccgggcactagtgcacttaggcagctctaagccttctgctgctctcctggtcaggtyagttctcaccaccctcacactctaaaattagtgctggaagttcagacaatccatatgttctacctcaaaaattaaaggaaagcaagtacaaaaggcagtgtctagaggaaaaaacaccacactgataggtagataaatccagactccagttgtggctctgtggctgacacctatgcctcttttctctagtctggaaagtggaggaattgcactggaataattgatgtctaaggtcccagcyctatgagtttaaaatcatttcatgcaaacttataacggatggatgaggagttttgatggagatagctacattgtctaaggtcagggctttaatcamtattcttcacccactaggaaaatcaattgcagcttttgcagccattgtgggcactattctggattctggccacattggaccccactgctagacagaggaaggactggttaatataactgtatgaaaatatctatccgccgggcatggtggttcatgcctgtgatcccagcactttgggaggctgagacaggcggatcacttgaggtcaggagttaaaccccgtctctactaaaaatataaaaattagccgagtgtggtggcatgtgcctataatcccagctactcgggaggctgaagcatgagaatcgctttaacctgggagactgaggttaccgtgagctgagatcacaccactgcactccaaccctgggtgacagagcaagactctgtctcaaaaaaaaaaattatctaacataatgtccatgtggtagcatgtgtcagaatttctttttaaggctgaatattctatgcatctatgtgtgtgtgcttgtataccgcattgtgtttattcacttatctgtcaacagacacctgggtcactttcaccttttgcctattgtgaataatgcttctgtgaacatgagtatacaaaaacctgtttgagttcttgttttccattmttttgggtatatgcccagaagaagaataactgtaatatacagtaattctatatttattttttgcatgtgtggaatcgctatactgttttccacagtcactgtgccattttaccttcccactgagatttcctgacctttctattcatcagcatttcactcaatgggttttagaatcagtgatatatcttgtctgatcaatagaaagatcctccccgccccacccccctttttttttttttgagacggagtctcattctgttgtccaggctggagtgcagtggtgggatcttggctcactgcaacctccacctcccgggttcaagcgattctcctgcttcagcctcccaagtagctgggattacaggcgcccgccaccatgcctggctttttgtatttttagtagagacagggtttcaccatgttggccaggctggtctcgaactcctgacctcaggtgatctgcccgcctcagcctcccaaagtgctgggattacaggcatgagccaccgcgcccagcctgaaagataaccctttttatataacaataagaaagaaaaaaatatctccagtcaattataagatgatccccatctcagaaatgttaaartgtgcaaaaaaatgtatcttagactcaatggaatacagttgctgaatatactaaaacttcctccaaaaaaaaatttgtgtaagttacacaacttttaacaatctttgtagagcaggaaagtaaaggtggctactcagcaataatgtatgaaaatacctttctcaaatatacttttaccttatttataaaagaatgtgcttcacacacagttttttcccccaaaacttacctagctatgtcttaatggcaatttggaataagagtacaaacccctccgtcaggtcctctgcaaaataaaaaggtaaaaaccccataggacagtaaacagtgtatcccagatgttagttsgcatgtatttgtgatttctggtaaatatcctaatgctcttttgtctttgttttgcttaaaggattgttcaagtttagaagaatacaacattgccgcagcattactccctttgaccagtgctttctatagggtaagtttcattggtccatatataagcttgttatgatttacataaatgtattcagtttgatttattatggaactacatgaaaatcctgtcctcttagtagcatgcctaagatatatctgcggttatatttattataacatttattgcatgctatgtgtaggaaatttaatatagaacactaaatcatctcctaaaataccacccacacccgttacatccttttccttaattttctttatagtacttcataacacctgaatttatgttacatattggtttgtttacatgttttttccccatcacagaaagtaaatttcatgaggctggaatattgtctgtcctctttactgctatgtcccagggccactcagtaaatatttattgaatgaatgacattgaagccagaaattagagtttaactttactggtaatttctgcgaaccttctgagaactttctggaatgttcacagtgattttttaaaattctgtcacttactacagttatatctatgctttttcataaatagattcattcttatggcagaaaaaaccagcaaatttcttttcccgtgaaggacttgtaaagaattagataaccacccacactcagaacaatgcatttaatacatccttctgaaatatgcaatcataaacagtaaatctgtggtagcagctgacttactattcagctacatgcacagtcagcttcaggaagcaataagttaacaagtttggtaactgccatactgtttctctgtgttagcagattaatcatacataggttttagtggtgggcttagatttgattttttgtggttggcatggtttgttgttggatgagtttgttttgggttattttggtttagggatgaatcagtcaaggtctagtcaggagccagaaaccacaccagtaatttgaacagagaaattttgttttatttttatttatttatttattgagacagagttttagctcttgttgcccaggctagagtgcaatggctcaatctcggctcattgcaacctcctcctcccatgttcaagtgattctcctgcctcagttgcccaagtggctggggttataggcatgcaccaccacacttggctgagtttttgtatttttagtagaaatggggtttcaccatgttggtcaggctggtctcaaactcctgacctcaggtgatccacctgcctcggcctcccaaagtgctgggattacaggcatgagctactgcgcctggcctatttttatttttttgaggcagtgtttcactctgttgcccaggctgtagtgcagtggcacaatcttagctccctacagcctctgcctcctgggctcaagtgatcctcccatctcagcctcccaagtagctggaactacaggcacacaccaccacacccagctaattttttttttctttttttgtgacagggtctcgctctgtcgcccaggctagagtgtagtggcgcgatttcagctcgctgcaacctccacctcccaggttcaagtgattctcctgcctcagcctcccgagtaggtgggactacaggcacgtgccaccacacccagctaatttttgtgtttttagtagagacagggtttcaccgtgttggccagaatggtcttgatctcctgaccttgtgatccgcctgccttggcctcccaaagtgctgggattacaggtgtgaaccaccatgtccagcagattttttgtatttttttgtagagacagagtttcaccatgttgcccaggctggtctaaaattcctagactcaagctgtctgcccaccttggcctcccaaagtgctgcaattacaggggtgagccaccacgcctggctgatttttgtatttttttgtagagacagagtttcatcatgttgcccaggctggtctcaaattcctagactcaagctgtctgcccactttggcctcacaaagtgctgcgattacagtggtgagccaccacgcctgaccagaaattttaatataaggagttattaagtagtaataggggattaactactaagaggtaaagagaattcgtaagaatgcaggaataaaatatagggagcaactactacctctagggctcaggcatactacctaacaaagaagcaaacttggaagagagccccttcccagatctaggctgattcagatcatgttggagaggtgttgtggccactggatggcatcgaatttcaagagaccagaactggcaagcagtaaactgcctgctggagtgctggcaagacttgctaggaagccccccactaggatggccgtgaaacttctagggtgctagtgaaacttgataggaagctaccacctggggtaccactgaaactttatagatagcactgccactgtggtcccacacaccaccattaggtgcttaccacaggagcaagaaggagaaagtacaccagaactaggaagagaatacactttctactgcagtgttccttcagcacctttactggcaaagcttaatattctgcattttggcaaaggagaaatgtttataagggccagttccagtatcacaaagcaagacagagaaggatagatttggaagaaagaagtactgcattgataacagaggggttaggtaaggtagatcacacggattctcggatattttctaaatctttaccctttggaaaattatttctagtgcatattagatttgttaattcaggaagtagatgtaaattacatattcctgggcacaaattgcaaattagccatcctcatactgtccagccagtataaattcctgggtcttgccagcattgcttcagagaatggactcagctgcttgtcttgtttaaacttacttttaaaatactttaaataacattattaatttttttcagtggaacaaaagtttattgagtatctcaatataaaaagctactataacaggcaacatctgggcagcaacattaataaaacattgacatggtccctaggaacttatattaatagtctaatactgcagataatttttaaaaatcaaactggtccacaatgccaccaaccagatggacattatcttaagtaaaagttatgtatataccgggtacggtggctcatgcctgtaatcccaaaactttgggaggccgaggcgggcggatcacctgaggttgggagttgaagaccagcctgaccaacatggagaatccccatctctactaaaaatacgaaattagccgggcgtggtggcgtatgcctgtaatcccagctacttgagaggctgtggcaggagaattgcttgaaccttggaggcggaggttgccatgaaccgagagcgcaccattgtactccagcctgggcaacaagagcaaaactccgtctaaaaaaaaaaaattatatatatatatatattttccagatagtacagaaaggaacaaaatgcaaagtaaaagttcccttttccaccttcaccccatttcctctgaaccattggtttccttcctggggaaaaggagtgggaatgagggtcaggggccagggaagagtcacgcattactgccagcacatgcagataaaaattttcttttttttggtggtggatcacttgaggccaggagttcgagaccagcctggccaacatggtgaaaccccatctctactaaaaatacaaaaatcagccagccatggtggagtgtgcctatagtcccagctactcaggaggctggggaaggagaatcacttgaactcaggaggcagaggctgcagtgagccgagatcacgccactgcactccagcctgggtgacagagcaagactatgtctcaaaataaaaataaaaataattttttttaaaagtatcgtttttaacaaaaacaaaccatttactctattttcacaccttgattctttcacttagtggtacatcttggtcatcctctcataatagcacatatacctaattatttttaattaatccatttatatttgtaatgaaaagatggtatatatgtacctactattctcatatgagcaggatatttcattagcccagatgaaaggttatgtttatcttttagagttttatttagtgtcagagtgttcaaggtttcccacttgtaacatcgcctgtcttagatcctttggaatttgtcatgcgacagccaccacaaattattttttcccctggattgtaagcctacagttccttcttacttctttccacttttactaagtaacatgtaattcattaactcttacggaagccttctttgaaggtggtaccttaacagccaggtttaaattcttaggattacttttactgtgaaaaataatgtaatcttttatacttatgtttgttgtttatatggtactttcattttcgatttcaatttattagctatgccaagccctgtgcttatatctgtttcagagtaatcacagattagtaacacataatcccttaccctcacgacacatactaatggcctttcatatccattgatcagctgttgacagtagaggaatcgtttcaaagttgatgaataataacattgggctactcattgatttacttatgccctttgcatttaaagattatgtttattaaattcagagccagagtgtatactgagaatatgtaaagcaggggttcatgtctaaaggttacttttttagaaggaaaataataaagtaaaacccagtagagcagaaatagaaccacagtagcatacttttgtattattccttcccaacaatagcagtgagcaacagtgaaagtcatggccccttcaccacaagccaccatttaacttttttttttttttgagatggagttttgctcttttcgcccaggctggagtgcagtggtgcaatctcagctcactgcaacctctacctcctgggttcaagcgattctcccacctcagcctcccgagtagccgggattacaggtgcccaccaccacgcccggctaatttttgcatttttaccgtagagatggggattcaccacgttggccaggctggtcttgaactcctgacctcaggtgatccacctgtctcgacctcccaaagtgctgggattacaggtgtgagccaccacacccggctgccacctttaacttaatgccttctctccagtgacccatgcacctcagggtcaccctgttgtggttcttaataaccagggtattccaaagggtttcctggaatctgtcaaaatatggcaaagccgtcccattacttctttgaggcacatctgttggttattgatactcaaaatgactcccaggagagctaacactttctcctttggtacccttatagcctgtgtttaccctgggaggaaaaataaataccctattcaccttaagtgcaatcatcctgaagtgaagcctttccagattctaaagatcctccacatgtagttggcatttgaggaagttttattgattgagttaggtcttacttcagaataagagcgttattcagacactcattctcaggagaaacatattttttcttcaaaattctccattcaacatttaaaaatttattttctagtatctagccattcaaaagatttgtttgaagaagattattgaagtataatttatatatcataaaattcacccatcttaagtgtgtgtattagtaattttagtgttttacagagtggtaaaaccatcaccacagtctaattttagaacatttctcaaaaacaaaaataagtaagtaaataaataaataaataaataggccaggagtgatggttcatgcctgtaatcccagcacttcgggaggccgaggcagttggatcacctgaggtcaggagttcaagtccagcctggccaacatagcgaaacctccatctctactaaaaatacaaaaattagctgggcatggtggcacacttctgtagtcccagttacttgggaggccgagacagaagaatctgttgaacctgggaggtggaggttgcagttagccgagattacgccattgcactccagcctgggtg

SEQ ID NO: 96844 - DNA, 22320 bp, Homo sapiens
agaatcttgctccatcacccagtggattctcctgcctcagcctcccaagtagctgggattacaggcgcataccaccacacccagctaatttttaaaattttttagtagaaatggggtttcaccacgttggccattctggtctccagcttctggtctaaagtgatccacccacctcagcctcccgaattgctgggattacaggcgtgagccaccgagtctggcctcttacacttccaatgaaccccatagcttgtagcacattgctttgtgtggtaagtgtctctattcatggtcctagcaggaaatgaatagcacagtgaaattaggataatttgggggagagtttaataaagtgataattacaaagaagtaggcagggtgtagggaaatcagaaagaatagtgcagtgccttagtacccacagctctgttgtgatcacctccaagctcaaaaagatgaggacagagcagtcgtgtagagaggactttctttttttttttttcttttctttttttttttttttttttttgagatggagtcttgctctgtcgcccaggctggagtgcagtggcgcgatctcggctcactgcaagctctgcctcccgggttcacgccattcttctgcctcagcctcctgagcagctgtgactacaagcgcccgccaccgcgcccggctaattttttttgtatttttagtagagacggggtttcaccgtggtctcgatctcctgacctcgtgatccacccgcctcggcctcccaaactgctgggattacaggcgtgagccaccgcgcccggcgagaggactttctcaataaaaactgtgactttcattgataccgtccatttgggacaacttactgaagcagaaagcagggtggagactgaattcaagggaaaacataagatgtctggtacagcatacaacagcattgattcagaggagggtgggagtactgagcccaggagacggagaaggaatgtaaagcctgcgagaggctgctcagcaattatctggtcccttagcctacaggattagcagcttcctaactcaggcaattatctctctggacctgtttcttctatctataagttgatggaattagtctaatgatatctaaggtccctactatgtgtacgtctactgtgacaaggtccttagctgcatgatctttaattctgacaaaggttactatcacaaatattttaacatgtttattctcgtggttactaatcaacaatctctggcactattacaacaaacctttcagtatttacagagaagttatttgccattcttagcaactggccagtcaacaactcaactttatagtaagttacagaatttattctgtatattgtattctgtacaatgtattccatacattaatttattttgtggtaaaacagtaacttttcattttagatgggaaaactagacgagctgagattcaacccacgtgagcggctgcagagccgctacccttaacagctctctctcgggattctaacattcccttctgtgacggagagacagcaggccgggacacgcatcccaggacggatccacagctggatggggaaggctgcgccaggcgggccggaagcctggcggtggcgtgcaggagccccgccctcctgggctggattcagccgggggcggggccgcgggcggggcctgtggcagcgggaatcccgaccccgcccctttccccacccctccatttctcgccatggcccctgcactgctcctgatccctgctgccctcgcctctttcatcctggcctttggcaccggagtggagttcgtgcgctttacctcccttcggccacttcttggagggatcccggagtctggtggtccgggtgagcgggagggatcgaggatgaactgggaggaggaaggtggagccgtaggagagggattgagggcggggcttggaaacaaatgacaggggaagtccaagagagggaactcgaaccttgaaagcggccgagaagctacaggggagggagacctgagttctaaattaggaactcaaggattagagttttggagaggcgggagagtgaggactgagggagccgaaaagggcggtgaccggagtattctaagtaaagtgttttgtagagaggactgttgagaggagagtgttaaaaagaaggagcatttggagaaccgaagtaagaggggcaatccagcgtggcctctccagccatgctttttgcaactgcctaacatgtgttgttctataaatcctcttccccaggtttgcaggaggcctagggaagagggcagaaactagggatggaaaagtgagatgggcacagcctagagaggaagcattaaggctcttgaaagcagtaagggacatggcctggggatccaagaggagatgagggtgggggaaacattctgccactgtttcgatcttttgtctctttttccctcaacttcctgtagatgcccgccagggatggctggctgccctgcaggaccgcagcatccttgcccccctggcatgggatctggggctcctgcttctatttgttgggcagcacagcctcatggcagctgaaagagtgaaggcatggacatcccggtactttggggtccttcagaggtcactgtatgtggcctgcactgccctggccttgcaggtatgaggccctggccttgcaggtatgaaatcctggcagttgagtccccaagggagaccaagtgtgggaggggtgccgtggattggaggggcaaaatatgggttcaggaggagaattgaggaactaatctcagcttccattcctccacagcacatatcctactttttatcaagaagggtgtacttgtccttccctaagcacaagatatgcttctcacctctgcaactttgtttatgtcctgcttgagatcccttctcttcagtcctaccctttcttcaaaaccacttccctaggtctgaagagaaggccttgtctgtcttttcactgggtggttggcacaggctactactttgcgtagctatcaggtcaccccatctattctataagttctcagggtagagacaggccatccttacatctttgggacctcacccagcacgcaccctccacatggtgaatatttggtggtgatgcttaggagagaggtgggggagagttgcaggctagcctgtggtgggggcagatctgggtctgggtctcccaaggtcgggcagactaggccactgggatacccagccccttatccttccacagctggtgatgcggtactgggagcccatacccaaaggccctgtgttgtgggaggctcgggctgagccatgggccacctgggtgccgctcctctgctttgtgctccatgtcatctcctggctcctcatctttagcatccttctcgtctttgactatgctgagctcatgggcctcaaacaggtgaggctccgagatccctacctatgacctctgacccgttttagaactcctcgttccctttcaagggtttccctcctcccatgctcttctactgtctccctgcttctccctcgtggcccttccctttgactttccctcgtaagggcagcaagcatgggcctcctgggcctggggaaggtacatggatcagaagtcaggatcagggatccaagtctcagaaggggggttcctgggcctgagttctagaagggtggtgcctggaagaggaggaaagaagtgcccaagatgagaaaagggcttgactccatttctaagctcttctccctctcttaggtatactaccatgtgctggggctgggcgagcctctggccctgaagtctccccgggctctcagactcttctcccacctgcgccacccagtgtgtgtggagctgctgacagtgctgtgggtggtgcctaccctgggcacggaccgtctcctccttgctttcctccttaccctctacctgggcctggctcacgggcttgatcagcaagacctccgctacctccgggcccagctacaaagaaaactccacctgctctctcggccccaggatggggaggcagagtgaggagctcactctggttacaagccctgttcttcctctcccactgaattctaaatccttaacatccaggccctggctgcttcatgccagaggcccaaatccatggactgaaggagatgccccttctactacttgagactttattctctgggtccagctccataccctaaattctgagtttcagccactgaactccaaggtccacttctcaccagcaaggaagagtggggtatggaagtcatctgtcccttcactgtttagagcatgacactctccccctcaacagcctcctgagaaggaaaggatctgccctgaccactcccctggcactgttacttgcctctgcgcctcaggggtccccttctgcaccgctggcttccactccaagaaggtggaccagggtctgcaagttcaacggtcatagctgtccctccaggccccaaccttgcctcaccactcccggccctagtctctgcacctccttaggccctgcctctgggctcagaccccaacctagtcaaggggattctcctgctcttaactcgatgacttggggctccctgctctcccgaggaagatgctctgcaggaaaataaaagtcagcctttttctacatatggcatgcagtctgtcagtgtctcccaagctacagggctgagtttgggaaagaaagccagagggagcctgggagcaccgaactggagtctgggcagccaccacgccctctggcaaccgctggggttcggccacccccgcagacccgcccccactttgccagagcggccgggtccccattcccattccttcaaatcccctttttcccggcagccgacctgtagacccaagggagacaggttgaagctagaaagagtcggggcagcagctctggtaggggagggagcatccaaaacctctggcttctgagcgcctctcctgccgcccatccacaaagccccccacagcctggcggctgccctcgaccccgcaaaacaaaggacttcagaggctggacctacagacccagatgagaaggcaaaagcgtagggaggagcggcaggagatgggaagggcgggccccgctcggagcagctgccgcttcctcccaaagtcccacgaggggcctgagtcacgggccaccgccctgggtcggcgagctgggggaagggatctggacacctggcgtgtccgggcgggaagctggtgagggcccctggggacagagcggaggaccagtggttggggcgagaagagggcagtcccgcagcgagtcccacgcggggtgggagggatctaggccccgccctctcctcggctccgccctgcgcccccttccctctcctcattgtccttagacaaagcggtcgccgcccccgcccggccccctggtctctgtctccgtccctcctcctttgctgcctctttccctcctcctctccctccctcctcccctccctccagtctccggatctccctcggtccctctctcctcctcttcctctctctggacgcccggctcctccgcaccccctcccccgggggtcccgcggcctgtgagttgactgaggggctcagacttggggagtgggtgtctcctcgcccctgtccttgctcccgtccctggcccggaccttggctgtctcctctttgtgccgagattgtcagtctgtgcggctacagcggggtggagacggccggctctgtcacggcttcatgagagcggggacggggcgcaggacttgcaggcgccggggagaagagacatggagccggcccttggcactctggggtcgcgtggggcagtcggtgggggaggcaggcggtggtgacaggacagggtgggggtggacgccagggttctgggaacgcgctggcagccctgacgcccgggttccgaaagtctcgggggtgggtatttcccccgacccgcctcgggggcggagtgcggggcagaggggtgggggctggggagaggcgtggcccgagcggtgctggaagcggagccgggacctttggggcccgcgctgagacgcgcccggctgctgccgccgccctcctttcccctcttccctggtttcccttctcctctagacctgttcgctctccgcccctccttgcctccccaacaccccctcaggtcccgttgcctcctggtcctttcagggattcctggtccttccttcccacactagcctccctggggtatcgctgaggcagcctggcctgcacccaggttcccctcacccctgccacatttctctcttctccctcacgccaactttccttttcgcccttctctctctttctcacatcctagagacggtctttaatacgcattaaccctgtgctgccacatctggctcctgccctcattgcctccaatccggactcttcctctcacatcacccccaccacccccaacttgggctcacaacttctcttcactttttccatttccccagttctctgccttccgtctttccctctgtcctcatccttagcccctctgccctgctttgtgtcccacctctccccctccacttcctctcctcccaccctcagtctcacccccgggctgtctcactctctggagcctctccttcctgttctctgtccccagtgctccctaccctcacctcaagacgaccatggccaccatcccagactggaagctacagctgctagcccggcgccggcaggaggaggcgtccgttcgaggccgagagaaagcagaacgggagcgcctgtcccagatgccagcctggaaacgagggctcctggagcgccgccgggccaagcttgggctgtcccctggggagcctagccctgtgctagggactgtagaggctggacctccagacccggatgagtctgcggtccttctggaggccatcrggccagtgcaccagaaccgattcatccggcaggagcggcagcagcagcagcagcaacaacaacggagtgaagagctgctagcagagagaaagcctgggcctctggaggcccgggagcggagacccagccctggggagatgcgggatcagagccccaagggaagagagtcaagagaagagagactaagtccgagggagaccagagagaggaggctggggatagggggagcccaagagttgagcctgaggcctctggaggctcgggactggaggcaaagcccaggagargtgggagacaggagctcccgactgtcagaggcatggaaatggaggctgagtcctggagaaactccagagcggagtctgagactagcagagtctcgagagcaaagccccaggagaaaagaggtggaaagtagactgagcccaggggaatctgcctaccagaagttgggcctgacagaggcccataaatggagacctgactccagagagtctcaggaacagagtttggtacaactggaggcaacagagtggaggctgaggtcaggagaagaaagacaagactactcggaagaatgtgggagaaaagaagagtggccagttccaggggtagctccaaaagagactgcagagctgtccgagaccctgacaagggaggcccaaggcaacagttcygcaggagtggaggcagcagagcagaggcctgtggaagatggcgagaggggcatgaagccaacagaagggtggaaatggaccctgaactccgggaaggctcgagaatggacacccagggacatagaggctcaaactcagaaacyagaacctccagagtcagcagagaagcttctggaatctcccggtgtggaggctggagaaggggaggctgagaaggaggaggcgggggctcagggcaggcctctgagagccctgcagaactgctgctctgtgccctcccccctcccaccagaggacgctgggactggaggcctgagacagcaggaagaggaagcagtggagctccagcccccaccaccagcccctctgtctcccccacccccagccccaactgccccccaacctcctggggatcccctcatgagccgcctgttctatggggtgaaggcagggccaggggtgggggccccccgccgcagtggacacaccttcaccgtcaacccccggcggtctgtgccccctgcgaccccagccaccccaacctctccagccacagttgatgctgcagtcccgggggctgggaagaagcggtacccaactgccgaggagatcttggttctggggggctacctccgtctcagccgcagctgccttgccaaggggtcccccgaaagacaccacaaacaggtagggaagcagccaagccagacttcttagaagtccacttgtcaattttctctggactctggtctctttcttttttatacccctgttttcttgtcttcctctattctttcttgttaattcctgccaccacccttcctcgctctgcacatacacccttccttctcagagccctccttttccattttgagcccaaaagatcctgccccagcaaaggctgtctctgggtgtgtctctttcagggtgtgccaggctgctcattctcccttcccttgggctctgagtttccaacccccttttctttccttcctttcctgagtgtgacctgccccagcccatccagtgggagagcctaaagtgacgagcttgaatcagtgagggcagggtcaccagggtgagagcacttgcagtttttctggggagaagggatagggagcctggggtggtggagggggtggggtgggtttgtgttctagggagaaactgcagggagaagtgaatggagaaaggtccaactgccccgtgggaaggagggcagagctgaatagggacatcctaggatggaggggagaggggagatggaaccgggccggccaaagagcagagagaaggcttttgaaccccgagtctgccccatgggagagacacagagaggccatttgaagtgggtgacctcggggttgcacacccccagctgggccactgcttcagacagtgctcccttctctcttgggacaagaaaagccttctcctcttccaaaatacccccgcccctcactcccctgtccttcctccctgggtttcccctccctcccaagaactggctcagggatcggttttcccctcttttcctgccatcctggactttccctccccttagggtagcaaaagagagaagtgaatttggagacagttttgagaacaggcactggccagggagcacagtgggagttctggacaggggttggggctgaggccagcagagggtcagaggttagacttgcaacaaagacctgcaggaaagtgggggcagccaggatgactccccctggccctggcctcacttcttccctgtgcacatccatctgtttccagcttgaaaatctctagggagacagaggtcccacactcagacatctcagacttaggaagtccctccagtcacacacatctccccagagcctgggaagcccagtctcattctcatcccatgtgttaacatcctcagatttgatttttttgtgtcctcagtgtcagtggggaaccacagggactaaagatacgggttaagccttgggtggaggggggttcatttgatcccccaattcatcttcacatgaagcgtaagctcccacctctaagccatggttcttgggaacctaccctcagccctctgactgctaccagcctgttcccctcagggctgggcagatgaaaaaaacagaagtccggaaatgctacccgggtgaggtgttcagaaaagtcacttcctactgagagaggcttgtgcctctggggaagaatgagcagagggaagcatgaagctttggggcccaaagcccagggagcatcccaggggagccaggaagcaagtgcagggcaggacctgtgctggtgaccatacctaggccagagagcaggggagccggaagcagatcgcccaaacaggaagcctggggtgggggccggaaggctggtggggctgagtggggaaccctgggccctgggccctgggcctgccagatctgtgctcaggatgtggtgagagaataaggaagcagccgctgcttgggtgggggtggggaggaggcagcacagagttcctctgacccagacgcctcaccctccaccctctaccccctgtcagcamcctgttcttcagggactgggtgccttgtcccagctctgctgcaacacactggctcaggaataggagataggaggaccctgccaccaacccccgcttcaccttccctaaataactcgtttgcaggctaattccatcaaatttatccctgccatcaggagagaaatcccagccctgccactggagcccaggggatggctgtggctggtgccctaccccagaggcctcttggttgggctgagagaccagccccattgtgaccttatatagctgatgggagaggagcgagtgagtcaccccctctctacccccccactcccatgcaggctgtgcatttctgagaagcccagtcagaagttggtggggggtgaggagacaggcagggtaggsggggagatataaacatagrccgagagcaaataaaataagtcattttcagagtagaaaataaagtacagaggttattattccaaaagaggatatgagaagaaaacaaaaatgggttcccagaaatgtgggtaaatctgtcagttacagaaacctaagcggtcccttctgagaacttgggatataagcagtctggctgctgtcactagattctaccagcagttccacagacatgaactgggggtcaaatgtgtacaggctggaccacccgcagatcgtttccccagcattggtcctctgatggcacctcatgtgaggtctgaacaaaccctaacctcttgcattgtaccaacttctaagctcctttcttttttcttttcttttcttttttttttctgagacagtctcgctgtctcccagcctggagttcaatggtgagatttcggctcactgcaacctccacctcccgggttcaagtgattctccagcctcagcctcctgagtagctggaattacaggcgcacgccaccatacccggctaattttagtatttttagtagagacggggtttcaccatgttagccaggctggtctcgaactcctgacctcaagtgatccacctgtcttggcctcccaaagtgctgggattacaggggtgagccaccttacccggccccaagctcctttcaacagcagacatgagtataatatattagtaaattatctagtaagttagaaggtggtaagtgattatggaaaaaaaaatagaacagtggaacttagagggtcaggaggtagggggagtgaatatggagacttcaaaatagggtgatcaggagggtcagagccatggggatattttgggggagtgttccaggcagaaggaatagctagtactgttctggtcctgaggtaggagtgcgtggagggaaccaaggccagtgtggctggagtggaggaagaggccagagaggcaaggggagggtggcatactgggagcaccctgtaggctttggtcaggctctgggcaccttgggggcaatcaagtagacttttttttttttttttttttgagacagagtcttgctctgttgcccaagccgtagagcagtggcgcgacctcggctcactgcaacctccgcctcccgggttcaagcaattctcctgcctcgtcctctcgagtagctgggactacaggtgcacgccaccatgcccagctaatttttttgtatttttagtagagacaggtttcaccatgttggccaggatggtctcaatctcttgaccttgtgatccgcccgcctcggcctcccaaagttctgggattataggcatgaaccaccgcgcccagcctggagtagactttttgctccaagtgagatggggagacactgcagggttcagagccaacaaggagtaacatatacagttcctgagttctaccttcccatggggacccaggtgtcatatctggttttctttttttttcttttttagagacagtgtcactctattgcccaggctggtctcgaactcctgggctcaagaaatcctcccgcctcaacctcccaaagtgctggggctacaggtgtgagccaccatgcctgactggtgtcatattgatgcagctcttaacaaccacctgcccagccacccttctggcttctctcttttcatacctcagttcattaggggactcagggatgtacggctgaccccaagtcttcccaaacagatgccagggaaggcctgagtagatcatttggacctttccaagtagttcatatggaatcctcctgctgtctccctaatccctttggctcctagacttaatcccaccctgccccttccccctgagcttcttaatagggcaaaggggaagggtagaaaggcagtgagaacagctgggactcgcctgctcttgggacagtgtgattaccaagggttttctgtgccctgtctggtattttgtctctgtgcctgtccctttgggcacactgtggacccccaccccaggtttgtgtggactttcctttctgcccttgtcatctcccccagccttcagggtgtcagyggctcatctttcccctgtgtgttgctggagtctcttggttcctctcggcctttctgttcatctcccatctcttcctaggccctagactccctttgctatggataggagaggaatgaggagagtaggagggaacaggtgcccagggtcctgggttttgcataggacagcaaggggctgtgggtatgaaaaccttgcttttgtctgagactcgctccccagccagttctttccccactggccagtctgctgggctcctctgggaagttcactcgattgcccccaaggtgcccaaagactcggttctgatcacaagacttatcgccatgtattttaatttctttttacccctctgcctcccacactcgaaatagcagggaccttggtcttatattattcacttctgcctcccaagcccctgccaacgtacagggcaaagtctgatgttttgaaatgatatgatcgaagagggaaactctagaattggagagccagtatggaaaggaaaactggatcccagagtggatggggagagtgagtggggcacctgagtccagcccccacccccacgttccgccagtcccacctgctcccttgcagactccgccccccccgcccccgctttctctccctcaacccccgcgggcttctcccctgctgaccttgcctcctgccccctttttctccctccttcagcttaagatctccttcagcgagacagccctggagaccacgtaccaatacccctccgagagttcggtactggaggagctgggcccggagcctgaggtccccagtgcccccaaccctccagcagcccaacccgacgacgaagaggatgaggaagagctgctgctsctgcagccagagctccagggcgggctgcgcaccaaggccctgattgtgggtaagcggaggctccgccggcccgagggcgccccctgctgtcagagcgggcgctgtggtccaggagagaggagggaggattacatgtaggcactcggaaggggcttggcgggtcctctggttcaacatgctcctttaacagatgggcaaactgaggtccccggcagtgaagtacacattgagtcttcaggtttcaaaacgagaactcttcctgagtgctgtaatctggtcaaaatcacagggtgggtcgacaggcctgagttggaattccagcttgtctctttaattgtgtgatctcagggaaaccatctgatctcttgctttagtttattatttatgaaatgaagttaataataactacctcctgtggctcatgcctgtaatcccagcacttcgggaagccaagacgggtggatcgcttgagcccaggagttcaagaccaccctgggcaacatggcaaaatcctgtctctacaaaaaaattgaaaaattatccaggtgtgggccgggcacggtggctcacgcctgtgatcccagcactttgggaggccgaggcgggcggatcacgaagtcaggagatcgagaccatcctggctaacacggtgaaaccccatctctactaaaaatacaaaaaaaaattagctgggcgtggtggcgggcacctgtagtcccaactacttgggaggctgaggcaggagaatggcgtgaacctgggaggcggagcttgcagtgagccgaggtcgtgccactgcactccagccttgacaacagagtgagactccgtctcaaaaaaaaaaaaaaaaattagccaggtgtggcagtgcgcagctgtggttccaggtacttggaaggctgaggtgggagcatcgtttgacctcaggagttggaggctgcagtgaaccaatattgcaccacccactgcactccagcctgggcaacaaaggaagacctgtctcaaaagaaacaaacaggccaggcacggtggctcacgcctgtaatctcagcactttgggaggccgaggcaggtggatcactcaaggtcagaagttcaagaccagcctggccaacatagtgaaaacccatctctactaaaaatacaaaaattagctaggcatggaggtggacacctgtaatccctgctactcgggagtctgaggcaggagaatcacttgaacccgggaagcagaggttgcagtgagccgagatgacgccactacactccagcctgggtgacagagtgaaattctgtctcaaaaaaacagaaaccaaaaactacctcctagacttgtagaaaatattaagtaattttatttatttatttatttatttattttgagacagcgtctccctctgtcgcctggactggaatgcagtggcacaaccttggctcactgcaacctctgcctcccaagttcaagcgattcttgtgcctcagcctctctagtagctgggattacagatgtgtaccatcacacctggctagtttttatatttttagtagagacagggtttccccatgttggtcaggctggtcttgaactcctgacctcaagtgatcctcctgcctcagcctcccaaattgcttggattacaggtgctccaggccaagattaagtaattttttgtgaagcaccaagagccacagctggatatcatattacttaatctctcctggagttatggtgagattaaacagttataaggatgcctggcacagagtccgagctaaatgagtgatggatgtggttactggtggtaacatgctttagatatggragatattataggacttcctgcatgccaactgcccttcaatttgtgtgggggggaagggtgrgcagaaggcagaggctctcactcattctctaacattattgccccctctcccacagatgagtcctgccggcrgtgaccatcttccaacatagggatatacctccctccttcttataactgaagatcctggagcccggaagattcagggcagacagaccctgataatgagcctggcagggaagggcaaccaacwtcttgtaacttgctttccccaccctgtttctgggggcagagccaattgcccaatttctaccctaatccaaagtccctggtgtgggtggggttaaacgtgctggtgcatcctaggtcatccaagagtgagcgccaagtcctgagaaggggcacagaactccctggagggtggagatggagcacctgccccccatggcagggtacactctccccacagccttcctccccaccatcccgtggggactctcgggatttaagcactcgtctctctgggaggcccagaccccactccatttataggcacatctccttcatttcctaggtcactgcccctttgtttacagctcctgcctcctcccttgaccacagcctggtttacaaattccatcagctcccagccccaccygccaaagtcccaggtttacaagccacgcttacttgctgtgtctgcgtggaattctctcctctgtcccctccagtctcctcattggagtgacctgaaggtgtggcttcctccactttttctcagtattactttgccttagttttccccaagagggaaggctggaamtcttaactctgtaccccttgatagttatttaattctgtttctcctagtggttcacaattgaactgaattgagatggtgtcgggtggctaaggagacacctcacctctccttccccattgtgccgcctttatcaattgcctgttttgttttgtttgttttttaactttccataataaaatggagttctcttcaactcgtctgcttctccttctttgggaaaaaaaaagggtatgtgaggggaggctctggtggctgggggagaggaaaatgatgggggatgaaccaggaactcggcactgacatgtcaaaaggggtctgggaagctgcacgtgggtttcacgcaggacaagcaggtgacatgagaaagggcagttgaagtgtccactagactggaagtgccatgagggctgactacatcagctggattcactgcaatatcctgtacctgtcaactagtagacacggaattatttctagaatgaatgacaacaaatgaatgaatagaagaaaagggttaaaatattacagaggacactttgagttgaagggttctagtattcagaagcctgctgccatgaaggcagctaggtagtgtatgacacaacccatgtggctaatccagggatacttacttaaagagctggggctacgaatactaaatctgaaattgctgcaaaatgaagtaagtatgtacaagagtcagtttcctggaaaaggttcccctctgatagacaatggattttatatcgttaaaggcctaaaggccgggcacggtggctcacgcctgtgatcccagcactttgggaggccgaggcaggcggatcataaggtcaggagattgagaccatcctggctaacacggtgaaaccccgtctctactaaaaatacaaaaaattagcggggcatagtggtgggcacctgtagtcccagctactcgggaggctgaggcaggagaatggcatgaacccgggaggtggagcttgcagtgagctgagattgcgccattacactccagcctgggcagcagagtgagactccatctcaaaaaaaaaaaaaaaggtttaaaaaccatcttgatagtgcatggctttggtgcccatgtagttgatatttggaattttcccatttcaaagaatatcttatacaaatgtggaacatcaatattttactcatcaggaaaatttgtttgtttgttgttagctctccaggctaacaaagatatggttgaatagttatagtccttctaccactacaagttgctcctctcagactggtcagaggaggccccacacctttactataaaacaaaatatatgagacaaattgaacttaagcatacgccaaaggttttcaatttactagcaagagaacaagccaggtgtcaaaagactcagccagttcagagaaggtctgggtagggaaggaaacagaatgattatattagtagcctgttaggtaaaggtcttaaaaagtttccagttgtgacccaggaaaacagagttaggaagctccgaggtgccaggggtgctcacagtccatctcagaaacagaaaacaatgcattcaagaggtcaggccaggtgtggtggctcatgcctgtaatcctaacactttgggatgccaaggcgggtggactgcctcatctgaggagtttgagaccagcctgggcaacatgatgaaaccccgtctctactaaaatacaaaaaattagctggacgtggtggcacgcacctgtagtcccgcctactcaggaggctgaggcaggagaattgcttgaacccaggaggtggaggctgcagtgagccaagatcacgccactgcattccagcctgggcgacagagtgagactccgagactccctttccaaaaaaaaaaaaaaaaaagtcagtgatgtagatccacttgtggctattaataagaacaatgtttcatttcctaacagtagtgcctggtaactgcaattaatcacaaaagtatgatgcaggatcaaacaaatcagacagcagagcatcgagtaacaaattcagctttttgttttgtttgtttttttttttttgagcatagtcttggtctgttgcctaggttggagtgcctgacctcggctcactgcaacctctggctcctgggctcaagagattctcctgtctcaggcccagtgcggtggctcacgcctgtaatcccagcactttgggaggccgagacgggcggatcatgaggtcaggagtttgagaccagcctgaccaacatggtaaaaccccatctgtattaaaaatacaaaaactagctgggcgtgatggcatgtgcttgtcacacttgtaattccagctactcaggaggctgaggcaggagaatcacttgaacctgggaggcggaagttgcagtgagccgagatcgtgccattgcactccagtctgggcaacagagcgagactctgtctccaaaaaaaaaaaaaaaattctcctgtctcagtctccagagtagctgggactacaggtgcacacctccacacctggctaattttttgtagagatggtggggtctcaccctgttgcccaggctggtctcaaacccctggtctcaagatatcctcctgcctcagcctcccaaagtgctgggattacagcaagagccactgcacctggccttgcttacttttaaataagcagccaccagtgattttctcaagctgttaagcaaaaatgcagaacacagtttgcctgttccttagtttggagattttgtctttaacaactttccccagttccccagtttcttcctgcctagaggtcttcccttatacctgacctgtcttcactcctgctgcaggcaaaccagtcctagcaacggtcacttttttgtttgtttgagacagagacttcctctgttgctcaggctggagtgccgtggtgggatctcggctcactgcaaactctgcttcccatgttcaaatgattctcctgcctcagcctcccgagtggctgggactacaggcgcacaccaccacgccaggctaatttttatatttttagtagagacagggtttcgccatcttggccaggctggtctcgaactcctgacctcagataatccgcccgccttggcctcccaaagtgctgggattacaggcatgagccaccgcgcccggccaacaatgctaatatgttttatgagcatggacccgatcttccaatctgaaatagaatttcattcctcccttactttgtatagtttttggctctataaaatttccatactttctttattatgtatcctgtccctcccccaccgcaaaatgtaaatttggtaaggaacttttgatttgtcctctgctatatcccagggacggaaagcaatgagcacacattaggcatccattaaattaatttcacttgttgaatgaatgcgtgagcgaagcactcacagactgaccatcagggggcgtcagagaaactggacagaggcgaaatgaagaaaaaagaattaccccgagttttcaggtatggttccgcgaggtttgaactcgctcggccaccgtagtgcttagaggccgaaaaagtacagccccttccgggctccgcggtacgggaagacagctttgggatgtcggaagatcctagaggtcccaaggtagctgacttgcgaagctgaggctccagccgagggctccaggcctctgaccggcccagcagtgagcgcggctgcccgacgcttcagggccgggagcagggagcgtgagtcgccatggcgacgccggcgggtctggagcgctgggttcaggacgagctgcactcggtgttggggctgagcgagcggcacgtcgcccagtttctgatcggtaccgcacagcgctgcacctctgccgaggagttcgtgcagcgcctacgagacactgataccttggatctcagtgggccggcccgggacttcgccctgagactctggaacaaggtgtcggcaggggtggggaggggccctgtgatttgtcccggtgaggctggcctaacggtccatcgagaagttaagaaagctcagttcacaagcacttattctttgtccgttgtcgcgtaggtactgtgctagctgctggacgcccagctcagtggagaagattgaggagggcttaggtgtgtcgggttaagcgcaatagaacggtgtttctcgaactcttaacatgcatccaaggttcttgttaaaatgcagattgcgattcagtagggatcttagtttctgcatttctttctttcttttttttttttttgagagacacagtctcgctcgccccgtcgcccaggctggagtgcggtcgtaagatcacggctcactacagcgtcgacctccctggttgaagcgaccctcccacctcatcttccccggtagctgggactacgggcgcgcgccaccacccccggctaatatcttttatttttatttttatttttagagatgaggccttggtgtgttgcgcaggctggtctctaactcctcagctcaagcaatcctctctcagccccctcagagtgctgagattacaggcgtgagccaccatgcccggcccccctcatcttctgaacttcctttcagtcgtttaattaacagagggggccgggtgcagtggctcacacctgtaatcccagcaccccgggaggctgaggcaggaggattacttgagcccaggagttcgagaccagcctgggcaacatggcgaaaccttcgtcctacaaaaaaattaaaaattagttgagcgtggtagtgtgcacctgtgtttctagctacttaggagcctgaggtgggaggatcccttgagcccaagagggacagagtgaaaccctgtctgtaaaaaaaaataaaaaaccccattcaggatgatgaagatggggtgaagccatgaggaagaaagagaatgaatgctggttagctggtttaaaactaagtaattgtgcccgggtgcggtggctcatgcctgtaatcccagcactttgggaggctgaggtgagtggatcatgaggtcaggagtttgagaccagcctggccaacatggtgaaacctcatctctactaaaaatacaaaaatagtcgggcgtggtggcatgtgcctgtaatctcagctacttgggaggctgaggcaggagaattgcttgaacctgggaggcggaggttgaagtgagccgagatcacgccattgcctgacagtggggccgggccgcgggggcaggaaagactaagtaattgcttaaattaggaacagagctaagtgggagggcagagatcaggagttgctcagacctccttatcttcccctctactgacaggtaccacgaaaggcagtggtagaaaagccagctcgggcagcagagcgagaggcccgggccctgctggagaagaaccgatcttataggttactggaagacagtgaagagagcagtgaggagactgtgagtagggctggaagcagcctccagaagaaacgtaaaaagcggaaacacctcaggaagaagcgtgaggaagaagaggaggaagaggcttctgagaaagggaagaagaaaacagggtaagtcagaagcagggtgagagaggatggggcaggctgaagtgttctctatgcccttatttaatcccctggatgggctgcagggggagtaaacagcagacagagaagccagagtcggaagatgagtgggaacggacagagcgtgaacgccttcaggacctggaggagcgtgatgcctttgctgagcgggttcgacagcgggacaaggatcggactcgaaatgtcctggaacggtcagacaagaaggtgaataggagcagcatgttctgtaaatccccaagatcccagggtgaaatctgaggttggctgtgagtgcagagatagtgatctctgggaagacaaggggctgtctctagtgagatgttcacctctgtggtgagagaagccctgtgcatcctgtggctaagacaactgtctgctgtacctgcaatcagagagattcctcactgagaggggacattttttgtgttagggcgcatctgaatgatccttgtgattctagaggggagcagctgtcagtgtgggggctctttggcctcacacccctccattcttgttttttcttctaggcttatgaagaggctcagaagcgcctcaagatggccgaggaagaccggaaggccatggtgagtcccagggcctagggag

SEQ ID NO: 96845 - DNA, 14735 bp, Homo sapiens
atcatatggcaattgtctttctgtgattgacttatactacttagcataatgttaagtttcatccatgttgtagcatgaatcagaatttcatccctttttatggcttgataatactgcattgtatgtatataccacattttgcggtaggtacaatgtatatttacattgcttccacctcttggctactgtgaataatgctgctatgaaaatgggcgtgtaggtatcttttccagatcctgactttacttcctttggataaatacttacaggtgggactgctggggtatatgattgttctacttttaattatttaacactcttctacaatttattttctgtttttgttgttctaatagtagttattattaggtgaggtatttcttatctcttataaggacacctgtcattggatttacggtccacctggttaatccaggattatcaagtctcaaaatcctgaattacatctgcaaagactctttttccacataaggtcacattcacaggttccagtgattcaaacatggacatgtcttctggtcccccattatgtccactatactctcttttttttttttttttttttgagatggagtctcgctgtgtcgcccaggctggagcgcagtggcgcgatcttggcttcctgcaagcccacctcccaggttcacgccattctcctgcctcagcctcccgagtagctgggactacagacacccgccaccacgcccagctaatttttttgtatttttttagtagagacggggtttcaccatgttagctaggatggtcttgatctcctgacctcgtgatccccctgcctcagcctcccaaagtgtcgggattacaggcgtgagccactgcgcctggcctaagtccactatactttcttcttccctgccttatttttattcttgatacttatctccatctgacatgctctatatttctttatttatcttgtttggcagacgacaatcaagataaagccatggagacaaggatttttgttgctgttgttcttgttttttgagacagagcctcactctcacccaggcctagagtgcagtggcacaatctcggttcactgcaacctctgcctcccaggctgaagtgatcctcccacctcagcctccagagaagctgggactacaggtgcttgccacatgcctggctaattttttgtatttttggtagagacggggttttgccatgttgtccaggctagtcttgaacttctgagttcagatgatccacccaaagtgctgggattacatgcgtgagccactgcgcctggcctagacaaggatttttgttttggtcacctgtgttttcccattagaacagtggctggcacaaatggctgcacagcacatactggttgaacaaatgaaggacggggtggctggtctagacaaagagcctagacaaacatcggcaggaattgcttcatggcttctgagcagaaaaatctctcatctggggaattagactccctaagttaaattttctttcttttttggagatggggtctcactctgttgcccaggctggagtgcagcagcaccatcacagctcactgcagcctcaacctcctgggggtcaagcaatcctcccacctcagcctcccgagtagttgggactacaggcccatgccaccatgcccagctaattttttttttggtagagacagggtgtcaccatgtagcccagactggtcttgaacttctggactcaagcgatcttcctgcctcggcctcccaaatgctgggattacaggcatgagccacagtgcctcacctcctaagttaaattttctgcagtggagaatacaatctctttaatattatctctcagttaagacaaatttcaggatcctccttaaaaaaaaaaaaaaaaagaaagaaaataagtttgccaatacaaataccatttctcactaaagtgaattagggttccttggagaaatggttggttttgtttctgggcagtaaatgtataaaacggaaagcaaggaagtccagggtgtccaatcttttggctttcctgggccacactggaagaagaagaattgtcttgggccacacataaaatacactaacaatagctgatgagctaaaaaaaaaaaaatctcataatgtttttagaaagtttacgaatttgtgttgggctgcatgggccacaggttggacaagcttgacctaaagactactaggattgtggattactaggattgtgccagaaggacacagcagcaactaaatatttgatgagacaatctgaacatttaaaaaaggacaatgactgtaatggattaaagcacatcaaatatctaaacatccatcaattcatgatagcactgccccttctccccaaagaacccaaagtggtcacagttagaggttgctggggcatccatccatccatctttattattattactattatttgagacaaggtctcactcagtcacccatgctagagtgctgtcgtcccatcacggctcactgtatcctcaacctcctgggctccagccatttccctgcctcagcctcctaagtagcgggaattacaggcatgcatcaccatgcctgtctaatttttacatattttgtaaagatcttgccatttcctgggctcaagcagtcctcctgtcttggccccccaaagtgctgggattataggcagagccactgtgcgtgggaaagcatcaagcatacatcctggctatcccgaatggattgtatttcaaagtaaccagagagatgagggaatgctcacctttgtagaagaatctcatcttataaatgcaggagaaatgagagcatttgaaattaccactttgcacacctaaggaacatcataaaactacactagggtttctcaacctgggtactactgacattttgagctggataattcttcgctgtgggggggaggtgtgctctgtgaattatacaatgtttagcagtattccttgcattcattttctagataacagcagtaccacccgccaccccccacccagttgcaacaatccaaaatatctccagacattgccaaatttccccttggtaggacagggcagaatcaaccctcgttgagaaccaatggtctaatgatcatcaacgtttgctagactattagaagaaaggctgatggtaaacttcatggataatcaggatgacaacccccaaattgagagatgaattacaatattactaagagacaaacccgccttgtgcctcagtagaagtacatagtgccagccacgaagcgttattgcaaacaaaacaaaacaaaaaaacccaaacctcaacattacacctaaacctaatgaagcttctagccaggggcaaatccaagctttgtggggccttaaactatacaaatttcacagtcctctttaagaaaaagacacaaaattataaatgcgaaattaggtacgggggtctatgcaagggagggcctgaagattaagcttcattagtttcactgtaaacctcccctgactctagaattaactgtgattacaggacataccagggacaaaaaacgttaaatgacacctgaagatacaatcagcaaaacccagaaagtggaaaattctgttggtcaaatgacccagtttcttcaataagtaaatgccatgaataacaaacaacaaaaagagaggggaaatttatatatataatatatatataatatgtataatatatatatatgttgttatatggtttgtttttttttttttggacacgagtctctctctcacccaggctggagtgcagtggcatgatctcggctcactgcaacctctgcctcctgggttcaagcgattcttctgcctcagtctcccaagtagctgggactacaggtgagcaccaccacacccagctaatttttgtatttttggtagaggtagggtttcaccatattggccaggctggtctcgaactcctgacctcgtgatctgcccaccttggcctcccaaagtgctgggattacaggtgtgagccactgcgcccggccctgtttttgtttgttttgagatagaatctcactctgttgcctaggctggagtacagtggcatcatctcagcccactgcaacctccacctccctgattctagcaattctcctgcctcagcctcccaagtagctgagattacaggtgtgcaccaccacacctggctaatttttgtatttttagtagaaacagggtttcaccatgttggccaggctggtctcaaactcctgacctcaagtgatccttccacctcagcctcccaaagtgctgggattacaggcatgagccactgtgcccagccaaaattgttatatattaagagacatatatttgtatgaaatgcagtaagtaaaccttgtttggaccctaaatatctaatgtacaaaattttttaaggcaatggggaaaattaaacacatactaggtattaagtgatgttaaataatttttaaaattttggtgggtgtgataatagtataaagtccttatctgttagagacacacactgacgtatttataggtgaaatgacatgatgtccaggatttgctttaatatacagcacttcaaaaaaaaatgcagaaagggatacatgaaatgagaaaggcagcaaactgttgttgaagttggatgatgagtacagccctccgttattatccaagggggataattcctggacccctacggataccaaaatccaggtatgctcaagttctttatgaaagttcattgtaattattctattatataaaagtttcgaaattctgttgataaaatgtatttttagtagagacgggggtttcaccttgttggcccaactggtctcgaatttctaacctcagatgatccaccagccttggccgcccaaagtgttggcattacaggcgtgagccaccgcgcccgcctggccttgataaaaacagttttaaccttccgttgcttcgattccatgcccactaagtaacattccagtttgtttttcactttcaaaaggatgtgctgtaactaggggatgtaaacaagctccatgaccctacttattccaagttttcgttccactctcccaccttttttttaagacaaggtatcaccctcggtcgcccaggctggagcgcgatcactgcttaatgcatcctcgacctcctgggttcaagcgattctcctgcctcagcctcccaagtagctgggactacatgcgcacaccaccacaccggttaattttttgtagagacgggctttcaccatgttgcccaggctggtcccgaactcctgggctcaagggatccgcccgcctcagcctcccagagtgctgggattacaggtgccagccaccgcgcccggccccagcttcttaaaagaatgatccgaaactatggcagcactgggcttttggtccccacccaagaaatgcccgctcgcagaggctcgccgcggcaggctctcccgacgtgacagagtgtgggtctggattcagcctcggttcttacgagtcagataggtggacacgcaaagcaaaacatcacagggctttttgtatttagcacagaaaacacttgtgagcccgagctgagaacccaaaaggcacgcttcaggccatcgtagccaccaagcctggtcagattccgtccaccgtctccttggtgctccgagacccaaatcgctgactggggccgagggcgggcgtgactgcgcaggcgtgcctcccctgcgagatgccggaggtaagctgcggggtaaggggcgagaaattaagggcgaacgtcattgcgcatgcgccctctactctcgttgcgggggtaggcgggcgccgggctgtgtgagggggcggggcgcggcagtgttcggtacggatggagttgcaggagacggcgagtacatatcactgcgcaggcgtcctcttcccctaactctcagggtcgctagggtggcgcgcaggcgcagagcgatgcgcaaatgtgcgcaggcgcttaggggctgaggcgcgatggcaggtgtcggggctgggcctctgcgggcgatggggcggcaggccctgctgcttctcgcgctgtgcgccacaggcgcccaggggctctacttccacatcggcgagaccgagaagcgctgtttcatcgaggaaatccccgacgagaccatggtcatcggtcaggcgggctgagggtggggaggccctttgtacccagctcagccctcggcggcgctccctcctcccgagcccagccgggtcgctggctcccccagtacctagcctgagggtgccccgaggacgccaggccccctgcctagagctccgggccgcacgtcggagggggccgggcggagaggcggcccactagggccggtcgtgactatgtgtctgccccgcaggcaactatcgtacccagatgtgggataagcagaaggaggtcttcctgccctcgacccctggcctgggcatgcacgtggaagtgaaggaccccgacggcaaggtaaggctggcgttggcccacgcagccgttcttcagtggagctcccgtggggtgtaaagcactgcctggaggaggcctcaagggacaggaacttgcacttggagagcctgcggtataaaggtggggccttcactcacatatgttgcaggtggtgctgtcccggcagtacggctcggagggccgcttcacgttcacctcccacacgcccggtgaccatcaaatctgtctgcactccaattctaccaggatggctctcttcgctggtggcaaactggtaagaggattttctctttggcttcagcttagaatctctcacttgtttccaaattttgatttatcaagattgtgaaactttgtagcacagtcagaattggggagacagatgttgccttctgctccacagccagggacaatagtgggttccataccctggaacagacaactggaggccccaccactcatacatyccatgtttccttgtagcgkgtgcatctcgacatccaggttggggagcatgccaacaactaccctgagattgctgcaaaagataagctgacggagctacagctccgcgcccgccagttgcttgatcaggtggaacagattcagaaggagcaggattaccaaagggcaagtgcatatctccttgtaatttgagagggcagttgacctttatacccactatacctactcaagtttctgcttgggagatcagctctgcagagaatggaatgagaagtattggtttagataggttgtttgtttgttgtttttgagacggagtttcactcttgttgcccatgctggagtgcaatgccatgatcttggctcactgcaacctccgcctccccaggttcaagcgattctcctgcctcagcctcctgagtagctgggattacaggcatgcgccaccatgcctggctaattttgtacttttagtagagacgggggtttctccaygttggtcaggctggtctcgaactcccgacatcaagtgatccgcccgcctcagcctcccaaagtgctgggattacaggtgtgagctaccgcgccctgcctgttttgcttttttatcaaaacattttattgtggtaaaatataacaccaaatgtgtcattttaactgtctatatagttcagtggtattaagtgccttcataatgttgtgctaccaacaccatcatccagctccagaactttttcatcttctcaaactaaaaatctgtacttattttgttttgtttttgagatggagtctcgctctgttgcccaggctggagcgcagtggcgccatctcggctcactgcaccctccgcctcccaggttcaagcgattctcctgcctcagcctcccaagtagctgggattacaggcaagtgccaccatgcgtggctcatttttgtgtttttagtagagactgggtttcaccatgttggccaggctggtcttgaactcctggcctcaggcaatccactgccgcagcctcccaaagtgttgggattacaggcgtgagccactgcacccagcaaatctgtacttattataaacaataacttcccgtttccttttgtcctgacacccaccattctactttctgtctctatgatcctgactaccctatctcatataagtggaatcattcagtatttgtccttttgtgactggcttatttcactgagkataatgttctcacagttcatccatgttatagcatgtgtcagaatttcttaaggctaatattccattgtatgcatgtgccacatttcgctttcagtagtcatttttaagctctataaaataaaatgaagaaaggacagttcacaatctagtaatagccattgcctacctgtttttcttggactcttgttggaaatggtaggatcatgatttcagtcctaacagagatgcttgtggagggacagcctgtccctttcttggggcagcctcagtggggagaccatagcactcctaatggagtcacagatagtattccaaaaggagtttggtcctggagttgagtarttacacgcagggagggacctcacaacagccagactgtttctcctgctcacttaaccctgtgttgccccacacagtatcgtgaagagcgcttccgactgacgagcgagagcaccaaccagagggtcctatggtggtccattgctcasactgtcatcctcatcctcactggcatctggcagatgcgtcacctcaagagcttctttgaggccaagaagctggtgtagtgccctctttgtatgacccttcctttttacctcatttatttggtactttccccacacagtcctttatccacctggatttttagggaaaaaaatgaaaaagaataagtcacattggttccatggccacaaaccattcagatcagccacttgctgaccctggttcttaaggacacatgacattagtccaatctttcaaaatcttgtcttagggcttgtgaggaatcagaactaacccaggactcagtcctgcttcttttgcctcgagtgattttcctctgtttttcactaaataagcaaatgaaaactctctccattaccttctgctttctctttgtccacttacgcagtaggtgactggcatgtgccacagagcaggccctgcctcactgtctgctggtcagttctgggttcacttaatggctttgtgaatgtaaataaggggcaggtcttggccctagaggattgagatgtttttctatatcttagaactatttttggataaattatatattttccttcctagtagaagtgttactgcctgtaactagctcaaaataccaatgcagtttctgcattctgggttttgtttttcctttttttttttttttttttttttttgagttttgctctcgtcgcccaggctggagtgcaatggcgtgatctcagctcactggcaacatctgcctcccgggttcaaatgattctcctgcctcagtctcctgagtagctgggattacaggtgcccgccaccacgctcagctaatttttgtatttttagtagagatggggttttaccatgttggccaggctggtcttagactcctgacctcagttgatccacctgcctcagcctctgcattcagtttattcacatatttttggtaactcccatggcagctcctaggatttcagcggtctgtgggccagaaagcaggcaccagggctgacctcaaggccgtatcagagggccaagcagagttcttttggatacctgcttttcatcccacagggccttagagtcagaggtaaggtagcaacagagctagaatggggcaatgcactcttaccctccttctcaacttttatttaagctgtgctaaatgttttcttcaagggaaccagatttagttctttacagaattttccagtgaaataaaacatgttgtaatagctgtgtttgagatgaaataagaggttgtgggtagaggggaggcacctaaaggaaaagaggaaaggtgcctgggctacctatgcagataacctggagtggacttcactgtggactcgtggtactaaggcttggcctggacaggcagtctagggggtatgggaatacacggtgtggttgttcaactatttgcaaaggtcaaccaaatagaccacatgttcgcaaagtatcatctgaggaaattaagtaccttcttagccctctcagtcataaatttgaacaaattttaatacacttccctcatgcccttctatataaaacttaataccattagttccccattcttgacattttatttcagtttttattatatatttatttgaaatatttattaaattatctgacctacagaactaaattcttctccttttgttatttcttatgtcctataccatatatgtacctatttatatatatatttatgtatttttaaaatttttatttattttattttttgagacagtcttgctctgtcgcccaggctggagtgcagtggcatgatcttggctcactgcaacctctgcctcccgggttcaagcagttctgcctcaacttctgagtagctgggattacagacacccaccactacacccggctaatttttgtatttttattttatcttattcatttatttatttttgagatggagtctcactctgtcgcccaggctggagtgcagtggtgcaatcttggctcactgcaacctccacctcctgagttcaagagattctcctgcctcagactcccgagtagctgggattataggcgcccgccaccatgcccagctaatttttgtatttttagtagagacagggtttcaccatgttgaccaggctggtcttgaattcctgaccgcaggtgacccgtctcgcctcccaaagtgctgggattacaggtgtgagctggccgggcacaggtgatggggtcttgctctgtccccaaggctggagtgcagtggtgccatcacagctcaaagcaaccttgagctcccaggttcaagtgatcctcctaccttaccctcccaagtagctggtactacaggtatactccactgtgcctggctatttttactcttaaaaatacatgtgggctgggcacggtggctcacgcctgtaatcctagcactttgggaagccaaggtgggtggatccctatagcccaggagttcgagaccagcctgggcaacatggcgaaatcttgtctctgcaaaaaatacaaaaaatttagctggtggcacatgcctatagtcccagctacttgagaggctgaggtggaaagatcacttgagcccgggaggtcaaggctgcggtgagccatgatcgtgccactgcactccagtctgggcaacagtgatcccatctgaaaaaaaaaaacaaaaaaaaaaacgcaatttagggccaggtggggtggctcacgcctataatcccagcactttgggaggccaaggcagggggatcgcctgaggtcagcagtttgagaccaggctggccaacatggtgaaaacccctctctactaaaagtataaaaattagccaggcatggtagtgtgtgcctgtaatcccagctattcaggaagctaaggcaggagaatcgcttgaacccgggaggaggttgcagtgagcagaaatcgagccactgcactccagcctggggggcagagggagactctgtctcagaaaaaaaaaaaaatgcaatttagttctctaggcttttccatttaatagttttatatcctcctgtttctaaatctggatgacagtgtaacactccagtaaggtgaattgtgaattgctgaaattcttcagatgtttaaaagagttttcagtattcctcatgttagaattaatgcagagaaaaattatatcctttgaactagttacatgttgtggacttctggcctgaggctcttggggattatgtgacatattgggaagggacacatttctgctctgtggctgttactagaaatctagccagcaaatcagactacgtttgtgagaagacaggaaggcacagattagggttgagccagccttcaacaggtttggctggcagtagacacagtggagcacatcttaactattttggtaggtcctgggtttctcttggtagtttttgatagaaaggggaatggtgtgaggaaaaagtgggcatacatttcacctttccactgataaggcaggtggaattgggatagtcagtggatgggccaatagctggtggctgtgagaagaataaggatttccatactggtgtgtcatatttacagataggttgtgacctaaaaagttttttaaaaaacagcagttagggcctgggcgtggtggctcacgcctgtaatcccagcactttgggaggccgaggcgggcggatcacaaggtcaggagatcgagaccatcctggctaacaacggtgaaaccctgtctctactaaaaatacaaaaaattagccgggcgtggtggcaggtgcctgtagtcccagctactcgggaggctgaggcaagagaatggcgtgaactcgggaggtggagcttgcagtgagctgagatcatgccactgcactccagcctgggcgacagagtgagactccttctaaaaaacaaaaacaaaaccaaaacagtagttagggtacacacacacaaattctagtgattttccccccagtactacccttgacttttgaaattcctgctttctcagagtttacaacatccttaccaaacagccttctccctccttaccacaaaaaaagaaaaaaaagttctggggttgaggggacactccattcttaacatcctctattatcccagcccaattccccagctctcactgggactagttgtacctatcttcatcatttggtcccagcatgactacctgttggtgcatgagctgatctctcctaacctaacagccagatgctagtctctggtactcagatgctgggctgcatcagataggatgcacaggatcatcctggaagcttgttgacatagattcctgtgcaacactcagatatagtcttaatgtagatttgtgttgggtggtatggtaggtagaataatggcctaccactctgaaacatatgaatatgttacctaacatgacagaagagaattaagttgctaatcagatgactgtaaaataaattatcctggatcatctggatgggcctaatgtaatcacaaaggttgtttccttgccttttccagcttggctctggctcccttcctccagcaagggtgggttgagctctcacatggcaccactttgacctcttctgcttccctcttctacactgaaagacttatgggccaggagcagtggctcgcacctgcaatcccagcactttgggaggccgaggaaggcagatcgcttggccccaggagttcaaaaccgtcctgggcaacgtggcgaaaccccatctagaaagaaaagaagagaaggggaggggggaggggaggaggagttacatatatacacatacacacacacacacacgtacgtacatacatacatacacgctaactggacgtggtggtgcgtgcctgtagtcttagctttccaggagactgaggtgggaggaccacttgagcctgagatcgcgccagcctgggtgacagtcagaccatgtctcaaaaaaaaaaaaagatttgtgattaggattcttagtcctcacctgtattattttcctattgctactgtaacaaattaccacaaatttactggcttaaaacgacgcaagtctgtaggtcagaagtctgacacgggtcttaactggtgacccgagtcagatttgggacacaaagaacagaaaccaagctgtgcaggtttctgacaggcagtccggttagggagccctacagcaacccgccggtcctctctctcaggcagttgctgccatggctcattattccaaccggttctcctcagcccagtctatctcagtggctccattcatagggtgatgtgcccggcgggacactaaccctaaccaagcagagagacggtcatgcccgtcacgacctcggccctcgccccggccgaggcttctcctgcaggtcgcgagaatcaggtgcgtcagcggcgtccgggaacgccggaagagccagtggagcggctctgtagtccaaagtaccccgtcgaccccagcacggccgctccaccgcctcctactagacccagtcctagggactgcgcagtcgcagagctccgtccgagtaccggaagcctaggcgccagcacttccgggaagtgacttcgtctccgaagccgattggttgttgctttgctcccgctcgcgtcggtggcgtttttcctgcagcgcgtgcgtgctgcgctactgagcagcgccatggaggactctgaagcactgggcttcgaacacatgggcctcgatccccggctccttcaggtacacgcgagggctggggagccggcttacgggctctgcggggcgcgccatcgctcttcacgccgcttaaaccgcactcctggtctcctaggctgtcaccgatctgggctggtcgcgacctacgctgatccaggagaaggccatcccactggccctagaagggaaggacctcctggctcgggcccgcacgggctccgggaagacggccgcttatgctattccgatgctgcagctgttgctccataggaaggcggtgggtaacgagagagctgaggggaggaaggaggcaagctccaaaagcctgggaagggcggttcccgtttgtctgaggctttctcttggccctgtacccgtgca

SEQ ID NO: 96846 - DNA, 14474 bp, Homo sapiens
tatttggccacattcacagaaagaatattagtcttttgtggaatgctgcgggttgacagtcacagcttggaaaccaacccacagagagctcatcattaatcatggctatcacttgtttaccacctactgtgccaggcctatgctaattactttattagcgtcctctctgccgctcgcaggcctctattattataggtcagtagtattcgatttatttaaattaaatacggaaggtcatagattaagcaagaaagtgccagcaacatggtgcgtgcctctgactgggcactaaccctccaagtcttagttttcccaaccataactggccaatgaacagcagctctggatgcagctaaaggaagactgaagctgtaggtcccgtgctcggcgcagggccccctgcaaggaaggtttcggagggactggatggggtctttgaactatctgtctttccctttactgcagtgggcccaggggcaggccaaagttgctcccgtgattgacttgaacgtgcacgttcctaatccctgacatttctaaagctctggctcattaacgagggaaagacgtgaaccagctgggggagtggggatcgcagtgccccacgtggccgcctcgtgacctcagtggggagcagtggggccggctcccggcttccacctgcatgaggggccctccctcgtgcctgctgatgtaatggacctgccctatgtccaggtatgagaagctcataggtggcaagtacatgggcgagctggtgcggcttgtgctgctcaggctcgtggacgaaaacctgctcttccacggggaggcctccgagcagctgcgcacacgcggagccttcgagacgcgcttcgtgtcgcaggtggagaggtgtgcggaggaggagggtgggtgcaaagggcaggggctggggacgcccgggcactgcagacttggtctcagggcgacgctgagtcccaggcccggggcgcagggatgggaaactagggcctggggcgggattccgggcgtgggcggggcccggggcggggcacagggggcgggggagtgggcggggcccgaggccgggcgctggaggcgagggcggggcagggacgggtccaagggcaggaggctgggacaggacggggatgcaaagggaggggcggggcccgagacggggaggagggggagggcccaaggggaggaggcggggtccggacggggatgccaagagcagggatgggagcgagcctgcgtccgggcactggtccccatccgtgagtcccctcggtgctccctgcccgccgtggccatcctctcacatcactcacaaccccaaggcgcggcatggttgacacccccacgttaggacggagaccctgggcttagttagagggggcagtactaaccagtccctggcggaaacgctttggctgggtgaggtgagcgggatcgcccccatttctccagagaggggtcccggctcagcgagggaaagaggccgccgctggggggacggctggccggggcccctccctggagaacgagaggccgccgctggagggggatggactgtcggagcgacactcagcgaccgccctacctcctcccgccccgcagcgacacgggcgaccgcaagcagatctacaacatcctgagcacgctggggctgcgaccctcgaccaccgactgcgacatcgtgcgccgcgcctgcgagagcgtgtctacgcgcgctgcgcacatgtgctcggcggggctggcgggcgtcatcaaccgcatgcgcgagagccgcagcgaggacgtaatgcgcatcactgtgggcgtggatggctccgtgtacaagctgcaccccaggtgagcccgccccgctctctccctggtaaagtggggcccaaaaagcgcgcgctccaaggttccttgcggttcccaagctccaagatttcgtagtcctcttctcgtcccccttggcctagatttgggggaagggtcgactgcgtgcagggcgcccggtaatgaatgtggaggatgaggtgggaggagggacggcagccctgcttctcttctgcccagcttcaaggagcggttccatgccagcgtgcgcaggctgacgcccagctgcgagatcaccttcatcgagtcggaggagggcagtggccggggcgcggccctggtctcggcggtggcctgtaagaaggcctgtatgctgggccagtgagagcagtggccgcaagcgcagggaggatgccacagccccacagcacccaggctccatggggaagtgctccccacacgtgctcgcagcctggcggggcaggaggcctggccttgtcaggacccaggccgcctgccataccgctggggaacagagcgggcctcttccctcagtttttcggtgggacagccccagggccctaacgggggtgcggcaggagcaggaacagagactctggaagccccccacctttctcgctggaatcaatttcccagaagggagttgctcactcaggactttgatgcatttccacactgtcagagctgttggcctcgcctgggcccaggctctgggaaggggtgccctctggatcctgctgtggcctcacttccctgggaactcatcctgtgtggggaggcagctccaacagcttgaccagacctagacctgggccaaaagggcagccaggggctgctcatcacccagtcctggccattttcttgcctgaggctcaagaggcccagggagcaatgggagggggctccatggaggaggtgtcccaagctttgaatacccccagagaccttttctctcccataccatcactgagtggcttgtgattctgggatggaccctcgcagcaggtgcaagagacagagcccccaagcctctgccccaaggggcccacaaaggggagaagggccagccctacatcttcagctcccatagcgctggctcaggaagaaaccccaagcagcattcagcacaccccaagggacaaccccatcatatgacatgccaccctctccatgcccaacctaagattgtgtgggttttttaattaaaaatgttaaaagttttaaacatggcctgtccactgttctttgacttctgtgcattaggactgtggggacaatctataaagagtctgcgtcacatgcatgaagacacttcagtatctcggcaatgccctccagacagctcctccagccatctgtgccaaggggagtgtgaggagtgacagaccaggctgtaggaacaggaatggggtgtcatgggggatggcagagcagtggacagtacactgcctggcccgggcccctgcttgcctgcccatggaatgtgtgcagagggagtgccaggccaggtgctgctctggagaagtgggggaatgaggctggtcctgctgcaggtcagtctcagcaccgtcctgtccagtcagagtcacttaggtttgccagtgagtaggggcccagatacatgttggatttctaaggtccctccagatgctcctgtcagtggaacgcctatttagagttagccaagcgtaggcataatgccatctttctgcagcataaaatacagtgacatagaaacatatttgtgtgattttcatgcattccttttttgatgagagatattacccagctaattaggaacaactgttttgtttccttcagatcataacccaaagttgtgattttgaaaagtcatgtcccccttcagatttcttgttttctgctacttctcatgtggaattgctttggctcttcttagttctcttgagtctaaattattccttataagttggtgcaagcatctgattattttgttatcattactgttatgctcaagcattcacagagtggaacacattttaatatcaattgctttctatttctcctttatattacagttcaggacattgtattaattattaaaattctattcgtaggtaggttatatgactgaattgaaatagataaaatgaatttcttttctagataacaaaggaggtgtcataaaacacttgttatgggccagtgtgatggctcatgcctataatctcagtgctttgagaggctgaggtggaggattgcttgaggccaggaatttgagaccagcctggggcaacatagcaagaccccatctcttaaaaaaaaaagggtggggcgggggggcactgctgggcgcggtggctcatgcctgtaatcccagcactttgggaagccaaagcaggtggatcaaaaggtcaggagttcgagatcagcctggccaacatggtgaaaccccaactctactaaaaatacaaaaattagccgggcatgatggcgggtgcttataatcccagctactcaggaggctgaggcagaagaattgcttgaacccaggaggcggaggttgcagtgagcagagattgcaccactgcactccagcctgggcaacagagcgaaactctgtctcaaaaatgaattaattaattaaaaaaagaaaaaaaaaacactgggcagggtggtgtgcacctgtagtcccaactactccagaggctgaggcaggaaggagcacttgagcccaggaggttgtctgcagtgagctctactcatgccactgcactccagcctgggtgacagagctcagtggcttacacctgtaatcctagcactttgggaggctgaagcaggcagatcacctaagatcaggagttcgagaccggctggccaacatgataaaaccccgtctttactaaaaataaaataaaataaaaaatatatataaaaattagctgggtgtggtggcacatgcctataatcccagctgcttgggaggctgaggaacaagaatggcttgaacccgggaggcagaggtggcagtgagctgagatcgcgccactgcactccagcctgtgcgagagtgagactctgtctcaaaaaaaaaaaagggaatttaagaaatttaaaagaaaactcttgttatataaaaagggtattgggtctgacagataagagctcctgcactctaccagccagctactgacagacataggtctggctccagtggaggggcagcagccagtgagcccagcctggggtggcccactcctgctgcctccaggatgtcccctgtttccccagcccctctgctgtgccctcggccccagaagctggcgagactgcttctctggaacagcatcacgcaggcctgcccatcggcccactgtgcaccaggccttctggggatacagatgtcaaccaggtggggtgctcaggaggggcacagaagccaggaatgacaaacacatcagccaccaggcaaatgggaaatgtgccccagaagctccctgctgaggatgttagggagagcattctgaagtagtgtggttgagatgaggcttgaggaaggcaaggctccaaacagcagggcagactgggagcaaggtagactgcatgggagggcagctgatggagctccttaaccctctggaattgccccaaagccaagcaaagtgttcttcttggggtcacagctagctcagggatgccttctgccccttggtcagaggggcaaaaggtcagagcctagggtcaccaaaacctctgggaagccccgggggtctcaggccacagaccatcctcagaactacacactgccctcccatgcctggcgggggccctggactggccctcaccagctgtcttcttgcactggccagggttctggctggactggcaaggaggggtggtcagatacaggagtaactggatcccttcatcaggacctagggtggtgagagctttgagcctgctctgctccaggcagacattgtgtctggccctgccaggatggatagacagcaggatgttacacgttgaggacatgaaggtcatcaggaatgtggctggaatctgttaggcctcccccagcccaggcgggggctgccaagtttgggcctatcctctgttcctctccttatttggaccttcaggtgataaggctgagacataaaggaggctgggccctgccaccaygacagcagccacacctctgcagagagaatggtgagtgcctgctggggaagaaaggctagcggtctcccaggtgctggcctttgggctgggggagcagagttttctgtgcttgtgttgggttgagggtggtccccagggagaggaagaggatcctggccctggctctcctgggaatgctctgggactgtgcatgatgggtggggtggggagactctgaggagttggggagaggacccctccctactcacagtgttgcaggccagcaggaaggcggggacccggggcaaggtggcagccaccaagcaggcccaacgtggttcttccaacgtcttttccatgtttgaacaagcccagatacaggagttcaaagaagtgagtgcccactcccagtagcctcagatcccatcctggcccccccaccccaccccacatacataccccccttctaccctgaccttgcctctcacaccacccaggtctctcccccacctcccaccttccctagagctgggggctgctcccacctgaaggcccccatcccacaggccttcagctgtatcgaccagaatcgtgatggcatcatctgcaaggcagacctgagggagacctactcccagctgggtgcgtgcacccacctcccaccctgcgcactggggtccctactctgagctgctgggcgggtgggagtggctggggggacaggactctgctcccctgcttcccctcctccccgtctcctcacactgcccttccccccttgtcacgccttgcttccacttcaccttcccgacccacagctgcctctgcccctccagcccctgtggccaggatggagggagggcggcctgggcccttctgggggacacccagggtccctgtgtgcacctcatgccccacccccaccagggaaggtgagtgtcccagaggaggagctggacgccatgctgcaagagggcaagggccccatcaacttcaccgtcttcctcacgctctttggggagaagctcaatggtgagcctgggacagagctgggcacccttggccaggcagggagcctgcaccctgcctgaaccccacctgaaccctgcctgaaccccacctgaaccttacatgaaccccacctgaaccctaactgaaccccacctggacccacctggactcttcctgsccatgacccattccaagcacatcctctgccccagaatcccatgtgcactggtcaccccagtgctgacttggagccaggaaatgtgccttcagcccccacccccaaattccagtctcccagccaagctgcccgcctcaggaggatgaccattcccagccccactgatccccgagaaacattttatgttagggaatacccccacctcttctgggatgtrggaggctcctcatgcagcccagttcctcctgcgggggacctgggatgctggagacatggatgctcacctggctgcctcggccttccagggacagaccccgaggaagccatcctgagtgccttccgcatgtttgaccccagcggcaaaggggtggtgaacaaggatgagtaagtatgggcccagccagatgaggagcaccgtggtggaagcagagagcggggtgaggcccctagtgaggggggctgcctgtgcttcggggccttacactgctctttggggtgcagccaacccttccctgcgccatgggagcctccgtacycacctwccctgtgcagtcactcccccgcagtctcctgctcagaccctcctcaccccccaggttcaagcagcttctcctgacccaggcagacaagttctctccagctgaggtgaggctgcccagccccttcaatactcatccccagcaccttctctgggccttcacccatgacccagagcccagtaccagtgaggcagttgctggaagggtgagccgagggcccttctggaggaggtgccatctctgttgagacctagagggtaaagatgtggagtcagaaaagagggcagggtgcgccaggcagggagactgtgcacagacctggggggaagtggatagggagaggtttcgtacactcggggtgggcctgtgcctgtggctggaggggcgtcctttgccycttggcccacatttgcactgactcctcactctgcccagagtcagccaagagaaaaacattaacccagagtctggggtctagggttraaaagctaaggcaaaaagcacagatgcagggggcagacagaaaggccacaggactcaggtgaggtctctgccgggctgggccaggagccaggggactgccactcaccagtgtccccygcaggtggagcagatgttcgccctgacacccatggacctggcggggaacatcgactacaagtcactgtgctacatcatcacccatggagacgagaaagaggaatgaggggcagggccaggcccacgggggggcacctcaataaactctgttgcaaaattggaattgctgtggtgtcttgtctgtgacagatgggttggggaccagccaagggggatcccagggtctcagtgcgcacatcaccatgatcatggccaccatctacctcctgggagctggcccctcgccagctcaccttgattcactcccatgatgccaagtgaagtgtgaactatgatcatgcctagtttacagatgaggacactgaggcccagaaagtgtgagcatcttaccaaggccagccctctagaagaggagatggtgggatttacaccacctccaccaagcccaggaatgagccacaaagtgggcactgcccagctacttggggctgtgcagagaagaggctgcttgctgggcactcagcaaactctgcccaacagcccagcgggtgggcagcagccctgggacccccacacccaaccacacagcctcccctggcccactgctcgcaccccatctcaatacactggcttgggtgcctccctgcatgggccctttgtgaaaggcagagaggtacccatttgaaacacaaccagcttctcattgcaaatacaggcaaggcactaagacatgaggaacatggacaccaaagcaggggccaggtaacatgcaaatttctagaggaaatgcccagaacctggcatcatgcctcctgagcccctcatgcgccgtgaggggtaagagggtcagacagctggagtgtagggagacgacttctcaggagagaatagttagtgctcccgtcacccttcatctgagaacccaagagctagaggagaaagtgatcctcatgagtaccagaggagcagcaggggacatccaaagcaccagagagagaaacagagacagagagacaggcagtgacagctcaaacctcagccagatccagagcatacaaagtctcctgcctacaggacagcccagtaagagctctcagcttgcctccttccctccccacaagccctgctgcaatccctgtacctgggggtcagtgggaaggaggtgagcgagaaaggaggggcaccccttcctgaaggccccaagaggaaaggcgttttcacccagacaggtgttcagttttgattttatctggcgcctggcaatttaattactaaattgaaacttgagactttctggaattatggcattttctgttgcttagagagattacaaaagtcacgaactgcctgagtttccatcctgaaagcaggccaccagcccactccactgaccatgctggaacagtggatgaacaaaatcaagtaccattaggattctaccacatgagtctgcttgttcaacaagctgatttcataaagtaagggatcatgttataatccaagctctacaggggtaaattgtgaaagactaaaatgaaccaaaaagatcataggtgtccagttatctgatttgatggggtgtctgaaccttttgttatctttgagctgtttcaaaactctctaaattattattattatttttgagacagagtctctctctgtcacccaggctggagtgcagtggcatgatctcagctcactgcaacctccacctcccaggttcaagtgattctcatgcctcaccctcccaagtagctagtattacagatgggcacaccttgcctggctaatttttgtatttttaatagagacgtggtttcaccatgttagccaggctggtctcgaactcctgacctccgttgatccacctgcctctgcctcccaaagtgctgggattacaggggtgagccaccgtgccctgccacaactctaaattataactaatagcaaggcaatggttcttctctattaacgtgcaaataaatgttgtccagtggaagcacaactgatttttcccttctctgtggaagaagccaattttgcatctattaagcaaattcatctgggcattcctaaccgtctacacatgcaccggctctttgaattcttctctgaaccaggcccaggaataagccacaagatgagcactgcccagctccttgggctgtcacatcttattgattcccacatgaattcacaagtaaataaaatatttggcggttgttcacttagtatgcaagtcaatattttgctttaaaaatattatcctttcacactcctgatatagttgtctgataaggttagtccttcccacaccaaaactgcctgtattagtgttgtttggaataaactgagggtagaatgtatatggtgtgtgtatgtggtgtgtgtgtttgtgtgtgtgtgtgtgtgagagagagagagagacaaaagagagagacagaaggatagagagaaacagatgggcacagacccaggacatgagttcagcctacactgaccaatatgacagccactggccacttgaaatgtggtgtgagttgggatatgccaaaagtgtaaaatgcacacaatattttgaagatttcatacaaaaaagaatgcaaacatctcattaataacttttatatagatcacatgttgaaatgataatgttttggatattagattattactaaaattaatttcacctatttcttttcactttttaaatgtggctactagaatatttagaattccataagtggcttgcatttctggctttcactcctgttggaaagcactgagttagactgtgtagtacgtctatttaagactgcagtttccaggccgaacaccgtggctcacgcctataatcccagcactttgggaggccgaggcgggcagatcacctgaggtcaggagtttgagataagcctggctaacgtggtgaaaccctgtctctactaaaaatacagaaattagccaggtgtggtagtgcatgcctgtagtcccagctactagggaggctgaggcaggagaatctcttgaacccagaaggggaggttgcagtgagccaagatcaagccactgcactccagcctagatgacagagcaagactccatctcaaaaaaaaaaaagtagaataaaaataaataaataaataaagactgcagtttctgggagactctgaggcaggcattagccttctctgcagagagtacttgcagcagggagcagcagttttgatgtcctcaaaaggagccaatttcatttgggtagggttgcctctgagtattctagcagtacagacagaaaggagagaaggctgtttccagaaagcagagatcatacgaattacttgtgagaccaaacttgttcctcaggtgaagctcaggcatcccttatgtggagtgtctaacagtctacacctgaggatgttggacataagggggtgtgaggtgggcatggctggggagagctctgggagggggaaaaccagctccatgttgtccacccactgaaaggaaagctccctctgggggaggtagatgccccctggccaggcctgcagggccctgctcactgtgagccctgtgtggtcctggcctgggtcccaccagccattgccaggcaacagctcccagttggaaaacagagcaaggctccctcttagaaaaaaaaaaaagaaagaaagaaaagaaaagaaatacaacaggtaactaagcatgacggctcacgcctgaaatcccagctacttgggaggccaaggcagaggattgcttgagactgggaggttgaggcagcagtgagccaggattctgcaattgcactccagcctgggtgacaaagtgagaccctagtaaaaaaaaaaaaaatagagacagagaaagaaagacatgcaacagggccaggcgcagtgactcatacctgtgatcccaacactttgggaggcagagaagggaggattgcttaagaccaggagtgcaagaccaacctgggcaacatggcaaaaacccatctcttcaaaaaataaaaaaattagcctgttgtggtggtgcgcacctatagtcccagatattcagggagcttgaaccaggtccaggctgcagtaagccatgatcgtgccactgcactccagcctgggtgacagagcgagaccttgtgagaaagaaaagaaagaagggaaggaaggaaggagggaaggagggaaggagggaggaagggaggaaggaagaatataggacccaaagggcctaaatgcccctactgtgccccagttctgcgtgactcaggaccagcctcctccacactcccaccaccacaaccctgcaccctacttgttcctgggggcccccaaggggagcctcaccagaagcctcctcataaacccactgccccttacctttcctgtctttctagaagcctcagaagccttgccactctaaggacacctccatctgagccaaggcgctcgctccagatgtcccagagctcctggtcctgggtgtccctgccacacaaccccccatggagccctgctctggctcaagccccctgactgtgcatgagcaggcctgttgccctcactgggactgtccagagccttcccatctctctggagggacttccatcagtttctgccccttctcctctgccaagaactcacgttcagtctgatagcagaagaatcatctggcaccctcctgaatggaacccagagtacctcctttgtggaccggtctctggattttccccactctctcccttcagccatgctgatggcagagaaggtaagaacttccagcccacttctctggcgaggggaacttgtcatctgggtctgcagagaaggttccaccttatgctcatagtacattatctttactatgtactaggatatcacatttaaaaggacaaaaaaggccaggcagtggctcatgcttgtaatcctagcactttgggaggctgaggcaggtggattacctgaggccaggagttcaagaccagcctgaccaacatggcgaaaccccatctctattaaaaatacaaaaattagctgggtgtcgtggcatgtgcctacaatcccaactacttgggaggctgaagcaagagaatcacttgaacccaggaggcagaggatgcagtgagctgagatcgtgccactgcacaccagcctgggcgacaaaccgagactccatctcaaaaaataataataataaaatacaacaaaataaaagaacaaaaaaaaagaaatgtaaaatacttgaaggggcttgtataacattaataggattgacagtatctgctttccaggctgaagtgattcattcattattctagacgtctttagtcctttgcaatttgtggtaattaggcttttctttttaacattaaaaatatacaaaaataaaaggcaaaaaaagcatcatcccattagtctgaccttcccctcctccatccctgccccaacaccctgaagaccctggatgcaaacaaaggcccgagggagcctcttccctcgcagtgcaggcctcacctggggctcagagtcagaatctgcattttattccctaggacaacctctagtcagggcagaggccggctgtgctgcccaagtgccctaaccctagctttgaggcaccagaagggcaaatgcaaattaaaaatgagaataagtttattctccttggtgaaaaaaaaaaaaaaagactttcccctctcctttttctttagaaaatctatcattgcaagttccttcctggactttttttatgtagatctgttcaaaagctaaataagcctctttcaagtttcacatcccaggaatgtctccttaaggacctaggagccaccatttgaagtgtaatcaccaagggagatacatccttatctcccagtttccgtgggcaaaggggagcctaactttagcccggtgcctagctcaagttgcaaacacacttccagtcttaaaggaatgaatttattttttttcctttaggcaaacccaggtagccaccacagttacctggggattcacagagaactgtgtgtgaccactggtgctgtcaagtcctcttacctgagcacctgtgacgtttcccttgagaacgtgtacgggatgggttgcacctggttatatacaagcgtgagacttctttctgcctttgtaatttattagcag

SEQ ID NO: 96847 - DNA, 45803 bp, Homo sapiens
ctataatgttgtacccccaagtttgggaacaatgaaatagagaatttggttatatgggagtaatttaggtcatggtggatttaataatttttaaatgtttaaaactgagagtggttaattttaatgatcgactttattgcttttttcccctaacaacgtgagaccattgaaatctatggcacttcctagatttgggtctgttcctttcgcctagcctttccttctgtaaaagacttttgaaatgatggccaaattgcacagctgccaacaaagcatgcttaaaataagtgcttggctatcattatttcacttttcatcatcctacacttttgaatagaagtttttcttttctcagattattccaatctatgaggcaagggccaaggattcagtatgcccttattaaaacaaattaattagaaggccatcaggctgagatggtgtcttgtgtcttacataagcacatggaaacccaacagtggaaggaaacttaaagcaatcagaaactgccaattgacttctaatgagagattgttccaaggagaaaccacccactaacctccggaactttccactctgaccaatcaaatgcttcctttgtcttgcttgtgcaaacacgtcttacaaaatggctttcccacacaccttctaggtggagctcatactgcttgtggtttggtgctgattcatgaattggtctgctccaaaaaacgctatgacttctttttaagatggagtttagtgcttgttgcccaggctggactgcacctccacctctgggttcaagcgattctcctgcctcagcctcccaagtagctgggattacaggcatgcgccaccacacccagctaaattttgtatttttagtagagacagggtttcagcatgttggtcaggacggtcttgatctcctgacctcgtgtgatccaccttcctcggcctcccagcgtgctgggattacaggcatgagccactgcgcccagcctaaaaaaactacaattttaatgcacctgagtttatcttttaacacacttcaccctcaaagttccctgctgtgttttaacattacccaccgcacatttaaaagtgaagctgggctaggctccccacaggagcccattaataggattacacgagagatacaaggaatcaaagtaggtgcaatgttttgaggcaccatcgtcagagataaagacagaagcaaagtcccacaaggtcatggacctggctgagtacaaacctgggacaggtgtcagaaagaggaggcctctgggcatctgactgtgcactctgggcaccatttggccaccagtcctaacaaaggcagtcactgaggactcccgtggcaagcggcacctcctgctcaggctcctcggagttatttgttaaatgaatgtgcaatgcagagacaatcccctgactaattcactgctgatagtggggaaggaaaatccatgagcaaagcagcctgggttcagggaatactgaacaaagctgcgtgggtggagagaaagagcctgaggtcaggcacagtctgcaaagccccccagcgactccgacacagttcagagctaatgcccttgactccgggagacttttgctgtgtctagcaaagcaggatttacaaacgagggtagagaaagaccagtggggaagagtgaagaagcccagcaagaaccaacacagatgatgaggacctgggttacagcaccagcccagggagacaaaatagagggccagggaacagggtaaatgcagcggggcgtcactgtaatcacagagcagagggcaaaggtgataggagtaggcacaggcttcggaaggccctagggaggcctgccaggaggctggggaaggcacctgcctccaggggctgccaccatgccagacgccactccatgctctacatgactagggccccagtgagacgctgccgcccctgcacccaagaacccaagcgccctgggatcagaaggaggcttcagcacagataggaggcaggcaatccttgtcgctaccgtgagccctaaagatgttcctgaaaatgtcctttgccctcctgggggaactggtcaggaccacagctcgtcctgcgtcatggctatccccccaccccagccctgtccccttccaggcagcctgtccttccctccctggtgtttgtgtccaaaagaccccatagattctccataacctgtcttttactcctcaactcaaagggaatgtcttgtcactatatccccagcacaacgccaggtccagaaatcctcactggcacgtaagtcttccttaagtgtttgctgaataaatacatgaaagcgcaccattccctctatcccttccttcacctttcctccctccttgacctgactgtcctgtactcattgttcccagaacagtcagttgctctgggaagagctgtagctctgctgctgccttcaggcctcatggactgtggaaagtccctggacctggctctggtccttgccactcccaaaagaggctctagttccccaaggcagggcccaacctcactccagcgaaacctcacaggtcagcacagggcctgtgtgcacacctgtcaggttgtgtaaggtgctactggctctgcctggccagcgcctcctcaggctcacttttctcctgcctttcataagagtcatccttgtacccacagcctcctctcaccgggtgtggtgttctccgttctctgcagggccctgtgcaaataaagggctccaggacgcttccaggggctgctgggatggtttgtgttcagtgctaaatgctgtttccactctggttctcttccaagtgctcatgacttagatcaagtgactgtttaataaattagttgcttgggtagaatggaaaatgtttatcttttctatttggaaaatgtaaatgtccccaaaccacatagactatgtacacaataacatgtacaactcaaaaaaaaaaatagcctagcaatttaaaaaaaaactatacctgacccagccaatcctcttggagcagcttttaaactattagtataggaagtgggctttcatcccagcagctccttatccaacagcctcagggaagacagcagcatgctgtgcctccgtgttctactctgtatgaatgagctgttcaagttctatcattcaaggtgactctggccctttgggaggctgcattcatttttctgcttgagtgaatgtaggtacaatgaaacatgatgtctcaagttaaaaagcttccacttgggatgtcaggcaaaactttgtaaagtgttcccttgatttccaacaccacagttttgctggcacatgaggctggcagcagtgcacatgaatgacacacagagtacatgtctggatgtgcattcacagcaatgcaaaatagtgctaggtattgtgtactgagcacgcagatgcgccagcaccatgcaagcattttagggagttgcctttgctctaaattcatgtgatcccacaggggggttccatcaccatgcccattctacaggtggggaaaccttgctgcggggcagcttagtaactcatccggggtcatgagtgatgggactaggatagcaccgaatactctgacctgagattgcttttagccataaagaaacagacatacagcttctggtatatttatggaaaagtatatacaaacagcaaagtctgactaatattcaaattgtagcaatggttgatcccattccaaaaaaaaaataaagcaatggtaaagagtttcaggcacacagtactcactaagcctctgatgaatgttgacttgcccttgtttaaagtgcaagtcatcaaagcacactgaggacacagactgcaccagttacagggtaaggtgctggttttcagggaactcaggtaccaaaaactgtgctgggtacaacactggttccaagtagtggagctgtgtactttctcttcgctggaatgcatgacaccaggagaaagaagagaggcttataaacacacactgagttcttcctgtctctctgggaagtgagtgttttaaggtgggaccccaaatcagaaaggttgggtaaactgcccatagtcacacagccagtgagttcaacttccttgggtgtagagacatcctttttaactgtgaagctttccagagcctgaatgaaaacgtttaaaatttaattttgaactttcgacctgtcgtttgctttggctgtgtaaaagccaaaagatacgacctggagagaaccccaacttattagaaggcttgaagatttcagacacagccagttttcaaatattcaaaaaaacaaaaaccttgaaagatttagaagtcatctttaagacttcgtttgtttaaggtttaaggttgctggctttccacccccacaatcctggggtcccttgcataaggtggacatgaaagtctctgaaagtgatcaagcctataaggagaaactgctaggcagttttaggacaccaggtttccagttgcagctgatcacttggctgggagaaaacagctccaccatcaccaaagataccaaaaggggaaccggcagaaaggagtagaaaccagtggccctcaagaccgaccatcagcattagactctaggccaaccccctcccccccgcccccacagtcgtgatctaagggaacaaaatctagtcttcatttttattttacatttttactttttaactctttatttttatatatttaattttgagacagagtctcgctctgtcacccaggctggagggcagtggcgagatctcggctcactgtaacctccgcctctcgggttcaagcgattcttccatctcagactcccgagtaactgggatcacagacaggcgccaccgcgcccggctaaggaaaccaaacctaggaccactgagtggctctttccagatcagtttcatcatgtttttttccatcactcccttccagtcctttgtttcccgccctttccagacgaatcccttctggtttccaaactcccggggccgggggactcggggaagggcacccgtgcagatgggggacgccccgggggatctggcagggagagggcatctgggtgggggaggcttcggggagagggcaccgggcagtgaggggagggtcggagaggacgccgggccgggagtagggtagggggccgggggccggggacgttaccgatgcccgtagtggacgaggaacatggccaggaggatgcagttgggcgcgctgcggagacgcggggcggactcgctggcgtactggtagagcggcagggccagcgagggcagctcctgcaccacccaggcggcccgcgccggcactcggagcctgtggctgggcagcgcgtggcggccgtacactgagttcgtctgacgattgcgcgcgaagaccgcgcagcccacggcgcactgcaggtaggcgagcgcggccagcaggcgctcctccgccacccccgtcgccgttgccatcgccagggctgggcagcgtgctccatgccccagaggccgcggcgggcaacatatagggcggcggcgcgggggcaggaggggcggctaccggaggggcggctaccggagtcccgcactgccgggactctgcagaaagggttctcaagtcaggcttctccggggtagccggggctgtgggtgcggccccgggggcggggcgagcacttgcgcggggagggacctgcaagcgccccacccacgccggggccgcagtaaccccgcgccgctctgcgcacgcgcggcttcaggctgtccgcggagctccttgagcccgcgtgggaaacctgggcgcttcgcgcggagacgcctttgtggctgcttcctggagcatttttttccccttagagctgttcgctgttttccctgtcacgccgcttttctgaaagacgggttgtgcgctttgggcttattcctggacggtccccaaaggtccccgaaaggaccaggcccggacacgtggggccttggtttccggccggaagtcccgggaggtgtagggctagagttctggccgtggcgggccggtttctgmgtgctgcgtgcgcggccgcgtgggctatggggcggcggtcgcggggtcggcggctccagcaacagcagcggccggargacgcggaggatggcgccgagggtggtggaaagcgcggcgaggcggtaggagccgggacccggcgggcgggccaggggctcctcctgggcttcccggacmccgaggcctgcgaggcggcggcgagggggcggytccttgggcctcggggtagacgtctctttccttcctcagggctgggaaggaggctaccccgagatcgtcaaggagaacaagctgttcgagcactactaccaggagctcaagatcgtgcccgagggcgagtggggccagttcatggacgctctcagggagccgctcccggccactttaagaattactggttacaaaaggtagggaggcagtgcctgattttttgggagttggggccaggatgctggaggttaaaggcgacggtgttttcttcgacaagtgttacagtgccagagaaccgtggcgtttcagcggtttggattcaggaagcattgaggtggggagcacagggtccaatgaaatggtcacggaggtattgcaggcgcaaggttagaagacgaaatgaaaatgagatctgaggaagattcggctcctggggaatcttccaggagggaagctgagggtcttaccttttggaacgtaagagaatttatagagaatgcataaaaccccttggttctcccctcctccgcgccccccctccatctttgtagttacatctttctaaatgagtcgcaagtaaaacttaackgtaggatatgcttaggagagaaggmatgcagtgttgctcttagggctcaaacagtgtggattgcttaaattttgaaggcatacagtgtaaaagtagtgactaaagaatgtttactctccatgcaaaagttggttttagttttaaaacacttgcagtcttaaatttaagaagatacaatgtattaacttagttttttagatcagtttgaaacttccttatttttcaatagccacgcaaaagagattctccattgcttaaagaacaaatattttaaggaattggaggacctggaggtggacggtcagaaagttgaagttccacagccactgagttggtaggtaccacagtgcttcatgccgaatatttatttgggatattaatctctatcacttgaattatatttcttggtactgcatttgctgttaaagagcttgggtatactttgcaaacatcctaatgttctagtacctggtgcttttatcaacattatattgctacgcaagttttcatgcgatttgcgatttgcagctttatgagtcactgatttcagccagctcttcctagtacatccagcctcttcctttatgtcaccacttccgccagctcccttttacagcccttgttttctcacatcaaaactgttgcagagtggctgctttgccttcagaaaaaggacagacttagcttgacaacagtctcctggtaggtagtctcttagtgttttccattacagacaggttaccactgtctgctgtcaggttgtctcctggtacttcgcagtacagactgcaccagccaatgtagcatttccgagtctcagcacccaagcgtgctactactctgggagctacctctttcttgacctgtcctggaggtgccttctgggttacctattcctcatggctcggttctagtctcagttgtatgaaggtgatcccttgtgctgatagcatcttgtaaagatgcttggagaactccggaggcgccagtccttcagttaacttacataagtgggaaagtcgttattattaactttgaggtattgagttctcagaaaagtaatgcacgaaaaggtgaattaagccgttttttgtttgtctgtttgtttgtttggagacggagtctcactctgtcgcccaggctggagagcagtggcaccatcttggctcactgcaagctccacctccctggttcacgccattctcttgtctcagcctcccgagtagctgggactacaggtgcccgccaccacgcccggccaatttttttgtatttttagtggagacgggttttyaccttgctagccaggatggtctcatctcctgayctcatgatccgcccacctcggcctcccaaagtgctgggattacaggcgtgagccactgcgccctgccaaattaagcgttttgcatcaacttttgaggttttgactattccagtacgtagtgttatctttcctttttggataacctttagtgttcgcaaatcaaggtcagattttcattaatcatggggtacagatttgcttgtttttctttcattggctatttggattttcattgtccctatcacagataagcatatacattcacaatgaatgctgactggccaaacattaagtcagtattcaaccagtatcaagaccgaatatcaccatcatggaatgtgttgctgggatataggaataaatatgaccaacatcgtgaaaccctatctctactaaaaatacaaaaattagacaggcatggtggcacacgcctgtaatcccagacactagggaggctgaggcatgagaatcgcttgaacccaggaggtggaggttgcagtaagccaagatcatgccactgcactccagcctgggccacagagcgagaccatgtctcaaaaagggaaaaaagaatagatatgccacatcttagatttttaaaagcttgaagggtacagtataggaaaatgatacgggtgctacgttgctgttagtggtcactaattgtccactgtagtgagatcagtggaaaaggtagatgtttttcagcctctagttatggcattgctgagatgaggtaaccttcacgagatcaagcttttcttcctcctggtaactaggttgtagactttgctcaagtcgtttggtttgaagatttgattgacgacactgattgtgttgtacttgaagtagaggtctgatactgtagtagtccattttcacactgttataaggacatacctgagtaatgtatagataaaggaaataggcttaattgactcacatttccacatcgccggggaggcctcaggaagcttaaaatcatggcggaagatctctctgcacagggtggcaggagagagaatgagtgctgagcaaaggaagaagcccctaataaaccatyagatctccccctgagaacgaactcactgttgtgagaacaacatgagggaaacggcccggggatttaattatctccacctcgtcctgcccttgacacgtggggaatattacaattcaaggtgaaattggggtgggaacacagagccaaaccatctaaaatattttaagaagacaggattacgattctcctcgggcatgtttgtatttttagcagtgatgcatgtatgtgctgcttcacacaatcacctggaaacatttgtttctaaaaccttgtgtttagaagcgcagagacgggataagaaatgcttttaagatgaagaagttcctgtccaggaggaacgtttcagcatgtgtctatagggaagaggtgtgctcttaaggcacctccatgtgggcattttcttctgcaggctccaacaaactaggagaaaccatacgatgtcaataaggcttgctagttttttattattctctgcaaactacagttacacttggatttgatcagcccttttaacatttcatagctgcttttccaccttgtttaacaatgtgtctgggtatatgacaaggtaattaccaaactcttagaatctgcaggttgtctgtagttgaagaatgaaggtgaattgctctctgccaacagccagctatgtttttgtttgctttaattttctgaacacacagctgaagggtatgaacaaaacattgtagatctgggtttctaatatttggctttttccattatcaatgatggtttctctatattttattttgagacagggtctcactctgtcacccaggctggagtgcagtgatgtcatgacggttcactgcagccttgacctcctaggctcaagtgatcctcccacctcagcctcctgagtagctcggactacaggtgcatgccaccacgcctggctaattttttttatttttttgtagagatggagtttcaccttgttgcccaggctggtcttgcattccagggctcaagcaatcttcctgccttggtttcccaaagtgctgggattacagacatgagccaccattcctggccaatgccagtttcttggcagctgtattctctaaacatttatttattcaaattcatctgtcagttttagggtactaaatctctcagcaagcaagtaaagcagaagctttccaggacttctggtaattttctgtattgctcaagatgcaggaatagatcatgtaatattcttcccaatcctctggtacatagtgaaatataatttaggaaaacgttttttgaaattacattttctagaaggaaagttatgtataggaccatagcttgggccagtttcatttttttcttactttccatagactcagaacaatgagaaattatcctaaagcattcttatagaagcattgttttgacaaccaattgttcagagtgcaccttattatcattctatttatgtgctgtttacttatatwtttttttgagacaaggtctctgttgcccaggttggagtgcagtggcatgatctcagctcactgcaacctccacctcctgggctcaggtgatcctcccacctcagcgtcccaggtagctgggattacatgcccccatcaccatacccagctattttttctattttttgtacagttggggttttgccatgttggacaggctagtcttgaactcctgacctcaagtgatccgcccaccttggtctcccaaagtgctggtgttacaggcatgagccactgcacctcrcctgttacgtgctttttaatgtctagattgaggatggtttgtcatagatgttgtatatatttacagagtccttaccacttgagaatttttaatatgcaaagatgacagtggtccttttaacttatcctctaaaaagcccaaataggattttttcttaaaagacacaagctaaatttgaagtaagtaactaaaaattaaatatacctctcattttgtttgatgttaaaatctacaaagatttaataaacattttttggttcataaaaagatgatgctgttcctaaagctgtataagaaacataatttaaaaacatttcttgtagaaacagggcctcgctttgttgcccaggctgttctctgtacccagaggaaataaacatttatctgttagtttctgtttgtatttaaatatttcagagttcctaaatgtttctttacatgagatcaacagccttcacaattataaatactgtagaattttaatcttgtaatagtacgtttacattttgactatcagaaatttgacgaaaaaracatataaggctatatttgttcaaagtatatctagactgcttatctatatttgaaaatgaaaattcagctctttacaataagtctaaatggcatgtggtgttcatattgatgtcttagtgatttggtaaggcaataacttacatgatcgtactagctttgagacagacaagttcaggaagaccagatactatatgagctggcatttggctgtttgcaagtagaggttacagtggcacagcagatatttgcccaatactatagcaaatgccaaatttgcatgtaacctactatttcgcctctaatgagtccaaaagattatttaaaacaattctttttaaaattgccttatgaatatgattttcttttggctttatatttttgaacacattaaatgtcgaggagggaactgggctatatgagatagaatcaaagcgctggggacctttggagggtggccgtggacagattcagccagtttcgtcttcattatttggtagaaaatgcttttcaggtatattttgtaatattttgacttgagcagtgtcgggcttttaagtcctgagtttgtttccatcaaaaaatcagagtttaaaagcagtcaaatgtgtttgtgttttccagacattccagttttattttcatggttttcactctagctacaatttgacgcatggaaacattgtgagcctgcattgttaaattgagtgtattactgcatctcaggtttagtgagaattgctgaaactacactaagatttatggccgtgtgacgtggtacacttggtttggcattggattgagcatggtgctgcatgacatcagtgtgctcatttgtacggtgcagatgcctgtataggtgcaggccaagtttcaaagcacatcctgggtggggtacagtggctcatgcctgtaatcccaacactttgggagactgatgcggccggatcactcgaggccaggagttcgagaccaagctggccaacacggcaaaaccacatctctactgaaaatacacgtctgtaatcccagctactcaggtggctgactgaggcatgagaattacttgaatccaggaggcagaagtcacagtgagctgagattacaccactacactccagcctaggtgacagtgagactgtctcaaaaaaaaaaaggcagtgtttttagtatcccccatttctcccctaattaaaaaaaataaaaaaaataaaaataacattgatgtcatcatttatagaaagttcaaatatattcacagatatgatggcaggaaatgctttattcttagttatatataggtaacagcctaggagctcaagttaatgcattagtggtttccaaggtaggatttttttggtatgtaaaatattttagtgcattattgaactggtgttagaaataatgaaaaatatattttttaaaaaactaatcaggtatttgtgggacactctgacactgcattattttgattctgtgtgatctgcacattaagtaagtcatcttgtatcttttttttctgatgaccttaccattgttaccttataatggtgaagagyagaggagtgtccgctttttcatctgatctcgagcgtttcatcattataattttacagtaatatgcataatcttgtaacccccatggctctcctgtttctgattgggccacggtgtagctagagccatgttccttaagcctacagcgacatctctgagtgttgctgactgtccgtagaggattgtgaataggagcagggagaacaacattcgaagtctcatttggcatgcgactgatagaagcacaaagttgtcaacagacgactttagtatttataatccataaatgttttgctttctttttggtcaggtatcctgaagaacttgcctggcacacaaatttaagtcgaaaaatcttgagaaaatcgccacacttggaaaagtttcatcagtttctagttagtgaaacagaatctgtaagttgatttctttagacttgctagtttccttaaagctgtaaatgcatagatgtagtgtagttctgtttttaggttcttgtcactagaagcagtaggtggacatcacacacagtaaagacaactgcagtgtgtgcaccacctgtgatttctgattatttgtatatccgttgccttgtttggtttatctagtcatgaaatttagtaaggatatcgatgccagctagttaatttcttgtttcctcttgcttgtgtatttggatggctatagggttggggtgagcactgcactctcatttccttcttaggtacacatttcagatgcctgttgtacataaaaagtagtatgtttttaaggccatcttggtagggaataggtttttggttctgttttttaaaattgatttattttactaaaaatgaagcttttgattttactttttactgtgttttttttttttcttaccacacattgctcttggtaaccacaaaacacctaagcaccacaaaacccctaagcacagctttggtcctcacaggacggcatctgtcttcacattctccgtagccacccacattccttgagtgcagttaaggtgctgagctttttacctttagcatcagagcatccccagcaaaacagctatttgcttatgtactaaataattcaatgaatgcccataaagtttgggtattttttttggaattcttagtctcacatttaaaatcagaggtttcgtccttcctaaactactaccttctagtaaatctgtgtgtcaccagattatggttctttttcactttggccttctgtcatctaagtaaccgactaaactgggcttgtgtctgcctggcttttccttcctgaatagtaacaagaaccaggaactaagtgctgccacataaccccatttcgtacttgagaccagtgcacgaaaggattctcttgctcaactttcaatctagatggaaggccaaatagagatcagtaagctgctagagaacagctcaggtttgcacttggaagagagcgtggggtttgtggggtgtgatacacatggataggttggaagagccaggttttggcatgtttggaagatggaggagatgggagtttagggtgggtagcaaatgttgtagggaactagtataggtttttgattaggagtcagcgtgatgagagctcttgagatgaatggcaataacctctgggttatggaaagctggccacaaaacatctacacagggtggtcatgaatctggttactgtctgccgggatgtccccatcttacttaatgctttaatcaaaaccttggatggatacagaaggcaggcatatcaggatcacacgtataactcaaaagcttggaatcagtgtgcctagtgagtgaatcaccacagactcatgctggccagaaacccatgaggtgaaaattagcagccatcagtgtaaaagcctgtatttaaggctcttgacagtcacatgcctgagtttaaggtgagtgatggatgcctgggtggctgttcatttccagaagtcccagcttttgtagggttgtgttggagcagaagcctcagcttcaaggcgattaaagtagaggtgtggttgaggctagtgctgggcagggcaggaggattttgtctgcacctgaatagttctgccttgtaacagatgtcctggccgactagagaagacagagggcagggagtgtggtgaggaattttagatattgaaggtctaaagatggaaagatggaagcagtggttgatgtcttcatctctttgaaaggtagttatgagaaatagaaagtgggcatgggctatgtctgaaaatagtggaggactaagaaatagaattttaggcaagaaggaaaaaccatttgacagtcactttctgtcctaagttgatgctgtctgttgaaggtatttgtttaaatatttaatagcatttctgtctttgagagctgcccctctagcttctgtgctctactgctatggggagttggggctctgtaagcttcaagtcccttttctttcatggaagttggtattatacctgaatttctaatatttgaatggtatagcaaccatttgtccgctagtgtacagatccatctcatttagtgttctgtgtgatagtatgagttctctcattctgtataagattatgtgctgttttcctgttgcctttgaaacaatgccaaagattgaaattgtctgcggttttttttttttttcctaattgttgctgattttttttttttcctcaagggaaatattagtcgtcaagaagctgttagcatgatcccaccactgctcctcaacgtgcggcctcatcataaggtagcatatagcaactagaaacgtgggggcgggcagcttgttaccagtgtcatgcctgtttgttttgatgaaaccattttttyttaatataattagtcctttttttcttcttttcactttggatagagagtgatatgtacgtatcttagtttcttttttttttttttttcttttttgtcctacttaatttttatggtttagaaaattttctcccctttagttttactgatttgtttaccatrtggattgtcttcagtgatggtgattggctaaattaggttgaaaatgatagtgaacatgtattgagagctcattgtatggcaagcattactctgtgctcttttttcttttcttttttttttttttgagatggagtttcactcttgttgtccaggctggagtgcagtggcgcgatcttggctcactgcaacctccgcctcctgagttcaggcaattctcctgcctcagtctcccaagtagccgggattacaggtgcgcaccaccacaccctgctaattttgtatttttagtagagayggggtttctccatgttggtcaggctggtctcgaactcccgacctcaggcgatccgcctgccttggccttccaaagtgctgggattacaggtgtgagccactgtgcctggccttgctctgtgttttttaggtgaattagttggctttatcattcacacaaccctctaagggcagatactgtcaccatctccatttttccagatgaggaaaaggaagcaaggagaagtacttgaactgaggttacggagctgttaactggctgagctgagatttgagtctaggtagctctgttccttagcattatgttttcatgattcttacttgttcatctctatatttagtctctctggcttacagtttcattctcctcccatcctctttggagactgtacctatatcattctgtgattttggggcagtgtagaatccctaaaagtaaattatgtcatgctatagactctgtaaagaagtatatttagatcttggactagaaattgaaaaactagaattgctttaaattaaatgtagaatatttggttttttaaaaacatgaaacagtttcttgctttgttaatagatcttagatatgtgtgcagcacctggctcaaagaccacacagttaattgaaatgctacatgccgacatgaatgtcccctttccaggtatgcattggacttgtgttcaaaatggtaggaatgccactttggcagattgtagacaaggaaaagactctaactttgcctgctaatttggctctaaagtctcctatgacamgcagttgggttttccgtctaccggaagtagaactggacatcttgcctaccaccgtcagtagtactcaaacaaacacactcataccatgggggagctttattttagaattatgtgtgttttctataaaaacgaatggcatttctttttttttttttttgagatggagtctcactctgttgcccaggctggagtgcagtggcgtgatgttggctcactgcaagttccacctcctgggttcacgccattctcctgcctcagcctctcgagtagctgggactacaggtgcccgccaccatgcccgggtaattttttgtatttttagtagagacggggtttcaccatgttagccaggatggtctcgatctcctgacctcgtgatccgcccgccttggcctcccaaagtgctgggattacaggtgtgagccaccacgcccggctgcagatggtgtttctttatcaagcctacttacagaagatagatttcactgtttgaatttttagtaacaatttcccctttcccccacctttgttcattattattactattattattattattattacttactgccttacatgaagggtagtagtgtgtagttaaaagctaccatcagactccctgggttcaaatcctaatcggcaagttacttacagtgttagacatcccatgtgaaatgggacgaatcagtatgtagcttgcgaggtgctcaggaaatgttagctgttatagtgacaccacgcccctttctcttaagtggaaacaaatacccatcgtgatgttttagagtcagctttcatckcgtcctayctttgttcaggcaaacttctctagttctgttttaataggcatatttgttaggtctgttttttgaaatcctcttttttacattgtttaaagataatgccttggctaaaaagcctgcttcacttttccctgtttttagttgttttctccacattggcagtaaagagccttggcgtcccagyagcagcaggttctcctttttgtattgtggatgttttgcatttcatactgttgtgaagagtggctttgatcatacatgttgttggtatatttgcctttttgctgggggtgtgagaagaaccagagatgagcagaggtacacccagtagacttcccagcctgcagagcctcccgggaagagcttccgtkttcaggtgcttggggccccaccctaggagcctgactcacagtcagagcagggtcccggcttgtgttcaggattttgaaacatttgtaaggtgattttgttgtttctacacctttctcctcatcttttttttttgtagttaatcgttactaataacagaaaagacatttttggcatggtaattggcacaaagtgaataattgttgaatagatgacttttgaggctttcaaaattcgagtgtccataaaatccatccagagccacctggttcctttttttgaaccacttaacgtaattctggaaaaccttgactgtgggtcttaagtttggtggattgctgcttctcactggctgacctttggaggtcgcatatttcaggatgtgaytccacttaggctccatttcacctgacactgcaattctgtgccttcagagggatttgttattgcgaatgatgtggacaacaagcgctgctacctgctcgtccatcaagccaagaggctgagcagcccctgcatcatggtggtcaaccatgatgcctccagcatacccaggctccagatagatgtggacggcaggaaagagatcctcttctatgatcgaattttatgtgatgtcccttgcaggtatttatcttattggccaaaaagcccaaatccactaaagaaatcaagtcaaatagagactaaaatgaagtygtgcatgaatatgacacaattgtacataagtcttggggtgcggagaaagatagcrtgagcctaaaccaaaagatggacacgtagatacgtcttaatgagaagcagcacagcagatgctggataaagaacagaaaggggtggttgcaatagcctgcagaaagataaagagaaaacaaaacaaaacagagaaaatacgtaagaggaaaatagaatcgtagactctyattgtggtgtgttttaggatgttattgcttggaacaatttgtgcaccccaactattttgtattagttcttccagtgagtacagtatataaaaaactttgtcataaaataatacgtaatcacattggattttatgttatttagttgaatgaaagaaatttcggagttcaagcccttaagaaattcattttrcttgtgtttttatacctttcttgagataatacatcaacattttagatatttagagtttagatataaaataatactcatggtataactgagtaacaagtttttttaaaaggaaagaaacaaaactaaagacatcatctgttccgttcccataggaggtgcacggatgatgatcccaggtgataatgacttctgaatgacataagtttgtcaagaccagaattcaaaagctgccacaaaacttgttagcacagaatgcaagctttagatacgataccacattatggaagaatgccattttgtttcagtaagtggcagagttactgctcatggcaaaactcagtatgaaacttgcagctggtggctctgaatatagctgagtgttaaaataatctggaaaaagccctctttaaagtaaaatttaaaatacatcatgaactaaagtttttttttcctctaggttgcaatttttcagtattccttggggtctcatgttttcctacccctgttttttgatcagaaagataactcgttccttgtatcatattctgagatctgagaacgcagtgaccttatgagcaagaggttgcaagctggggaaatttctgaaattgtggtgggatttctaccatgcaaacaactagtgtacagccaggaatgccattgcaaagtggggattacatctcatgggataattccatcctgcagacctagtccctcgtgtacacgcggctagaccatcaaggaaaatcagcatttacagagaaagccaacaaaaacaggcgttaccttctgggaaaacagggcagataaaattagacacagaaagtaacaaatccagtctttactataaaatatacatggaaagagcttccattaacaaaaacatgaaaataacttccattaaataaaagtagaaagtcagaaatttaacggtgattgtaagaaaaatttagctattagtaagaaaaatttagctrttatattagcttaattgaaattactatggaaaatttattagtcattattcatrtaattctgattaaaatgccattgttgattaactgagtttttcaatagtattttaggttctgaaaaacatgaaaataacttccattaaataaaagtagaaagtcagaaatgtttacctgtgattgtaggaaaaatttagctaatatattagcttaactgtggaaaatttcttattagtcattattcatgtaattctgattaaagtgtcattgttgattaactgagattttcaatagtattttaggttctgtgtcctaggtctgcaaattagtcttgctagtgttttttccaaatggaagcacattaatatctccttagtgaatggagtttactgttcaaatccattattttctgcttgaaaattgaagtataatttaaaagtataatacattagaaaatccctaaaacaaaagctgaaagcagattgcagttggtgaaaatggagattgtttcctaactgatatttgtaacacttgttttgtaacttagcttgtatgtgacatatctgttaaagtgyrgtcatccacctgtagggagctttgcactcataaatatcttttttccagtggagacggcactatgagaaaaaacattgatgtttggaaaaagtggaccaccttaaatagcttgcagctacatgggtaagtaaaacttcatcactgctaacactgtgtgacaagtagatcagcagagatttattgttatgcaagtgagcatccgatctttaattagagagctgtaagcatcagaggatggtcaatggccaccttcaactgttttatcagaagttatttgaaaacctttcaagagcaataactgcaaattgtatacatttcagataacacgtttattaaaaatgccttctataaaaatttcttgcaacacttcagatatgtatttttccatgaaatgaccgtttacctcttgatgtatgcattactaatcttttctctctgtttttgttcttttgtatcatcgttttgctaagagacattttgatctcttagaaatatttttcggttggctttttatgatggggaactattcattaaagaacaattggaaaattcttaaagagaaatctcataacacgatgatcacgtctgttaatgtttggtgtgttgtattgtttttctgtttacagggattttttaagtactttttccaaatacttttgatcatgctgtctgtagagcagtgtattctttttttcatttgacatracaaatgccatggtcttgcatgcaggactgtactgtgcctgagccacagaatactaattagcatccaccacaaccaactatagcaggaggcctcgtctccataaaatactgtctactgttttgtgacacagagacaagagttaggactggaatgtatgataccaatttttcatagaaaaaccacatatttaggaagtatggaggttttttaaatagtgaaatttcatctaatacattgaattctgttgttactgaactttatactctgctggttgacatattgggaaaggttaacagagcagtaagaatatttatataatacattttttttattaacatgaaacactttatataagtttactctaacttcatttagatccctggaaggttttttttaagtataattgtgttataaaagcttgtaatgaatatgtgacataaggaggtgcttctaatatgtgcacttcatkgatacatttggccttgcagtcatctgatatctccccttagcttacagctgcggattgcaacacgcggggctgaacagctggctgaaggtggaaggatggtgtattccacgtgttcactaaaccctattgaggatgaagcagtcatagcatctttactggaaaaaagtgaaggtaagcacgcttgatggatcttttattaacagcatagggggcttttcatatgtgtatggtacaatacacataacgtgaggtttaccatcttaatcatttttgagcctgcagttcagtcccgttaggtatattcccattgttaatcaccaccaccatccatctccagaaatcttcaccttgcaaaactgaaactctgaactcctttaaacagtagctcccatctctctcttccctgcccctcacaccaccgttctattttttgtctgtatgactttgactactctagacctcacagaagcggaatcatactgtatttgtcttttcgtgactggcttatttaacttactgcagcgtccttgaggctcacttgtgttgttgtctgtgtcaaaattgcattgcttattaaggctgaacactattctgttgtttatrtaaaccgcattttgtttacccatccatctgttgatggacatctgggtttcttccactttttggctgttgtgagccatgctgctgtgagcatggtatacaaatacctctccaagatcctggttacgattctytggatatacactcagaagttgaatggctggatcatatgatcayatagtaattctgtgtttaattttggggggaccccaccatgctttttttcacagtggctgcgtcattttgtatttctacccccagtgcacaagggttccaatttctctacacattcagggacacttattayctggggctctttgttgttagtagccatcctaatgggtgtgaggtcacctcatacagttttatactgaggaactgacagatagtacagaatattctgaaacagtagtgtatttctacagtgtattgatataaaatatttctccttttatgttttgccagaatgttaacttttcccatcatattttccttagagccaataatgagaaatttcaaacttagcatgtttcctgcacccacgtgtgtgaagtcagttggtgcatagtcagtgagagaggcctttcctgggcagtgcccacctgctgctgtccttccagtgaggctccccttggcggctggctggtctgggttgtgccctcagccctgcggttgttgatgccttcacggtcctttaagctggaatgtaatgttgtgtttattttcctgtgctcatgtagacctctgtaaagatgtcatttctgggtgatgttttcttgcatggtcataattgccatggtgttggtgatactttattccaaaaggtgtgtgagggggagtatggggcacataatagtttagttgtartgaaattacaccttcaagtgtgatttggggtcagttgttaggactgttgaatcctgctcagatttttgtgttcattagctaggaatttaggaaaccatgattccaggcagcttgagcagcacagacacctcctgtttcccttgccacagtctgcyttcagatccctgagaaagaaaatggactgcatttattaatttgcatgcctagttgccatttacgactcagacttgagggtgggccccagttcctgggcgcactcactgcattcttggctggtgctctttgtcttttgtaaagacagcttcccccggtttctcggtgagcagctttcttgacttggggtgagtggtcacagccccatcttgtgctgcttagcttcaaatgtttgtagattctttaagcatttgctactctcctaagtctgtgttggctagttaagtactctaggtgkttaattttgctcctttttctcttgtaagcttktggctgggaccaaaagccaggtctcctgagttcttaggtgagagaggctcttgtccacacaagcctgtcctcactcgtggctggagtcacyctttgyaggcaggacttgctggcctgagtccaccgggctttctttcctcacattggagatacttgctgtttgcctgtctcattaccgcaaaattgtccccgctcagagaacatgctgtgtgctctgtgggctggctgtgctgtcagaccgggttacttgcctggagctctggatgcttctgccaccctcacccatttcctgaacrtgccaacgtttgaaggagtggcttcgtgaggggttgtcatctgaaagcaggttgaatccaagttctagttctcattcccatgggtctctctttccagcagcagtgggggagcatcattctcctgaaaacccactgatctctaagggaagagtggacagaacctcacacacagtgcaccatgttcgaaagttaagaatgagcaagcgtgacccaggcacgggggagtgaggaagagctgcagggtgaaaaagaaaacgggaatgctggtgatcaggattgtgaggagggatgagcagatgtgggattgtcctggggtactgatgggttcgtcttcatccggtctgaaacctttyttgattgtggattttcattggtctttctgattttcagactggctggctggttctttttcttgtatttagaatgttactgctggttttytgagtgaacgcttgcagatcttttcagacttcaccaaatttgtggctctagttggctttatgtctgtctatatgtgtgtttgtgaggtgggagggtttttttttttttttttttttttttccgagacagtctcgctctgttgcccaggctggagtgcagtggcgccatctcggctcactgcaacctccatctcccgggttaagtgattctcctgcctcagcctcccgagtagctgggactacaggcatgtgccaccacgcccagccaatttttgtatttttagtagagacggggtttcaccatgttggccaggctggtctcaaactcctgacttcaggcagtcttcccacctcggcctcccaaagtgctgggattacaggtgtgagccaccatgcctggcctggcaggctttcttttgaaagcccagtaaataacaccctctttccctgtccagcttctgaaccaattgacaaggtaatggagcaaggcagaccaaggccaraatcgcacctttattaccaatagagcagatgatatgctttcagatacttacctttaaaatgaggcttatctcctcattgtcacaggtcacagaaggtgttagactatggcatgcagttgagctttgttctaagggcaagcttcactgcaagacaagaaaggagacagtatgctcaggttctttattcaaattttggaatcattttagctttctgagatgccaggggagataccttgggggtggagggagttcttggtcaggggctggcttctgcctccacataggagatttcaaagaacagccagcaccrtttggccagtgggttttaagtataagggcattcatatttagaaaaaaagtacatggattcttttccttcaagtaactgcattgctttttgcaacttttyctctagtcttcactgtgttgaatagttttgattgtgttgtgtatatcttaaataccctgctttttcacctaacattccaatatgtcatagtagtttttcctgttagcaagtgtcaaaaatgaattacttcattcagtgagtctcctattctgtagtcattttcttactggacaggtgggtttccagcatggacctgtgtacagtatgatgtcacagccaactttttgcatgtgggtggcttcagaccgtattgtagatgsttcctccctttyctctgtcagaggcggtgtgcatggatatggctttatgcaggaaggagcagaccttggctgagccttagagtgggtggttgctggtgattttgactggagggggtgtgcgttccccacctgaaagtgctcaacaactttactggagaaggggcaacatggggtagcattggcagcttccaacccaggtgctggggtgtggagataacacctgctgcctgccctgctcatctgtgaagcccctggacagtgtttgatggagaagcccgcatgtttgcctgcactgtcatttactgttagcttttaaaaggaagaggattcagaaatgatggcagaagtcagtacgatgcttgcttcaaaggtttcttactgccattcctccaccttggagattcttttcctttgtttttgtaattgtcccattttcatgttttctgggagatttgttgaattttcctctgctgagaggctgtcacatcagtatctgtgctagtagctggtctcactggtttcctgtaatggcctcaccttatagcttcttattgtgtcactggtatggacacttaaggccagtgtgttttcacagctcttatcgcattgtttttaaaactgggctgactgtgtcccgatgggcaattttaggaaacttcctgggaccacgaacttgaggtttaaaaattcccayagttcattttcagcattgctctgggatgtttgttagacatgcctgcgtgaagacctgcagcatcgccctggtgtgcattggaatggggagayggagcaggcgtcctgcagcccagccttctggttgtcttcttgcggagttagtctcgcgtctgtggcaggactcctcaatgccctgtcattggaacaactttattgagctgtcgtttacatattgttaaygtttgctcattttaagtgtacggttcagtgatttttagtaagtttactcagttggcagcgccttaccacagtcyagctttaggccgttcccgtcaccctagcagacctttcctgcccaacagcacttgctccccattccagctgagccccatcggccactcatccaccccgtcrgccactcatccactttctgtygacgggtttgccttccctggrcattttctgtacatggaatcatataatatgtgatctgtgtctgktttttttcactgagcayagtrtgttaatacttttttgaaaaacaaaagacgtccatgcttttgctgcacaggtgctttggagcttgctgatgtgtctaatgaactgccagggctgaagtggatgcctggaatcacacagtggaaggtaacctttcctcgagaactttcattctaaagagtaggtgcagcatcactgaagtagagtcaagtttcaaagcattcacgtgtgagtaacttgaataaatactacatctggttatgccaattagaatcaatttcggagtgttatttcatgacacatttcatgacaagtggcatgtttattcctggcagtggaaaagtttttttttctccacgtacagaaataaactcttttactctcatccctgtaagggtagctttgctttttttttttttttttaaattgggccgggattcaagccttgtttccaatatgaagtaattcattacaattttaggccagaaacagcctgaggcttgtttaaaaagaaaaaaactagatggaaaatgttattttataatgcttgtcctggtttttaraataaatgtatttcatctttgtttttaacagaatttatgtattaataatttggggattttctgtaaagattgttttgttttgtcttggcaaataatcttcctatctttggagtgaatgaraatcaccatttgtcacctttgagagaatggatactcctgccctgtgatttttgttggtattggatagtgctagtaatctggaatgtwccctgtggttctgcaggtaatgacgaaagatgggcagtggtttacagactgggacgctgttcctcacagcagacacacccagatccgacctaccatgttccctccgaaggacccagaaaagctgcaggccatgcacctggagcgatggtgagctggtggggcctccaggtgtggggaggggggaaggttaagccccatccctggtgagctggtgagtcttgttggggtgagttggaggcagcaggtgacattgctgtgaggcttgggttatgccagggtcaaccccatgtgtgtgaacttcccrgccagtatggctcttgtgcctgttgctggcattgagcatttattaatagtgaaattggctagaatctaaatggtaatgcttagggtacttcatgaactttttttttttttttttgagagagagtmtcactctgtcatccaggctggagtgtagtagctcgatctcggctcactgcaacctctgcctcctgggttcaagcaattctcgtgcctcagcctcccaagtagctgggattacaggtgcatgcctggctaatttttgtatttttattagtagagacagggtttcaccacgttggccaggctggtgttgaactcccaacctcaggttatctgcccacctcggcctcccaaagtgctgggattacaggcatgagccactgtgcccagccgtcatgaactttttaaagattacaaagtgggccaggtgcagtggcccaatcctgtaatccccagcactttgggaggccaaggctgatggatcacttgagctcaaaagtttgagaccagcctggacgacatggcaagaccccatctctacagaaaaaaaaaaagaaaaatacaaaaactggccaggcagtgtgttgcatgcctgtagtcccagctccttgggaggctgaggcaggaggatctcctgagcccaggaggyggaggctacagtgrgttgagatcacrccactgcactccagcctaggcaacagatccagaccttgactcaaaaaaaaaaaaaaaatttaagtttacatattggccattctatgagtgagggtcgaagacatgatttttctcttgtatcatctttgcggtatttgtcttaatagtaaaagaatgcatttttgattagttcagaggtgtgaattatatatatatatttagccttaggatattaccccatcatcagaatactggagggttttttgtggcagtattggtgaaaaaatcttcaatgccgtggaataaacgtcagccaaaggtgagtttttctttttccaaaatgacataacatttgatcttgtacatttaagacaaaaactaaccggagtttagtagaagtacagaggaaagaggagcttcttgctgtgggcagcaggagagctgaccctgaatgagggggaatttcatttaaatatcaagttttccaaaaagcagaaatttctcataggtgataggtaagtggagaagtcagtgtttgggggaatgtattcctgccacactgtaaatccagttatttaataaaaattgaaaagacatgaaagattgctctgtggctctcaattggaagccccaggtttctgtgctctagttccttgtgagtggttcatttcaccaattacagatagcagagctctgctgaccccaagccagcccgggttcaccttggctgcaaggaatgatgacggccttgtccagacctggctagaaagatgcagcccggcctgtttgctatggatctaaactgcctgctggttcctttccaaggcaggccaggaaacagtggtgaaggagtgttgccctcatcctaacacgcagtcctttgtaatgcgtgctgtctcacctgtatcacgccagcattatttattagttcataaatcagccttccatgatgaaagaacctggcctggaatcaaagtctggaagtctgtatttctttaagatccatgcttgaaaattaggacaaaaaacgcttagctttggaggaacaaaaaggaaacagttccgcaaagagctccagcctttttctggggcacggtttgtgcagtttaacgttggaacgtacagcctcagacgggcaaagggggygactgcacttctgccgccaccagdgtttttctgtcaggttagaaagtatttcactttgaggctaaaagtctcacaaggtatcttaasrctgatggaatgttattttcatggaatcagtataagaaattatattgtaaagtattagatactttgcrttcattcatactaggtttcagtagcttgtgttttagactttgcgcttgtcacattttaagtggtcagtgaccacaggctygtggctgcccagctgcagagcacagtgcagtcacagaggagcctgtcttagagacgcgtgctttaggttggcctgcattagggcttacattgatgtttctgacgtgttaatacttacatagaaaggttttgacattttttcaattagccccttatgtatagtcttactttttagaacaacttattgtcattttctcgtttaaataatatgaatacttctctctttctgttactatgtcagtttcttattcacttagttcaacagatctagtgctagcatggcctgtgctgctgttggtcctactgggaacgcaggtagagtctccatggtcaggatgccgtgwtctgttgtggtgctgaggcctgtaagcacttggctagaagttaggccagggaagctcacactgaccttggtatttgaaggtcccagaatgaggttgttgaggtagaacagagatgggagaacatgcccttggagctggactcaacaagaaggcccctctgggggaagctgagkttggacaggaagggcgtgtkccctcactgacttgctcacaggcttggggttcatctgttttggtttttgcttttttacattatattaacatggaaataaaaggtgttccctgggatgctcccggcttctctgctcagtagctttgtggctctgagtaaaatgaacttgcctgtgttgaaatatcctaatttttaaacttacttcatagggrctgaggaattacgacttttatcaattttgtgacctgttaaaatgttaaaaaggacatgtattttttaaagatctttaagtaaaacattttgctcattcccaaagccaaatttaaattataccatggccctaattcagaagttcattctttggcaggtgtttccttggtgcctggggcactctctctttctcccagttcctgtggcagtttgtccaggtgcccaagaacaattcrtaccctcctttctcgttatttatatacttgtctttttgcccctgccgggtattttagaaatcgtgcttggtgcactttgtgtccttcagtgtgccttacccagagcagatgcacgataagcatttttacacgagaacaagctggtggtgtaggcctctgctaaggaacaggctgtatatgctctttgtgggattaaggtagaatcagctttaactccaaagaaactgtccatgaattttgtttataatagcaagtagatttaaaatgacactttaaaaaaattctgttgtctttctctmcatataatgctgtagaaaaatataactgatggattttgtgaacgtggtatttttaacttttcgtagcagcacaaagaatgctcctctttgtgtgtcaatgaaattgttctttatgacagcttcagggtaaatctgcagagaccagagaaagcacacagctgagccctgcagatctcacagaagggaaacccacagatccctctaagctggaaagtccgtcattcacaggaactggtgacacagaaatagctcatgcaactgaggatttagagaataatggcagtaagaaagatggcgtgtgtgggtaagaaaagtggttatgtcttgatctaatacgctggtgtcttcacagtccttttggattaaatgggatcccagagccacttcttggtcggtttgagggggcagtacatgtgtggtatcaggcacatgcagtgtgagggctggactctgtggaagccggaaggtttcaacatctgccgcaaaccccatgttgcacagaactgacagaaaggaagaatgtgcttttggtattgaaggttaccacacattacagattgatttgtctcatcctgattccctttttagtcctcctccatcaaagaaaatgaagttatttggatttaaagaagatccatttgtatttattcctgaagatgacccattatttccacctattgagtaaggattcagcctttttaattattcatttaaagaaatttactatagagtatcaaatgtacaactgatcacatgtaaccattgttttgtatgtagttctgtctagcttttttttttttttaacytttttaactgcatattagagcaggatgaaactttagaggttactcaatcttttaatttaaggagaaagtaaacttttactttgtgaacatgatagataaaaaaaaactggaccgggcgcggtggctcacggctgtaatcccagcactttgggaggccgagacgggcggagcacgaggtcaggagattgagaccatcctggctgacacggtgaaaccccgtctctactaaaaatacaaaaaaaattagccgggcgtggtggcgggcacctgtagtcccagctactctggaggctgaggcaggagaatggcgtgaacctgggaggtggagcttgcagtgagccgagatcgcgccgctgcactctagcctgggcgacagagcgagactccgtctcaaaaaaaacaaaagaaaactggactgtgattatgaatctaaattagttgtgatcctgaacctaaattactcaattgagtatatagacgagtggccaaggttgtctagttcaatttctgtagaagaaatgaagagcagcatgggtgagggctaattagggatgacatagacagaatatagaggaaaagggtttaggacaagtctgacattcatctgtttcttattcattgaattttagaatctatttaccagggcggtcacttactgtcttttttaataactggtcctttgcatacatttgtaaaagtctattaaaaaataagtctcagccgggcacatcccagcacttggggaggctgaggcaggcagatcatgaggttaggagtttgagaccagyctgaccaatgtggtgaaaccccgtctttactaaaaatacaaaaaaaattaggtgtggtggcgtgcacctataatcacagctactcaggctgaggcaggagaaccgcttcaacccgggaggcagaggttgcagtgagctgagactgcgccactgcactccagcttggaagacagagcaagactccatatmaaaaaaaaaaaaaaagtctcaaaagtagtgttatcaggtcattatcattggagtagcggctgagggagagaagctgcacttgttaatttaggtttctgatggagttgtgccccaaataaatgttacgtggaggtttcaggtggaagtggatgaagtttagaagctggagtccagagcagagcccagtgcccttgaaccacactgcagttttggggattgaattctggaggaggagaataagatgtttagaaacagtctaccagattttgaactcattgtggataaacarcaatgttkttatgtacaggaaattttatgctttggatccttcattcccaaggatgaatttgttaactcggactacagaagggaagaaaaggcagctctacatggtttctaaggagttgcggaatgtgctgctgaataacagtgagaagatgaaggtgccagccgcacagaygctgagtgctgtgtgatgcgggatgcgtgtggcttttcacagcggcttagatttcatttggagcagaccgtgacatctgccctccccacctgtagcgytggctgtgggtccctgagcctgccctttgatttcagagctgttgactgacacagggctgaatggttcctgccagagtcctgaatctggtggcctgtgtcttttctgtgccccattcccgcaggggggtgagccatggtgtagttctcacagctcgccctcctgggcagagaaggtactaaaggtgtagaggctgcgagtactgctgccccgacccttgggatttgtcctttgaggtacttcccttagaatttggccatttgggggcccttctttcatttgctttactgtcctccaaacgaygtaatcacaagttgtgartatcagttcgttcttaaccgrggtttctcggtgggtttctgcttctcctctcctttcccattccgtgacggttgctccatgtggcccggcatccttacaggagatggtcctgtcttcatctctctgtgtttcatcttatttttttacttacaggttattaacacrgggatcaaagtctggtgtagaaataacagcggtgaagagtttgactgtgctttccggctggcacaggaggtaattttggaagtggatttgaacagcagtagccacagatgactgaagcagtcgggagtagatgggcttgctggtcagccagatggtctgagtggctcagggcttggctggcacctaccagccacttgaccctcacaggttatagagctctcccagagtgctggtttcccctcctagggggggtgggttccacacctgtccaaggggaggggccatagtgagggctcgaccaccatagccgctaagagcatagcccctgagagcaggctgttgtygttcatgaatgacatcatggtatctgttytctcattctctttattcacacagggaatatatacattgtatccatttattaactcaagaattattactgtatcaatggaagatrttaagatactgttgacccaggaaaatcccttttttagaaaactcagcagtgagacctacagtcaagcaaaggacctgggtgagtagttggaaatgcatagagacataacttgtattccctttayaaggccagcaaaaatgcaggtggtgtgcgttggggcatatttatcaatcatagttttcagtttatttatggctacatcaatttccagagggttctgtagatccctgattgacagttcagaatgctaagggtcaaaggcatcttggggttggtgtacttccccaggctctggtggtgccctgctgctgcccagcagcctgtggtgtgtctgtgtggcgtgcagggctggcctttgctcaccttgctgggccagagagtccgggragaggaggggtcagcctgtgagcagccctggcaagcctcccagccagagctcttgacccacttgcctgtcagcaggtcgggggtgggtggaagcaggtctctgtgcatgagcaaatttgtttttttctttttttgttttgagacagagtctcgctctgtcacccaggctggagtacagtggcacgatctcggctcactgcaagctccgcctcccaggttcagccattctcytgccccagcctcccaagtagctgggactacaagcacccgccaccaygcccagctaattttttgtatttttagtagagacggggtttcaccgtgttagccaggatggtctcaatctcctgaccttgtgatctgcctgtctcagcctcccaaagtgctgggattacaggcgtgggccaccgcgcccagccagtaaatttgttttttaaggtacacagcctcacgagactggctaacatgcagattttaatcacctgtgttagagcaaaataagagtcttgccagcagttctgacttttctgctagccagctggagtagattattggtcatattgctgcttttatatttcatcaacttccacttcagatcactccagtgacgttttcccctaagcataaaaatcatttctccaagctgttctaattttctttctgttgtcttcattcttgtttatttttttaaataacttgctgtttaatatttttggctcaatttgatcaaaagtacgtgaatcacttcttgcagttacgtttcttacttgcgtttaaaacttactcgtgtggttcctttgggatataaaacatgctctgtggagtctgtctcccactgccgtctccaggcaagaaccacaatttaaagtagagattcttgtaaaggataaaggacctgtttatactggttttcttttaatcctgcacttagatgattgcagtattgttttagacaatttttatgtatttcatgccattctgggagttggtgttatagtttatttaattttgaattttgaagaattaaccagcagttaatccccagcctccttgcttctcagagtggattgtcaggtgacatcccttgaagtccctgaatggcttttgcctgggtcctcttccagatcgtccctactgcgtcatttggacttggttcatgtatccagacggcctcttttcaccatctagatccttgaagccaagaatgtagattatttgttgttttctttcttcagaatacttaacacatcactaggtgcagaaatgtgctcagsgcatgcatccactacctggaaaacctggcaaatgtgtgtctgtttcttttccagcaaagggaagcatcgtgctgaagtatgaaccagattctgcgtaagtcagtacacgccctgcccttagacrcacacgccttgtcattagctacagtgttctcgttggtgaggaaagtgacttgggaaggtgggaaccttcttcaggccttttgtgattgttcctcagaagtagccttgtgaaaacttcagaaccaaaatattcctgtaggtcatcatgaagatgctgtttcatagaacactcagctcaggctaagtgaatttttacttacagagaataaaatgcatagtacttattttttaagcattagaaaccaatgaaaatttctgtcttgtacagagtaagtgtgaagattggacagttgagtgaggttccgttcttttgtcctcatggctggttcagccatgtgtgttgctgacatgttactgcatcaggagtgctagggccggagcatgggatttgctcacgcttgcactcacggtccccacgggaccactgctccacgctgcttgcatgtattcacgctgcatccttgtggggggccttgggggagcaggtgctggttttggcagcacttgccagaggaggaagccgggacagaaagttaggtggcttgcccagagctcctcagctcacgagtggcagaattcggatctcacctgcaacagctccgtcttggtgacatgcaacaccatttctgagaggaggaaacagaatggggtccacggctgactgggatttgggggagtgaataggtagaaccactgtacagatttctttgggaagttagtgttggaccagggatccagtgctaacttgaaggaaccaccaaagcgcagatcctgaggcaggtgcaagctgggggtcggggcgggcccagccaagtagggaaggaggagggataggtaagaggttggcagggaggccgaggggccacatgtcctcagggttcaggctgtccggctgccatgtggagagaggacaggtgggggctgaggtgggaggggcaggaacttggtgagggaacaacagatggatgggctggagaggtcagcgaggccgagcgcatgagcaccctggggacctgctggaggcggatggtgtctggatggtgaacsggcaggagcatctagtgattgatggcttctgggtgtttttaacgagagtttgaacaaagactcagaaatggtttttaaaataacagtcccatgtggcccacatagaaaatattgggatattttaaggtgtggattcacttttccatatttaaacacttgtttctacttggtgaaatacacaggtgacaggtcaacttcaggaataatggttttttttttttaagaagatgggagttgggartttcttatattttcctctcacttcttaaaaccacctttgtgcccctgctttacattaggaaaaatggaaaggtgattaaacacggccgttaggagcctaaaatctaggtcagagtcccgtatgaaagaaatcagataagttgagagagggcgtgtgcaggttggaaatggtggcgtccatctctgctgggrcgtcgatgccwcctggctggacaggtggagcctggaaggtagggaggctcggagcatgttcrgagaggcagggatgtttttgactgtgggtaacactgcatgctgggaacggaaatgagcactgtgtgcccagcagggctcagactgccatgtggggtccctggagaagaaatcacgctaacactgagtatcaaaaggatgrgtggtcctgggttctgctctggcagccctgctaagggcagagtctcccggtggtcctgggtcctgctctgrcgccctgctaagggcagagtctcccagcctctcaggagcttcagtccacttaggaaacttgaggtgagctgcagggagcctgtggagaaaygcttctcatttagtggggtgaggtgacacggggtggcrgggacagtaagttaagtttgagaaggaagtatgtagaaagtgtatgtgaaatctgtagatttggggcctctactccattgtgaacttaaagaggcagggcgaaagcgagggtgagaattttactcaggacatgaagaaggaagtcctttgagaaaacctacccctcggatccagatgaaatgtcctcccagtagttttgggggttttgtgggtatgggttttctgtggttttcttttttaagcagttgcatattacatctcattcgatttagttatgggaatgtttaatgttctacatgaagccactttcacttgtaggaatccagacgctctgcagtgtcccatcgtcttatgcggatggcggggaaaggcctccattcgaacttttgtgcccaagaatgaacggcttcattatctyaggatgatggggctggaggtattgggagaaaagaagaaggaaggggttatcctcacaaatgagagtgcagccagcaccggacagccagacaatgaygtgactgagggacagagagcaggagagcccaacagcccagatgcagaagaggccaacagtccagacgtgacagcaggctgtgaccmggcgggggtccatccaccccggtgagcaggcccaaggcagcrggggcccacacccctcacacgcaaaactggcttcttctggtcactggtgtctgaaaccaaatccagagcagcctgtggcctrtaaagcatatatttctaatgactgcagactggtgggatcataggagccttctgaatgaccaggactgctttctttggagctgatgaaaatgtactcttttagcgtgttagaaatcacttgttttattttgtttctttggccaagctgggtctagtgtttcttttgctgggaatagactttcaaaagttgtacttctatcaagaaacaaaactgcccttgcagaaatttcaggtcttttgttaagcctgtattggtcttaaggtgcagtattttttaaattattatttatagaaagaatctataaattcttggggaagtgtgttataagctttaataattacattgagctgcacctcagtggtgtgtcattaacatgcagtggggttaatatctgaggcctcagatgactttgtgccttttggaataaagggtaaaataaactctcccagagtaagagctgtatcgtgaattgtcatactaattattgagggggacttatgtgcttttattgaatggagtgctttacaatttttatttttaaatggggttgggatccttggaatatttcaataaaattgataaaatatatacatgtgtgattcctgtttttgctcttaggaagcagaaagaacaaacttacttttggctaaatggcagtgttagaatacatccttattttctctagtgaaagcggttttactgtgaaggctgctgtcttcctgtctacctcattttgtgtgttggtctgtacaaacaccgaccacacactgcctttggtggatttgtctctggagtctccactgtggaatactttcaagctctgtggcgtgaagagctcctatttctctttcgcccacattctccactgaacatttctctacatttgcatttgcatcctctggtgtgcttgcatgtcactcattgttttctgaaccctttgacagtaagttacagacgtgttccgttacccccttgctcctgtggtgtttcctggaaacagaggccctctttacagctcgcagcataggcgtcagaaacgtggatgcaggtcaccctcaaaccagcaagctcgctccagcggcccagtaatgtcctttgcagtcacaatgtccaattttgtctggggtgacaccagttgcctttggctgtcttgtctcgagttcactacagtcagaaacagttcccagtctgtcttttatgattgagacagtcttgcagggtaccggtcaggtagtctgaatgtgcttcagttttggttggtctgaagtgtccctgtgatgtgtgcgtttttgacaggaggaccacagaggtggtgctgtgttctcgctgcgtcatgccaggaggctgacgatgttgggttttctctttatagtggtggtgaagtttgttttattattagtaacatggtatctgtctgccaagtttctccactgaaaaatttgtaagtattgtgcaaggagacatttcaagactatattcctctctctcatcaaacttttaactgccagctttagtatttcttgataatttgcctgagccagtttttactgtgacagctacaaattgttttcccccatttttcatcacttctacattattagttctcattacatagaataagcactcctctgtcctttgtttgcttcttgattcattttctgtcagtacggattcaaggattctgttttattcagttatttatttattattactgtcatttattttggttctcagattgtcccggcattggccagtgggaactgtttccagtcagtttcagtgctttatcctacttgctggtccaggccctggactggggacaccgggcacggtggggacctgggggccacacaggtgtgtggggatgggtttagtgctctcagcatctttctcctccctcagcccccagaacttttagggcagtgagatcttggtctacagaaggggattgttgaaagatgcttctctggggaaactgtctagcttcaaagaagccgtaaagatagcggccttagggttcctgggaagtagcccactcttatcaccctgtagcgacgctcaaagcgaggagtcactcccacactcagcactgcctgtgagcaccttgccttgtcagaataggcaaccccgggtaaccagacacagagcagcctccagtgttggatggatgtaggggtcaaagacaacagaatagcagctagcaagtacagaccacacagggagaagaaaacttaaaaattgataaataaggtggacagttattatggtgtatggataagcctgaggaaacattcaagagaagactgctcctaacatgaaggattttctttctctaactttaatcagcattttggtaagggtcttccgattcccgaagagtgcacggcagaagaaaagacatcagctgaagaaggagttttcgcttccacccagcagggttgtctctgatgagggcctctctgaagtagccagccccataggttgggagtagtggttgccttctggtgggggtgcttaaatgggagaaaaactttttactgaaaactctttgtttcctttgaactttgacgtacctgttgagtagatgaataaaataaatttcctaaaaagaaggacaactttgagccagcgagtccacttcacaggcccacagatgagtcaaatgtgtctgcagagtcatttgatgcaatgttgttaatagcagaaacctggaagccctcagcatcaatgacgaggcactgggacaccaatggtgcagagcccccacgtggacactggccagcaaaggggctgaagcagctcgctgtgtcctggagtccagtgaccaccaagaaagaaacgcaaggtgtagagaagaatgtgcattctgctgccattgtgtacagggggaaaatacacaggcttggagacatgtgcttttgaatttatgtaaagtaactggaaggatacagaagaaattgacagttttggttgcctctgaggagggcatctatgtgggctggccagtgttaacaaggagattttaaatacagatgctcttcagcttacgatgggattatgtcttgataagcccagcattagttgaaaatgtcctacatcaaagtgcattaagtacacctagactaccttcagcatgctcagaacacttccatgctacagttgggaaaatcatctggcaacacagtcccctgcagagggttggttgtttacccttgtgatcgtatggctgttggagcaactcggccattgccccacatcacaaggatatcgactacagatcaccagcccaggtagagatcaaaatccaaagtacagtttctattgaatatgtgttgctttcctaccatcataaagccaaaaaatcatgcgttgagaattgtaagtcaggggccctctctattaaaacatggtaatcttagctctattcagttaacaagtgagtagtgaataagtgctgcgaaagagatatctgtatctctgtgagcccagaggacaaaattattaatgggcatccgcaagtctgggattgtgtatacacacgcttcaccctagcaaatggcactccattcccagagcacttctcaggaagtgggtttgggacgtctctgttctcgctcacttcaacgaatgctgcacagcctggggtggagggtgaggggcttgactcctggctctgccgcggtggcctgtgtgcctccacaacagcccctttgacccccgcctctggggttcatgtcctggtgcattctcctgtgtgtgtgggctgcaccttgtgacttgcttctgatgtatagaatgacgatggggcaaaacttccaatgagattatacagaagactctgacttccatcttgttggtgatactcttgtgctgtgtcggggttcccaagacccacccctgggtttggtgaagactcccaggactcagcacctagtcctactctgctatgatgtattacacaaaaggcttgtgactgcagcaaagggaaaggcacatggggtaacatctagaaaaaaacaggtgcaggcttccgagagtcctctcccagaggaatcaaacaggacagacttgattgacccagtgagttgtgattacacatgcaaagtgttgtctttcagggaagctcattaaagactcagtgctcagggagcttacaggggtcatgtgggcacctgtctggcacctccaacattccagactcccgcagggaaagcaggcattcagtgtattgtttgcataaacagtttaggcacattgaaccactcttacccgttgggatgttgggaacactcccaaaatccaggttcccagaggccaactaagggccagtcttgcattcaggcctttttagggagagtggccttgggcctgctgggtaaagtcctcacacctgccttactgcaatgaattaagtgcagcattggaaaagcaaggaactgaggcccttagtccagcaactgccttggaccctaatccagccaacaaccccatacatgagcttggaaacagatcctgccctagttgaggcttgagtcaacccacttcttgagagatgttaactttaaaaatacaaaagcactgtattagtctgttctcatgctgctaatacatacagacatacctgagactggctaatttataaaggaaagaggtttaattgacccacagttccacatgactggagaggcctcacaatcatgatggaaggtgaatggggagcaaagtcacgtcttacatggtggcaggcaagacagcttgttcaggggaactccgacttataaaaccatcagatcttgtaagacttattcactaccatgagaccagtgtgagaaatcaccacccccatgattcaattacctcccacaaagtcccgcccacaatacatgggaatgatgggagctacaattcaagatcaggtatcatatcaaccacaattaatacatttagaaaacagaggagactttatttcttgtaaaggtttcagcctgcaaggtggccatcctgcagcctgggaagcacagcctccagccaagaccagagagaaacaccatggaggaagagaagctgggacaggagctttatgccgaactggttggctaaacatgcatattcaacaggtgacaggaggagctatgaatattcaggatggtcctggcacatgtgtacgggacaaatgttcgtgtaacataccacccatgttcactttgggatggagacttaacatttaaatgtactgcagttagaccctatatgtcaaaaggtcttttcaggacatgaaggtgtccaagtgtacagccagccaggaccagttcatggtcaggagaaagttactggaatcaatcgctttgtactacaggctctttgtagtatacaaagagatttcagtaagttcaagtcaaagctgcagttatggctggtggaacggggtcggttggttaacgtctctgagctggatgagctggaattgtttaacgtatctcgaggccagtgcttgtttagttgctagagaaaaatacccttggccgttagaagaaaggttagggatgtgtgatgtaacccttgcctggcatggccttgggtcctgtttacaatctggtatcttactgctacagagagtctatttgccagtcttaagatctctgtgttaacattaatgtcggtcagttgtgtctaaaccacaaaagggagggggtagaatgaggtgtgtctgacctcacatcccactatggctgggagtttagttttaaggtttttctggggtcctcttgatcacaaggagtccattcagtcagcagggggcttagaagtttatctgagtttacagagacttggaagcagaagacccagttaagccctgccagcatttgtgacctacagaagttgtgagatattaaatattgtttcaagccactacatcctggggtaatttgttacaaacccatagatgactgatacagtcacttacttcttgactatgtgaccctgggcaagtttcttatcatctctgggcctttatttcctcatctataaaatgggcagatggtagcacctacccagtaaggtgtgctgaggcctgagttagtgaatacgtgtgttgggaaaaagctgagtgttgggaagaagccgaggcagggcttgcatgtctgacataaagtaaaagagtcttggaacatgtccggggtccagggtctaaaaccccttgtgccctttggcacaccaagctctgtgctaaagagtggaaggctaccctgacgtacctaatctaagcccagggcataaaatccctcgtggcttggatagaatccagggcttgtggctccggaatgtgtctaggcttgctggctccttgctccttgctctcccaggatcgattgtatcttgagttaaaagaacctgctctccattatctcaagtagcagagcaaatgctaaaccatcacagctataaatcatgtgcttgatgcaacacgcccttttgacccccacattctcgccacctccttctctgttggattaccaataaatagcgtgggctcccagagctcggggcctttgcagcctccatgatcgcgatggtcccctggccccactttac

SEQ ID NO: 96848 - DNA, 39468 bp, Homo sapiens
catgacctaatcacttctcaaaggccctatctccaaataccatcacatttgggatttgtgaatgttgtaggggacgtaaaccttcagttcatagcagctttctcagctatattcaaaataccctacatattttagaaattctctatttcaaaacagtttatgggccactttacctcagatttcagtatctaccaaggacgatcatcttcctttcaggggtttcttaaaaggtgtattacttagacaggataattattaagacaagggtaaggtcttgcaccagcaattaagaaatactttgcctacccatttgtgtctaaacttcttccagatcatgaagctctttgagattatgatgaaagttagagactatcttttatttgtttagtcatttagtaagtattttttaggccaggcacagtggctcatgcctgtaatcccagcactttgggtggccaaagtgggcaaatcacctgagaccaggagttcgagaccagcctggccaacatgacaaaaacccatctctactaaaaatacaaaaattagctgggcatggtggcacaggcctgtaatccctgctacttgggaggctgaggcaggagaatcgcttgaacccgggaggcagaggttgcactgagccaagatagtaccactgcactccagcctgggtgacagagactgtctcaaaaaaaaaaaagtatttgttgaatacctgttgtgtggtaggtactagggatacagcagtcaacataagagccagaaatctaaaaggtgaggaaatacacattctaagaatgtaaggaaaatttatgtcaatggtaatgatatggagaaaaatcaagcaatatggactccctatgaagtcatgcagaaattaaggtacaggggatgaagatatcctagagataaaaggcatggtgatattagtactgatattcctgaaagagaaagctgagtgttgtaggaaggatggggttttaattctggggccctctcttctggcaatatagagacggagaagggaagtcttaacatctgtatgttcccagaaaaatgtatctccctaattcttgtatgtaattttgaaggttcatggacacttctgaagccatttcatacgtattttaaattgcacccaagaagaaatatctgagatgtttgcattcccatatgtattaggataggctgagttgtgctgcagtacaaccccaaatcccaactcttaagggaccggggccaaaagtcccatcaaggtaaagttttatcctccaagaccaggctctctggaagtgctatatcagatttggatgtttgctcctactgttctggagacccaggaaccaaaaggatatcttctgttttccacatacttaatgtagagtggtggaactgtatctgcaacaaacattctgaatggggaagaagaatgggagatacagttaggatccctaagtctaggtatggggtatattcatgattagggttcttttctatctcctaggaagaattcccttgtatattgttctccgtgactctagagtccaacctctgggaaagttttggtggttttttttttttttttttttttttaatcttcatggctacatctgaacagctactgagggatatatatgccaactttgggagttgcacagcttttttgagaccatttcttagatgactagggactgtaatttctcttaatttggaatagccacaagttgttgtagccaaggtttgtgtgtgtttttaatacaattcttaaaattttagtaggcttctcatctgtagatagatttgaaggggtgggttgcccctccacacctgtgggtgtttctcgtaaggtgggacgagagacttaggaaagaaaaagacacagagacaaagaaataaggggacccggggaaccagcattcagcatatggaggatcccgccagcctctgagttcccttagtatttattcatcattcgtgggtgtttctccgagagggggatgtgtcagggtcacaagacaattgtggggagagggtcagcagacaaacacgtgaacaaaggtctttgcatcatagacaaggtaaaggattaagtgctgtgcttttagatatgcatacacgtaaacatctcaatgctttacaaagcagtattgctgcccacatgtcccacctccagccctaaggcggtttttccctatctcagtagatagaacgtacaatcgggttttatactgagacattccattgcccagggacgggcaggagacagatgccttcctcttgtctcaactgcaagaggcatgccttcctcttatactaatcttcctcagcacagaccctttacgggtgtcgggctgggggacggtcaggtctttcccctcccacgaggccatatttcagactatcacatggggagaaaccttggacaatacctggctttcctaggcagaggtccctgcggccttccgcagtttttgtgtccctgggtacttgagattagggagtggtgatgactcctaaggagcgtgctgccttcaagcatctgtttaacaaagcacatcttgcaccgcccttaatccatttaactctgagttgacacagcacatgtttcagagagcacggggttgggggtaaggttatggattaacagaatctcaaggcagaagaatttttcttagtacagaacaaaatggagtctcccatgtctacttctttctacacagacacagtgacaatctgatctctcttgcttttccccacaagtttgaatcacaaaagattttaggtaagaacaggcagtcattgaacataagtttaccttactttctccaacctggcctaaatggacaatacctgcataaagcccaatgggatctattgttaaataactaaagtattattttataccctcgtatttcattatgccagattcactactatctaggaaatgcttaagtaactatattaagaatcaaagagtaggctgggtgcggtggctcacacctgtaatcccagcactttgagaggctgaagtgggcagatcatgaggtcaagagatcgagaccatcctggccaacatggtgaaactctttctctactaaaaatacaaaaattagcggggcgtggtggcatgcgcctatagtcccagctacttgggaggctgaggcaggagaatcgcttgaacccaggaggcagaggttgcagtgagccaagatcacgccactgcactccagcctggcaacagagtgagactccatctcaaaaaaaaaaaaaaaaaaagttgtaatttgtaatgatgtgcctgtagcatactagctttaaatatttttcatcctccattgtattatgtggtaaaatatatacaacataaaatttaccactttaaccatttttaggtgtataattagggtcattaagtgcattcacatttccagaattctttcatcatcccaaacggaaactctgtacccattaaacagtaacttctcattcccgccttctcccaactcctgggaacctctattctactctccatctgtgtgaatttgcccattctaggcgcttcatataagtgaaattgtacaatatatgtccttttgtgtctggtttatttcatcttgcatgttttcaaggtttatccatattgtagcatgtatcagaatttcattcccttttaaggctgaataatattcaattgtatatatataccacagctttaaatttttattaggttttaagatggatgtgatatggcacctaataacactataaaggttcaaatctcaagaaacagcaatagttcctatttcgatatattttccacatatcatcttacttagcttatttccattttgctttaaggataatttgtttctgtaataatggaaggtgacatgtcctcccctagaattttctacttcactccattcattcattcattcattcattcattcattgagacagagtctcgctgtgtagcacaggctggaatgcagtggcacgatctcggctcactacaacttccacctcccgggttcaagtgattctcatgcatcagcctcctgagtagctgggccaccacacccagctaatttttgtatttttttgtaggcagtttccccatggtggccaggctagtctcagactcctggcctcaggtgatccaccctccttggcctcccaaagtattggcattacaggcgtgagccacattggccaaattttctactttaaacactgaaaacagaggaagttaataaaaattttaacctataaagtcccctggttgttagtcattaacagcagattgtcagataagactggtaaaatgatggctgctaagcatttgatgatccaggcgcaggatgatcaaactgcagcagatcatgcacgtgacagctgcttacatagaaatttaacaccacaacacacattcttagaaaattctgtgttgaaatacatacacttacctgatgtgtccataagatcataatgttacggggaactcttagaacagagtggttagagaaagggaactggaattggaactgtaaaattcattttctggtctggtaaatagcaattgctgagggtgtctcattaaactggcacaaggaacaaaatgtgaggtatttaataatcctctccacttcacaatgcatttccaaaatgactggcctacattaggatcattgttgaacatattaatgcaaacatatagcagatgtaaaaatttctgtgtgcaaagcagatgctggccacttggagggcagaggtgagggggaaatcccttacccgaaaattgcctcacctttactagggaaacaagcaaagaattacaatatgattatagagagtaggaacatgacagtttcactaggccaatcaggtttctctaagaagatagaacattcctctgatgagaatgtttctcagagaattaaacttgaaaatcagacctgatgcaaaaaacttggaaaatgcacaaaatcacagagcaaaattagagattactgataacatgtggtatatgtccttctagtttttgctccatacagtggtttttatttattttattcttttgagacagagactcactctgttgcccaggctggagtgcagtggagggatctcggctcactgcgacctctgaccctgagttcaagcaattctcctgcctcagcccccctagtagctaggattacaggcgcctgccaccacgcccaggtaatttttgtatttttagtagagacggggtttcaccatgttggccaggctggtcttgaactcctgacctcaagtgatctgcccgcctcggcctcccaaagtgctgggattacaggcgggagccaccaagcccggcccatacagtgattttttaaaatcagactgtccagtagtcttatttgtgctaagtggaaattagggaaagggtcagagaaatagggatttccttttgccttcagtagtatcctcatgaacctgcgtcatggtgttgttaggtgtaattaatgaaggtttctcacaagataaaatgttattttgaggaccacgtccgtggattggaggaaaggcagatggttagctagtgacgactttattataatgctaattcaggagtatctgggtctctagtgctgaggaaaactgaattttcatgcaaagggcatctatattttcacatctgtatctttatccatctagctgtgctcttactattttgtttctacggtaatttgctatttcttttgcacgacaattgcccaatgaaataattcagatacttcgtgcactttgtcacgcagaagttttcatgttactctctggaaaggcacttcccaagatgtagctaataaacactgtatctttggaacatttttgttttccttttaacttgtagctcctagcctggaaattgatacttttgacacttgaacgttgttcatataaaaacactgtgaaatcaacatactgtctttgaggaatggcattgcatgcgtccttttgagaagccatcttgtagttgaaggaaagcagcaggacggaaaccagacttcccccccacggttccctaaargtcacggataaagaatgaaaaaccgggactagttaagccaaggagagaagagcaagtgttcccggaagggggcgcgatgtgttgaggttaacaaagagaaagacagctgcggggtcagctaaggtctccgctttcgctaccgacccagactgctcaccttcacaaactcacgttttcctcaagcggcaccctcggcagcgctcaagtgagagtattccatccttggaatactccgagaaggttcgagccagaagttggattgcctgaaatgccgcttccagcgcactaagtaacttgaactgcgctaagcaactggccagaattggtttggtttggtttgaccctggggttcctccgtagtctgtaagtggagttgcgaactcaaccccttctccaargcgggagtgtttctaggagggaacatacttccccttaaaggaagatcacgttgctaaagtaaaaaatttgaaggcgccctatgtgtagaacacttacgttcttggctttctggccactataaagatgggtcgggaatggcgccagctacgttaaaaagtaacgtgcaggaatggttcagttgcccggtgttgaccagagtagagatggttttgcccacaaaaaaaatggcgccgaaacatgtcaatccgcacaatcacgtgttcacaaacctggatgagagayggtatggcttcagatgacaaacggatgttattattctttacttccgggtgagacaaatcgggcgccatcttgtcttgttcccgaagaagtagaagcatcgaaagcgttggagaggtgttaccggaacggcggcgacaagggtgttcccgaactagagtgggtaagtgatggagaacaattayacgtgggcacttgccggaccattacaacgttcttggtttctgtggcgaaggtagcataacttaaaataggctgcgtacgctgcttggcgcgaccgctggaacctcattcctttaaagcgctgcggtccgccagacttggtaaatcagagcgctgctttcgctgaaaaggaaatgtccttgttaaagagagtgctcacggtcccatcttctcacagagtttcctctcggacgagaagggactaattgttgggttcctgaccggccgttaaacactgcgcgtgcgcagtgggaacccccttgtgggaagggggttcatgggggcggaggaggcgggggctcgcgacctggagcttataccctttgaggctctgactacgcaggcgcagttccttagtttgtgtttttcgtgtgttcttacccaatgatggatattatgtgttaagcttcgctaaaggtagtatccaatatttcagttttttaccctgtggtggatagtatcgtcatctgaacaaattgagcattagacaaatttgtttgtgggttgttaaattaacattctagcttaarattttaattcaacattaatcttttacatctttttacttccccctgcccccaagtaaaacaaaataaacttagaattcctcatttgagtgcagcagggcgaaaacaacagcaaccagactactaaagattttacttgtggaatttttttgtaaagtggcaaagggcttatagagaaaacagttctttaaagatgttcttgagagtttttttttttaacttactaatagactttatgttttagaacagtttttgtttacgttgagcacatacgacgtccccactacacacacagtttatcttcttattaatagatgttagtatggtacatttgttgcaactaatgaaccaataatgataaattattaactaaggtccatagtttattcctacttcctcacattttacctaaagtcctttttctgttccaggatgcyagctaggatatcacattacatttagttgttgtatattcttaggctgtatattcttggctgtgacagtttctcaggcttaactagtttttgatgactgttaagggctgacttgtgcccctctaaaattcgtatcttgaagtcctaacctcagtaccccagaacgtgactgtatttggagagagggtctttaaagaagatgaggtcactagggtggaccttagcccaatatattaataactgctgtccttataagaagagagtaggatacagagggatgatcatgtgaagacatagggagaagacaaccatccacaagccaaggagagaggccttagaatgaaatcaaccccatagagcttacactatacgcctccagaacagtgaggaaataaatttctgttgcttaagccacccagtctttggtactttgttatggcaagcataccaaactaatacagtgaccttgacattttttgaggagtatggtcaggtatattgtagggtgccctgctattggaatttgccagacgattttctcatgattaaaatggccttacggactatatcaggggaagatcacagaggtaagatgcccttttcaacacatgctatcaaggatacatactatcaaggtgacttatcacattattactgaccttgatcatccttctggagtagcgtttgttagatttatccactgtaaagttacttcccccacccctttttatactgttctctttggaaggaagtcactttgcagagcccacgcttactgaatggacagttgtgctcttcctcagttagggtggaatatttacataatttatttggaattctctgtgggagatttgtgtcttccctcacatttatttgttagtttattttatcatatccttatgggcttgtggatgtttattacataacttatattataatccagtacttctttattttgttgctcaaattgtaccagctttggccattggcagctcttcgagttgtctactgttctcctttgacatgttcctatcaatttttttttttttagcactttattrcttcctggcagtatacatgccccaractcatcttttatatttcctgtcgcagtcctagagtcagctatttctttaaagatctctgattccttttattgaagaatggtattaaaaccaagttctcgtgcctaggtgtgcttgttgctactagggtgtcattttggrcgctctcgctacatttatttttaaattattattgggggggtatttataaccgactctccaattctccagttttttttttttttttttttttgagacagagtgtcactctgtttcccagaccggagtgcagtggtggcacaatcttggctcattgcaacccccgcctcccgggttcaagtgattctcctgcctcagcctgctaagtagctgggactacaggtatatgccaccatgcccagctaatttctgtattttcagtagagtggaggtttcgccatgttggccaggctggtctcgaattcctggcctcaagtgatgaacccaccttggcctgccaaagtgctgggtttacaggcatgagccgccatgcttgtcctccacttttaaaatagtcttttgagctacaagctgcaagtatttcagtatatactaaaatgcatgtcacataaagtagcaaaatttctgttttccgtatttcraatgattacaagattaatttttaccagtgccatttccacctaatctgaattaaacaaataaattcttttttgactttgaggtcagtcaactcatgtaagactgaaatgtcaggggtgaagaggattgttgtattttctggcttctcagctttgtggttgatttgagaaatatttcatcctatgcatcaaatgatagatgtgtttctgtagctctttgattttgtagttgatgctcaaggactttaaaataccacattttaattctcatccatctctgtcacagtctctgagtgacttttgtaaatattaatgattgtcattttggccacacggggtggctcatgcctgtagtcccagcactttgggaggctgaggaggatggatcattgaggccagaagtttgaggatagcctgggcaacatggtgaaactccatccctactaaaaaatacaaacattatcctcgcgcggtggcatgcacctgtagtcccagctactcgggaggctgaggcatgagaattgcttgaacctgggaggtggaggttgccgtaagccgagatcacactgctkcattccagcctgggcgacagagtgagaatttctcaataataaataaatgattgtcatttaaacaagttgttttaggacctcaaagcgatgaagttctaatatagatmcatttaagaaaaggataaaatagatgatggccatttctggttgtattagttttctagggatattgtagcaaattaccacaaactggctgatttcaaacaacagaaatttattcttccacagttctgaaggctaacagtgtaaaattgaggttttggtagggcatgctctctaatggctttgtaggggattcttgtctcttcctagcttttggtagttcttgtcaatccttgatgttccttggcttatagagccatctactcccaatctgtaccactgtggtcatgttacattctccctgtaagtgtcttatgtctcctttttaataaggtccctcctaatcaaatatgaactcactgtaatttgaatacatctgcaaagaccctatttacaaataaggacatactcacaagtatcacttgatactcacaagtatcaggagttaggacttcagtgtatctgttggatggggacacaattcattccataacactggtgatagctatcacttgatttttttgcggcagtgtgtggtggctttgatgatctgatacaaaccttggttattcatctttctgttcttcccagaccccatttgttttccaaggaaatagcagttcactttaccacatgaagggaaatactgttaggaaagtcttgcagccttgcccgtcattaatcaaatttctccaaacttgaaaacccaagcctaacaagctttaaaattaagtctaaaggaagagtgaataaattggaatcaatttttgatattataaaatcacagtagcaatattggaatgtcattttcatggttgaacattaatgtatttacttgctaacatttcagtgaattataaatatttaaccacttaacatggacaaaacattatggagaatttaaattattataaaatgttttctctcccctaaagaagatttttgtttgagccaagacaaaaacatgaaaatttaatgcagaccctctataaaaagtattattgtatgtcatctttaacttattaaatgaaagctttcaaacagtggtaaagaagagggtagcaaatgcccatccttaaattatcaacattttccaaatcatttttaaaccaacttgtaaatgtcatttttaatggtacaacgttatgttattttgttaaaccatagtgaaatttaaaatatgtatccattgattactgtgtgttgtgcctgtgtattccttctgttttctagattttgcatttgttggatttgttagtagtgaagatactatggtgaagatgaaggaagaaagagtagtgttcctaaatccttgccataaaatcactagtaatcttactgtttaattaaacaatagttaatgaaactccttatcaagcattgtgctatgtgctgaaacatatataaaagtttaagtatttcctagttttaaaacaagtctttactacaatctgtctcttttctacaaaattttaatgtaagtgcamattttgttttcatgaccagagttacctgttttggataagattatcaaaatttactctaaatcatataagaaaatgagacagagaacatttgcccaatgcatgaaaaatgatgccacttgaggccttttctttttaagaatgcagttatgggccgggagcgatagctcacgtctgtaatcccagcactttggggactgaggcgggaggatcacgaggtcaggagattgagaccatcctggctaacagggtgaaaccctgtctccactaaactacaaaaaattagccgggcgtggtagcaggcgcctgtagtcccagctactcgggaggctgaggcaggagaatggtgtgagcctgggaggcagagcttgcagtgagccaacatcgcaccactgcactccagcctgggcaacaaagcgagactccatctcaaaaaaaaaaaagaatgcagttatgtatagaaaattactaaattacaaaatcttctcaaaactgccaagctctaggaattggaaataggaatcaggtatttttaatctttattttatatctttctgtattcttttaattattttattctgtcaatgtgtatttttagaaaaaatacagatttttaaagatacaaagaatcaaatgaagctaatgaacacagtccataatgactagtacaggcagtacaaattacacaaacttcttcaactgtgagacattgggcaaatgtcctctatctcattttcttataggatttagagtaaattttgataatcttatccaaaacaggtaactctggtcatgaaaatgaaatttggacttatattaaaattttgtagaaaagggacagattgtagtccctttttttcgcttaatgcagtttgtacggtaatacatgccagtatgtagcagtctaccttattcattttaatggctgaataggaatcaactgtatggttcactctaacttatttaacttgcctttaatttaatgtcactgaaaccagatgtttactgttacaaaatatgctgccaatttttgaattatggtatgaatattcacattcatggtttaggaccctgcrgtggaattgctgggtcagagggatgtgcatgtacgttttgttaagatgccataatggtaaattgccttttttttttttttttttttttttttttttttttttttgagacggagtctcgctctggcacccaggctggtggagggcagtggtgctatctcagctcactgcgacttccacctcccgggttcaagcagttctcctgcctcagcctccggagtagctgggactacaggccagtgccaccatgtccggctaatttttttgtatttttaatagagacgggtttcaccgtgttagccaggctggtcctgaactcctgacctcaggtaatccacctgcctcagcctcccaaagtgctaggattacaggcgtgagccaccgtgcccagccagtaaattgtcttttaaaaagactaaccatttggtgttccacctgtgccctcatccagtagtcatcctctgtaactaaatcaagtttctcaactccagacttaattaaagcgctttaataaatagcctctaacttccttaacttaccatcaccttctttactgtatttttattctgctctgtttttcccaatttcacatcttttttctatttttctcagcctaagtgtcccaaacattatattacttgaatagtagcttccatcaaaactttggggaagaaaagcttctaaaaatatagcaaaagtagaagtggctgttctaaacatwcagaaaaatgatcataggtgatacaaatcaaacccttgaaaatatgcaaattaaaacctctgttcataggaaaacttttttttttttttttaataaaagcttcagctgggtgcggtggttcacacctataatcccagcactttgggaggctgaggtgggtagatcatttgggtcagaaattcgagaccagcttgacctgcatagtgaaaccccgtctctactgaaatacaaaaattagccaggcttggtggcgagcagctgtaatcccagctactcaggaggctgaggcaggagaatcgcttgaacccaggaggcagaggttgcagtgagcccagactgcaccactgcactccagcctgggcgacagagcgagactgcctctcaaaaaaaatataataataataataacaataaaagtttsaacccatgaaacaggaagacaaatttagactaaagaattctttcaaagataaagtgaaacctctgtaagttttagattgcttctggaaaagaaaatggagttgagcagaagtgggttggcttgatcactttttttttttttttttttttgagatggtgtttcgctcttgtcgcccaggctagagtgcaatggcacaatctcggctcactgcaacctccgcctcccagattcaagcaattctcctgtctcagcctcccaagtagctgggattacaggagcccgccgccacgcccggctaatttttgtattttttagtagagacgggggtttcaccatgttggycaggctggtcctgaatgcctgacctcaggtaatccacctgccttggcctcccaaagtgctgggattacacacgtgagctaccgcgctcggccgatcaccttttttttaaaaccccctaatagttgttaacttgaagagtgctaccaaaagtgatggtgggaaagctctagtattgatattaatcaccacgaattgaaacttctgatgcttagtttttatgtgtttcttatttaatcctcacaataatcctttggggtatagacatttaggtcttctgttttacagattggaaaaccaagggttagagcataatttacttatgttcacaccactaacgaacggatgtaggtaggcatcctgaaccagagcctgtgctctgaagtctaggtgacaagtggtgaccagaaaacttaaaaggggaactaaaaaagttgtccatgacaaccattaaacatgagtaagaaaaataacctttatttagagtaatttctggaaaagtaaatttatggattgggaatgatggtaggtagtcattatacatcattttcatcatttaaatggttttagtaagtgcacattttcagtttcagtaggcactttatagagctgttgataatgtctgtattatatgagtttacaacttaagacagaaaaattatgcattgaactctgataagctgttaaagcrttggaaagcacagcaagctttttggttctcataagtagaagttaacagcttcctcatcattagcctttaaacagaaagtaatagctagacactgattatttatttagtgtctgctatgtgcaagatgctttcttgtaccttattgaagataaaaggatgaataaatttgtctttctttcaactgtaaaaagctgttgattgaataaaaaggaaactaaaccatttcaggaacaaactgttctctccttgctaatgttaatttctaaacatagaattctataggaaaatttaaattaatacattttattaccttgtatcatctaagttaataataggtggatgagatcttcatttcaaatgtttgttgttccttttttctcaatctctaaattgtttgacattgttttttattatgaaggaattgttcaagtaaataaaagatttggaaagaaaaaaagatgttaaaaagctttgcctcttcatttctggtgtatctcttttccttgattttattatgataaaataattccccattataaagttaatgcaaggaaaagtgactaacttggagatgatcacacttatgttgcatctctagaatttatttttatgtgaatcatgataatctataagcagacatctactttttttccccctagggcatacataatcttgctgctatgcttcgaagctgtagtctgaatcaacctaagttttaaacagaaggtgaacctctgaggtcagtttaaatagcagttggtgtgtcttcttggtgtttcctatttatttgttaactcttaattaaagttgtaagcgaagttacttttcaagggctctgataacctatttagccttaaaggagtctaaaggcgtacttgggaaactggacaggacaaaaaggggaggaagaaggaaacactgaacagaggttagaaaaaaatatatttaacttggaactgatacccaaaccagttgttggcctcatytgtgctatgtagtgcctattttgccatattctaataatgtcattgtaattgattacattagtgtaacttgaagacaggtacatttgactcataagtaaatcaaggtgacaaagaaatacacctcccataattcacagtgttcttcatttgagggattagtatctgccgcagatagaactatacctgtatggcattctgggaatgctgcgaagactggagttggaaacctttaaaagcctgaattgtaatcgccaattgtcctattagagttaatatctctattttttttgttatccaacttgcctactttttgtgatcctgcaatacaaaggcttgcttttatcttgtttttagcatacaggaaaggatcaatctagaaggattcatttagtaaacatttattaaatgcctgctatgaactaagccttgggatacaaaaataaagaagaaaccatgccctggttatgtgagtcactggttcttgaacagggttgtgtatcagtgttggaataaagtacaaagatattagacttgtaagacttttaaaccttttattaggaatgttttcagactagcttacagaaaagttgggctagtgtgatgattcccccccataccatctcctaaattaatagttattaacataaagtaccttccctcccatcttttccatgctatttatatgttaagaaaccaggtcttggaggctgtctyactttctggatttaatacygtttatctcatttctttatcctttaaaattgctttatattggaagtaaaatccaaaagctcagttggactcagttaaacatttttgatgagaattcttagtgattctgggagcatagtagacacctaataatctgtaggggtgatattttggcaacctttgaatttctgatttctcatcaacttttcttgtaaggtttcctgaattaatattttattacttttggcaatatgatagttttctaattctgttctacattcttcatttttttagctgtaattatttataaggaaaaatttttcttcatctgctgaagctatttggttactatcttaaaggaatcttgattggggagaaatgaaatcacttttttcctacaatcttcaaaataattacatatccagaaatttatattgtacaaaaaatagagttttttttaaagtcttttttgagstaaattcattgtgttatgcttgccaccaaattctgagaccagcattaacataaaattttctacctcgtttggtaccctaaaaattctagttgcctctggcaagctattgacaagaattttagacctctgatgaaataaatgtatcatcatataataatttctgatgtgaggttttaagattaaataactcactataatttttaaactatgtttaatttattgaagatagaaaatcaagtatattttaaaagaagggatgtgggatcaaggaggacagccttggcagcagtggcccttgaaccagcaacaatggatgcagtcattccagcaccaacaggatccaagtaaggaaacaaattgaatttgaaagggcggggttggatatgtggaaatgggtagaagacacrtgatgggattaagggatatggaattgagattggtgtactggatcattttatggtcagaatttaatcttctcataaatagccttgccatagcatatatagcaggaaatggacttccctttggaagactctcaaaatgtagaaagctttttgaagattttacattttttaaactgatttagtccttgtttttctaaagaaagagaaaagcctaaaatatgttgcttatggagaacacttctgtgaattctgactcttaaagttgtatattatattgaactggatggtgtgctatatcattttaaaatttctttttgctgtggactatttcaggcacacatacaaaggtagaagagtatagggagcccttgtttattatttagctttaacaattgttaactagtggccaattttgtttcatccgtaagaccacttacgttgctctgccctcactggattgatctgatgctatttctttttttaatagccatgtatcattctattgtaggattgtaccataatttaacaaagccacttttgggtgttttgttatttaaagtttttcactttttgaaacaattagcataatcttgtgtacatattgttattcacttgtccaattattttcttattaaaagagctaggtttgttaagtcacggtaatttcaggtgcacattgccatgtgtaaccccataggggttatgccagtgtttcaaactgtatgagaatacctatttaatcttcattaaagtaagatgcagaaaaacatatcttattctactttgtttactttattaatattagatcttaatgcatttttgggtggacttgcaaaataaaaattattaaaaagatcttgaaatgttaaatgtagatgcttgggaagagaggccaggtgcggtggttcatgcctgtagttctagcactttgggaagctgaggtgggcaaatcgcttgagctcaggagtttgaggccagccggggcaacatgatgaaaccccatcgctaccaaaaatgcaaaaattagccaggctcataacccagactctacatggatggatggatggatcatggatgaatggatggatggatggatggatggatggatggatggatggatggatagatacgtaaaaatttagaaattaaaaaaatgtatcttgggaagagagtcttcaagatagtggggaaatgaattttgagtaaagactggctaagaagttgtagccagactacactagtcatgttttggctagagaagggagccttatttaaagaagggcaaccataaggaaaaacagagttaggtagctgctctcatcaaaggcctataggctcgaatgcaggcctggaaagataaataggacatgttgaaggaagaaatgatagcgtttgattatttttgtggtgatttttttttgtaaaggtgatgacatttaaaaattcagtaaactaagatgcaggggataaattttatatgaattaatattagaaatgggttaagagtgttttttgtggagttctttcctgaaagtgtaagtagtttatattattttttagcctgaatatgggttatttgctaagtaccctttcagacacagtatgctttaatatttaagatctcattcaaaaaaaatttttctratttccctcatacccyctctgtctgaaatatttaagatctaaggaatagttgagctgcttattttacatagaggcactattcttttaactcctacattctgaatgctgaagtcagtgttaatttacgttaggccagattgattgggctgcattggcccaagcttggattgcccaaagagaagcttcaggacagcaaagcatggtagaacaaccaccaggaatgatgccaaatggacaagatatgtctacaatggaatctggtccaaacaatcatgggaatttccaaggggattcaaacttcaacagaatgtggcaaccaggtttgttgtttatgttttcacaattttaagacttttaaaaaacagaatgaagattattattaaattttttaatttgcttwgttgtatgacttctggaaattaatgcttcwtaaagaataggcagttttcaatttgatttgactttgacattttgtggttaaaattattctgtactcattctgctagctttgtggcactcagtttgattcttttcttggttcttcattcctaggctgacaggggctgggaacactctggaaacctcacttggcatctagggaagagagcattctttgtctctctattgcaacctctggccttttcagaagcagcactggcagagtaaaacatgtctagcctctaattaaagaaaaattgtgtcactgtgtgacaaattagtctgtcaaatatactctgcccctaccatccgcctacctttttcttccctttttttttttcagatagtgaagatctttcataagtttttgtgtgttttacttttttgtttgttttatttcacagtatgatgtagatttcttgatgctaattcagtcttccatggcttgtgttattcctttttaatagtcacttgaaactatggagkaatcagcctctcatttgggtatgctgatggtgaagtcataacctcctttccctattaatactttttgtttctccttataagaatggagacctcagtcgagaccagcctgggcaacatagcaaggccctgtctctacaaaaaaaaaaaaaaaaaaaaccttaaaacttagtcaggcatagaggcgcatgcctgtagtcccagctacttgggaggctgaggtgggaggattgcttgagcctaggggattgagactgcaatgagctgtgatcacgccactgcactccagcctgggtgacagaatgagtccctcatttaaaacaaacaaacaaacaaaaaaaacgagaattcagattacttttaaaaacataaatattctagtctttgatactgtgaggtggttcatttctagctttcttgaaagtgaaatttccccacatttgaaaatgttttagttcctaagtttaagttcttaaatgactcccgcgggcatccctaccccttagttttactctactttgtgaccctgggcaagtgatttacctctgtgtgcctcgattttccctcccgaaattggcaaaaataatacctaatttctccctacctcacagggatgttgtgaggataaatgtgttcgtgtaagaaagaaattatataaaacctcaaggtattatttttgtggtgttgttactaaacaaatataaaaattcaacaaaaatagtgctttggattttgttacatttgttaaaaataactttgggcatttggttaggatatgaattagagtggagttagctcattttgaattatatatgacagtttagttcattgcttatttttaagataaacaaaaggaatttgaccaagaagtcataagttgttttttaaatctgtatgtttactgaaaaatctttcttgagatcttaaaattctgtgttgattttgttataaccgcctgttgaatgtttttatgcctaaatcttaaatagaatggggaatgcatcagcaacccccacacccccctccagatcagccatggatgccaccaacaccaggcccaatggacattgttcctccttctgaagacagcaacagtcaggacagtggggaatttgcccctgacaacaggcatatatttaaccagaacaatcacaactttggtggaccacccgataattttgcagtggggccagtgaaccagtttgactatcaggtgaaagatattttgttgctttaatattgtagatgtgcacgtaatccattctttggaagtgtctcatcaagaatacctaagatacgtgtttcacttttcagacttgtataaataagcacattctgtctcagttatcaatttttgagtattaaaataattagaatttgttttctgatttttttatttcattaggaaaatggtataaaagatcattacggaaaacttttgaaaaaattaaaaatgtataagtgcaatagctatatgatgttttattttctaatttatatttcaaaatggtatatttaaatgttaaagactagagaatgcacagtaattgaatatagctcatggttaagacatgaataaaaaatatagatcattttcctaagtgtaattccttgtgctatgtagaattatgactgtttttctagtgtcattttttttccattctgacatgacatgttaatggaattgtatataatttcctctgtagcatccaattcattcctagggacatagaactctgtggggaatagtgttgtatgttgggctttatttacttcattccctctgccagggtctacccttaaattatagtgctaggtgtcattttgaaataactgattgcaattattaacttataaactgctatcataatttaaaattttgaaagaattatttcatgaattctagggtagatttgataatggacatctagtattcaccttgagatggtaatcctctcattaataaatattcagatacttgtatacttggtatacagatacaacagtttttatgttgtttgaagaaatataatggcagggagcatctgcttaccctmcttttgcatggtagatcccatgtaaacaagacaaagagctgtattggcagctggcctagaaaagcctctgaaaatagcaaaattgcagaaaatatttaatgattcattaacttctatctttgcttataaatgaatatatctgcaagattatagaaacagcttaagttgtttagttcactttttgttcactgtaagtaggatgttgaaattgacaaaaatgtctagttaaagagaaattagtatctatttgatgtcttagtgttggtaggattagcttgtaaatggattcagaatgaaaaatttcatatacttcttgaaagtagcttatcagctggcttttagaagcctctttgcatttacatagccggaaaatcttaagacaagtaagcctaggttcttgggaccatagaagtatcggtggatattagagccatggaattcttggatgtgctgcacacatggatttctactgtcccagttcataacacacgtgtgtcccagagagtatattgtattaatttgaagaaaaaataaactgcaatactctttcagcatggggctgcttttggtccaccgcaaggtggatttcatcctccttattggcaaccaggacctccaggacctccagcacctccccagaatcgaagagaaaggccatcatcattcagggatcgtcagcgttcacctattgcacttcctgtgaagcaggagcctccacaaattggtagctatttaacttagtttagtggaccacaattggcatgacttttttatcatataaaaaggatgtcttgttttcttaaaattgtttgagtatctctgatgtgttaggaattgacactttattttttatggtcataaagcttaaaattacaaaaatgatactggtctgaaattaaaaggtttaaataattttatttaaaccttyacattaaattccagattttgtgatgaagtgaaaatttatgctagccatagcatgttggtattttcttcagtgtaggcatttcagtacattatacagatatatgagcccttctccttttaaatctaattgttcaatctctgtccactcttagttcatctgatgcactgctgtcagattaattttcctctggttatttcacttcccttaagtattttggcagaaaatttcaattttttaaataacattatagagccagcctatttcaagtgacaaatacatatttatgccactttatatctggaaagttctaaattgttcagtatttaatggacaggagcatttgttaataaatctttactttttacattttaggaagattctaactttactccttttttaacttactagcaaatcacttaattttttcgagtctcagtttcctcacctgtggaaaaaagtggagtaatagtagtgatctctgagggcttttgtaaggattaaatyagatgatggtttaacatgctttcattgtgtcctggcagattgtaagcactagagcagtggtccctgctgttactaaaagtgatggcattgaagaaaggcatgatatttaatgggatattttttaaatttactcacaagtttgtagaaatattttacttaactgacttgcgtatatttttcccacgtgaaacagacgcagtaaaacgcaggactcttcccgcttggattcgcgaaggtcttgaaaaaatggaacgtgaaaagcagaagaaattggagaaagaaagaatggaacaacaacgttcacaattgtccaaaaaagaaaaaaaggccacagaagatgctgaaggaggggatggccctcgtttacctcagagaagtaaatttgtaagtagaatccccaacatgaaactccatgtgaaaatcttggttgtgtgaaaactttactgaaatagatattttagcctataggaaagtattagagtgatgttcctaagattacgttcattaagtatattgaggattctgattttatatatgtgttactgaagatacagtaaggagaaaatgggacaacaagtttataaacacttcattccagagagctggctagatcttgataaacaatctgtattcattcattgtggtacagatgactccctggtgatagattataaaacaaagctacattaaaatagtaatagagaaataaaatctccctcttttgaacatttaaacatatacctgaggatgtaataattttgattgtttttgacgtgagcactggaagtataacaacattttaagtcttcaaatcttcctcagttagatggcttgagtggtttaggaacttttttattcagcaggtatgatagccacagcactggccagtatgcaactcaggaaatttgtctgtcttgcacggccattttctgctttagaaataagtctcaagaagagcaaaataactagattttggcaggtattagttttgcttcaattccataaattacttttatttttcccaaaagatctatgcaaaatctgtgtttttattctagatgttaaataacaaaaataagaagcaacagaaagacactgctaaaggttactctttttttttttttttgtctttttaggcagttgggggatcagggtctcactctgttgcccaggctggagtgcagttgcacaatcatagctcagcgtagccttgaactcctggactcaagcaatcctctcacctcagccttccaagtagctagggctacaggcgcacaccacgactcccacctaatttttgtattttttgtagagacggggtttcaccgtgttgcccaggctggtcttgaactcctggcttcaaatgattctcccacctcggccccccaaagtgctgggattacagacattagccactctgtccagtctttttttaaaaaaaatctttacatgaaatagtggtgttccaaattttttttaagcatcaaaaattgtttggaaattttccttcctcttttctcccaaatgcctgtgggattgtgttacatatatttttcccctggttcaggtagtctttccacagtagtatttaggtggtcatcttgtcttttacttagtgggattattaaaagtgactaggggacacttctctgacaaaggaaagggtcacatgcaatctggatcctgaaacctaaaaccatacaaagacaggagacaaactgctggcatttgtttaatctgaagtagacctcatttttatctttttattatgagctaaaaagaagcatgttttactgagtttcagggccagctgagatcttggccctgaaaaatctgattagagatttttcattttaagtcgtgcaactttaggtaaatagcttaaatatatagctgtaaaagttatactgaataatatgtctatggtccatttatccaaagttctataagtgtctcatttcaggcccattatatgtaatagatagtaattaaatcagtctctgggcattatgtttttctgggtatttataaaataaggttaaaattgactaagggaaaagtaaaattgaaaaaacaatttattttcctaagccttcttgtaatcttacatttttcccaggttatactttttaaattatcaaatgaaatctgtagtaaatgtaatttagatagcagtttcactcatatttctgtttcatagactttttaatttggggtttaagattttctgtatgtaagataaggattttacattatacacatgaatttggactaccatactattgttttttataggatagtgatgaggaagaagaagacactgaaaatgttgaggctgcaagtagtgggaaagtcaccagaagtccatccccagttcctcaagaagagcacagtgaccctgagatgactgaagaggagaaagagtatcaaatggtagaatgttaaagttcttactatgtacatggatttatttcgtttgcaattttttttggagacaatattagaggaaaaaacagaaactagaactgctgaccagtattattaattgaagagatactccttttaacttaaaacaattatagaaacctttattaatagggacttttttaaatgttttgatttcaggctggggtaatcctagtacttcaggggaccaaggcaggaggattgcttgagtccaggagttcaagaccaacctgggcactgcagtgagaccttgtctctacaaaaaattagccgggcatagtgaggtgcacctgcagtcccagcaactcaggaagttgtggtgggaggattgtttgagcctgggaagcagaggttgcagtgagccgaggtggtgccactgcgttccatcctgggtgacagagtgagaccctgtctcggaaaaaaaagaaagaaaaaagtgttttgaattcagtgtgtctactatacagatacatttataatatttttttctttgatccgtatgatttcggaatatttatttatttatttatggagatggagtctcgctctgttgcccaggctggagtgcaatggcaggatctyggctcactgcaacctctgcctcctgagttcaagcagttctcctgcctctgcctcccgagtagttgggattgcaggtgcccaccaccatgcctggctaatttttgtattttttcagtagagacaaggtttcgccatgttgttcaggctggtgtcgaacacctgacctcaggtgatccgcccacctcggcctcccaaagtgctgggattacaggtgtgagccactgcacccagcctggaattttgttgaagttttgatgttacagaaaaatgttcaagatactttattccttgaaatggctgctctgatgtctaaaaatattttataaaatggttttgtggctgggcacggtggctcacgcctgtaatcccagtgctttgggaggccaaggcaggcagatcacttgagatcaggagtttaagacaagcctggccaacatggtgaaaccccatctctactgaaaatacaaaaattagctgggtgtggtggtgcacgcctgtagttccagccacttgggagactgaggcaagagaatcacttgaacccaggaggtaggggttgcagtgagccaatatcacgccagtatgatccagcctgggcaacagagtgagactgtctgaaaaaaaaaatggctttgcattttaatatttttgaagatgtcacactattagtagctataataattagaaatactgtataaaatgctcttttttagatgttgctgacaaaaatgcttctaacagaaattctgctggatgtcacagatgaagaaatttattacgtagccaaagatgcacaccgcaaagcaacgaaaggtatattttggtgtttctggttttgcttttcctggggtattttggttctgatgactattttggcctttttttgttgtccttgttggatttctaccagatatttgaatattctcttgcatgttttaactcttaaagattagattcgtagacaccatattaaagctatacaaatatttttgttttatctgacctacatgagtacaaattagcartcatgctgttttcctctaaaatgtattgtggaaaattccaggtgttcagtttatttcacctgattttttttaatagataacatggcattgttgtgtgacttctgatacagtttattttgactaatgaattttgaattatctacctacaatttttagtttaccacttatctcttacagaagcaagtgatttcctacccctagatttttagtaacaccttaaaaatgtattgaaaacaaaaattaagttacatgtcataatctcagaagtagacatacagatatacctgtcracattttttctcattataaaccaatttcagctcacatcagagttataatttcaaagccagacatgatactggtttaaaatgaatgttatgtttttaatgtttcttctctccccaaaaagcagcaatagtagtagatttaacaataccatagactcwtgactatgaaatcgtggctatttgtgttaacatgttgttcctgttgttgatgtgatacaaagctcctgcaaaacagctggcacagtccagtgcactggcttccctcactggactcggtaagtgttttccatatttgtgagagggcctaaagggaaaaatcacacatacattgtctctctgcgtgttctattttgaaactgtattagtcctactcagtttataaaaacctaggtcttagggttatgtcatcctgtctaaaaaggtttgcctatttttttgactaacgcattcacagtgagaratttataaatgtgatggttaattcatagtttattggggcaggttatattggaagatttccttattgctccaatatatgcattttatatatatataattatatatgaacacctatagtttgtacttaataattcataatttagccatgatagtatctaagctcactttcaraattattgcatacatgccttagggaagaacctatccactaatgcttttaataacttacatagattgtgttgcggcaagtcaagttttaatatagaggaaagggtttatcttatcatagtaaaatagtagtgatgtgttcataatttactatttgcatggtatattatcaaggctgtaaaagcttgaatttgccttttccacatcttcatttcaaattaatttttgtgaggacccagagaagtgggtagaaccaaatgcccatgtggttttgttatggttatttagatcatttcagggtggggagtattttcagcaccataatatttctgtaccagggagattatagtattctaatttttttagggaaaaattgcttagctctagggatttctaaactttgaacaataaaagttaattttagaaatactttcagggtcatcattaagctttagcgtggctttgttactgccctgttaagtagttttgttggttagtatggacagtacagcaaacccattatgattcctttacagtgagaaaaatatgaaatagtccagaaagaataagatattaagtaacctttgcctgaaggttctgtgaactccttaagcgtttgaatrtatacttctccccaccccgaataagcgtattcttctgggaaaaggcaatgaaaaaagaaatgaactttcttctcagaccttgaaaagtttttagtgcatagtataatttttttcatatgatagactgagctttatgcacacaggtggactgggtggttatggatcaggagacagtgaagatgagaggagtgacagaggatctgagtcatctgacactgatgatgaagaattacggcatcgaatccggcaaaaacaggaagctttttggagaaaagaaaaagaacagcagctattacatgataaacagatggaaggtgtagtataccttttagacttaattttggtccagttttrtatttctttttattttttaactaacctaaaaatatcaaaggataaaataaaggctatattataaataatatgtgatataactgaaactaaagtcacaatttttgtttggttgttttaggagccatttattgcagtggctataagccaagctatttagggtatttttatttcttgctaaaagtcttgaaatgaaaaagatgacttttgaaatgggaaaaatatatttgtaagactattgaaaagtaatttgtagctaggatatataaggataatagagaacctagaagttttttacttaagatactttacctaatactaggaataacaaaagagaaaatttacttagaatttcttctttgaaaaatstaaggtaattaagagttagcagctaagacttctctataaaccacttacttacctttaaaattttgctttagttggacaaaagggaagtcttttcctacttgcctcacacccacctctacatcttgatactgtattttgctacactgtccaggagggtaacgtaactaactacaagctatagagaacttgaaatgtggctaggcatgtgctgtgggtataaattacatgctagatttcaaaaactttacttgaaaaagagaacagaatttttttaaatttattatgtgttgaaatgataatatttttggtatattgggttattttacctgtttctttttacttttttaatgtggttactaaaaaattttgaattacttacatggcttgcatcgtaattctattgaaaatggtgttctattgttacagtctggtagcttgacatttggtagtatgagaattttacatgaacattttcttagtgtttttgtctttttctgtttcagaagaaaagcagcaaacagaaagggttacaaaagagatgaatgaatttatccataaagagcaaaatagtttatcactactagaagcaagagaagcagacggtgatgtggttaatgaaaagaagagaactccaaatgaaaccacatcagttttagaaccaaaaaaagagcataaagaaaaagaaaaacaaggaaggagtaggtcgggaagttctagtagtggtagttccagtagcaatagcagaactagtagtactagtagtactgtctctagctcttcatacagttctagctcaggtagtagtcgtacttcttctcggtcttcttctcctaaaaggaaaaagagacacagtaggagtagatctccaacaatcaaagctagacgtagcaggagtagaagctattctcgcagaattaaaatagagagcaatagggctagggtaaagattagagatagaaggagatctaatagaaatagcattgaaagagaaagacgacgaaatcggagtccttcccgagagagacgtagaagtagaagtygctcaagggatagacgaaccaatcgtgccagtcgcagtaggagtcgagataggcgtaaaattgatgatcaacgtggaaatcttagtgggaacagtcataagcataaaggtgaggctaaagaacaagagaggaaaaaggagaggagtcgaagtatagataaagataggaaaaagaaagacaaagaaagggaacgtgaacaggataaaagaaaagagaaacaaaaaagggaagaaaaagattttaagttcagtagtcaggatgatagattaaaaaggaaacgagaaagtgaaagaacattttctaggagtggttctatatctgttaaaatcataagacatgattctagacaggatagtaagaaaagtactaccaaagatagtaaaaaacattcaggctctgattctagtggaaggagcagtyctgagtctccaggaagtagcaaagaaaagaaggctaagaagcctaaacatagtcgatcgcgatccgtggagaaatctcaaaggtctggtaagaaggcaagccgcaaacacaagtctaagtcccgatcaaggtagtatactttttaaagtattttgtctgatttttaaaaaaaattgactgaatttattcaaagttgaaagtgtcctttctctctctctttaataaactcagtttggtacttgataaataatcatagtcttaaatgttagaaatcctatataatattatttattwaaaattgcagatttttaatttaaaatacatttttatttttaaattttgtcttttcccttttttttcagatcaacaacccctccccgtcgtaaacgctgaggaatgatgtggcaagaatgccatgatgttctttaaaaaaattccatgagttttaagggcttgtctcattatagaggcacattgtggctgtgtaggtgaaaccagaatcttttttttttttaatctgtaaataggtgtactttttccaatgctgctccaagttacttaataggatttctttgtattacgtttttttcaaaaaatatagtgcataataagactataaacatgccattctctttcagctgtaatgttcttaaaattattcttgaatgtactgtgatgtcaataaagctctttagttcatttttgttaaactcttgcaccttaattttatggttttaatctaaggaacgtacttttataaaaaggcagctggaattttgtataacaggttttaaaggtaccttctctcacctcccccaaagaaaatggtttttacttaatagtttgtcaaagtttgtaaattgtacccatggacttttgccagattccaactttaagggtatgaaagagggctagaaatagacctttacttttcatttggaagtatttgacaactttctaaacwtttcttcctattttggggattttcaagtaatatattctctgtgtgtataacgtgtggttcactcctgtaaaatgaaattgctggaatcaatcaagccagtgcaccagtagagttatttgtaaggaacgattgtgtttgacagtaatagtcaagtctggaactatattctacagtcacccacttctgttttagaagcattttgaaacactttttggggttatagaaataagactcatgattcaatatatttatttatatttttaaagtataatatgacctcaaatcaatggaggaatgctgtattatgcaggtttgtgtcaatttcmtgacattaaaattgtctgattttgtccgtttcttaaaattatgattagtgagtggtctaacagtttaaggcattgataacttacaagtagartggggctctcaaagcattttaactcagttgctttagggtccatttttttatgtaatcacttactcagtgataaatgaatctctgaaaacaaatgcttttacattttaatttaaaaagaaaacaggtgcaggccacagaaaagttttaaagtatgccttcttaccagcaatagttcattttaaaaatcatgccagatttttgccaagatcagtgtttcctcaacatgaagatagaaatagatttgtatagtgtgctcttgtacctctacatagattattatataattttgagcagttacacatttatctaaaggaaataaatcaactgtgaataaatgcatgtttaccaaaatggctgtttacagtgcatttagttctgatatttataaagatgacatttcacagaataactttaaaatagtttgaaattctatatagtttagacatcgatcacatctggagacaaaataaaatgtgcaatattttttatgtaggcgagctaacacagtgtacctaattgcagaattatctgattaatttgtaatagataagttgtataacattttcatatcttaaaatgttttttagatcaatcttgaagtgaaatattttcaaaataaaattctacagaaaaattctgttggctatgatatgcacatttttgggcaagttatgaactagagccaaaagtagtatttgacagttttatttactctgccgtaatttgcaagcttatcagttaagtctgtagtttttttaaaagccgtcatgatatttgtgattattagtacataaaccagtgttataatttgatatttgggtttttcagacttttagtggcagatttagagaattctttattttcttgacatgtgatatagtatttatttaccttgagtggtaaggttttataaggtagggtttccatgatttaggatgtgaatgcaaaaacttacacataagttaattagatgtataatttggttatgaaatcttttctaaaataataccaccagaaaattaacagatcaaatttttgagacaatccttggtctggattggttaatgaaaatgtcttgtttaagaggttctattaaaaaatatttctagtgtattagtcataattgtttttgtggagtgggggtaaaccacaccattaagggaataaaatgtaatttgaaagaggtgattataagatttgtttcaggccccaaaatataaataaaaattggtgtggaatctcgttagtgtatatgttttctgccactataaaattacctttttagcatctgtttctagtggtgtaataccaagtaggtaaatttcgcagtctatttttaagtgtcctgagttttttgtttccttaaacacatgaaaggtaatagtaaagaattttttactgtatttgggaatttttacataggagttgtattaggtttccagtctctgtagtgttgccttacagaaatctttacatctaaactgagtttttcttctcctacataaatttaaatgtattttgatttactgaagtttctaaaatgtactgagtacagacatacaccacataacgacgtttcagtcaatgacgggccacatgtacaacagtggtcccataagattataatgtatttttactgtaccttttctgtgtttaaatacacaaaaccatgatattacagttgcctacagttttcaatatagtatttgtagcctaggagcaaaaggctataccatgtagcctgggtgtgtagtagtctataccatctaggtttatgtaagtatactctgtgatgttcacatcacaatgaaatcacctaatgacacatttctcacatgtccccaagttaagcaactgcatagttgctgtttcttgctttttgagatggagtctttctctgttgcccagcctggagtgtagtggcacagtctcagctcactgcaaactctgcctcctgggttcaagtgattctcttgcctcagcctcctgagtagctgggattacagcacccaccaccacatctggctaatttttgtgtttttagtagaaacggtttcaccatgttggccagctggtctcgaactcctgacctcaggcgatccacccgccttggccccccaaagtactgggattacaggcgtgagccaccgctcccagccgattgcataaatggaagtagtagtagagtcattggattgagctggctctgtttcttgatgtgttttaggtaaatcactaaatcaccatgggccttaacttcttcagctgtgtaagggaggaattagatgaattttttttttttttttttttgagatggagtctcgctctgtcaccaggctggagtgcagtggtatgatcttggctctgcaacctccgcctcccaggttcagacaactctcctgcctcagccacccaagtagctgggactacaggtgtgcgccaacatgcccagctaattttcgtatttttaatagagacagggtttcatgttggccaggatggtcttgacctcgtgatccgcctgcctcggcctcccaacatgctgggattgcaagtgtatgccaccgcacctggccaaattagattagttctaaacacatctagctgttaagtttttcagttttaagtggaattttgttgtgtaaaatttaaaagagaaaatgggctttagctcttcaaaaagcacacatgggttatatttatatcataaaggtttatcagatacctatagagttcctttaaagataccttggttaaatctgccacattctgattttggtagaagttatgatagaattattctgagttaccaatttatgtaaaatttttaagtaaatgtgaaaacttaccagttaaactgagtggatgtagtggtatatctcttttttttttttttttttgagacacagtcttgctctgttgcccaggctagagtgcaatggcgtgatctcagcttactgcaacctccacctctcttgttcaagcgattctcctgcctcaacctcccaagtagctgggattacaggattccatcaccactctcagctagtttttgtactttttgtagtagagatggggtttcaccatgttggccaggctggtcttgaactcctgacctcaggtgatccgcccacctcagcctcccaaggtgctgggattacaggtgtcagcctccacgcccagctgtatatcatttcaaagctacaagggagcactttacccttggatgaaaaaaaaaatgtttataaagttgaattacaaaacagacattaagagttttagagcaaaataaatacgcagacttacgggtgagaccataacaataatagtctggggaaatatctccaacaatggccatatactgcattacagccattacaactttccaataccacttaggcttaagggtcattgggaaagccctttgttgatgtttgtagcgagaaatactatgagctagttttgcttatttgggccagacctgttctgggtgttcaaaagacatacttgtcagcataaagcaaatcattgattccccttcttgttaaaatgtagtggaaaggctctgaagcccagtgaagtgtggtaccttcaaagaaagtacatataaagctcctagaactttatttaattgtgcttgcactttgctttttccttggatgtgtcactccaataaatacaacacgtgctacattttcttttgtgcagagctttctgccttcatgtggagagaggatcatgtatctaagggtagaggagctctgaagaggacatagcaactgaaaagtgcgaccacccttaggaggaggtcaatattttagctaagaaccatgaatgaaagactattgctgtctgggtgaggtggctcccacctgtaatcccagcactttgggaggctgaggcaggcagatcacctgaggtcaggagcttgagaccagcctggccaacatggtgaaaccctgactgaaaatacaaaaattaagccgggaatggcagcatacacctgtaatcccagctacttacgaggctgaggcacgaagaatcacccgagcctgggggacggaggttgcaatgagctgagatcctaccactgcactccagcctgagcaaccgagtgaggctgtctcaaaaaaaaaagaaaaaaaaagattcctgagcggtaaatttcgctaactgaaagaaccctttaccaatttgaccctacctgttgaaaatacagaataattttttgtcttcaatgttggagattcgtcattgttcttacccaaagaaagactttgtgcatttagacgtaaaatgttactgatcactgttcctagctctaaatgaagtttgcctagactgagccacagaagcctcctactacatgatgtatataccctgtacaagataatagtcatttgcagaaaataagttttacatttggccttctggccatctgatatttgagtgccttgaaaggggaaacaattcttcccttgaggaagaagtgctcccatactcttgcattcttagcagtagggtcaatgtcttacaggaatataaaagtccttgaagagacatctgttaagtgtgaaatagagctacatggcaataaaagaagacacagcacgaagtaatggcctgattgaggtcaacttcgaacatgaggtttgaggtgtcctatagcaataaagtatcttcaaagttgtttatgatagtaaaaacatcttgcagtttaattccatgtgcaatttgctaaatgagcgtgaaagtatagccatacatacataacactcaacaatacaatcatgaaagtcggctgcaggccgggcgcggtggctcacgcctgtaatcccagcactttgggaggccaaggcgggcggataacctgaggtcaggagttcgagaccagccaacatggagaatcgcttgaacccgggcggcggagattgcagtgatcccagaatccgagatggggactgtactccagcctgggcaacagaacagactctgctaaaaaaaaaaaaaaaaaaaaaagtcggctgcagacggcgaaagtgatctcggaacctttatgttggggatcttttttcgggagggaccggaaaagaggtgggatcgtttgtcgcgatgtggagtggccgtaagctgggctcctccgggggttggtttttaagagtgctggggcctggaggctgtaatacaaaagctgcgcgtcccttaatttcctcggcgggtgagtgtgtgtgcggaggtccttcgcatgcagtcaattgcgcgcgctggcgtctctgcgcatgcgccgggggtggggcggtgggttgtctctggacctcgcgaggggtcagcgcgaaacctaaggcttggtcctggccccatctctctccattgtaaacctcgcatagtcccgttggcggacgccggggaaaagagctcaggaccagtggtcctgtctggaaaagcgcaggccgcgggtctcttgtggctgagctccttgccccaggagccggcgacccgctctgcgtgtgctgcagtctgaaggtcatgcatctttcctttgccggggcaggaataactcacgcctcgtagttatgcatagctttgtatctgtgttttgtttgcacaaagcttgctgtttttttcagaaagaatttaaggcagctgtattactttttgattaataggttaatccaacagactgcatttgcaaatgagatcaagaaaataatgcactgctcagtgcttgtagacagcagtctgattttcgaactctcagtattaagtagaaacttaagctcatctttcacatggaactcttaacaaatactgtatgccagacactggtatgagcactgggaatttaaaaatgaatgacaccgcaaggatctctttaaaaatgttaggataaacctaagatcaggatataatgaacaaaaaaatggggaatctaaccgcccattaataaaggttattagttggtactatcatacagtgaaaaatagtacagccaataaaaatgatttaaatctatttgtacccacatggaaaagtagtaagatatagtgttaagaaagtaaagtttcattgtttcctggaaggagccaaaaaaaaaaaaaagttacaaatcagtatgtatagtgaacttggagttacaggtggagatatatagagaaattttgcagtgattgcctgtggtagagtaggtgattttctatcattttatcctttatatacttttctttttctgaactttttttagtaaacatgtgtcttttataatcaaaaatttagaaaagatataataaacctagttccaatttttgaggggtgaacatagaaggagcatttaatccatatttgggatcaaggaaacttcttgaatgggatatttagagaaatcttgaaggaggtggccagttttagaagcagttggtcgagacaggcagctcacttgaggtcaagtgttcgagaccagcctggccaacatggtgaaaccctatctactaaaaatacaaaattagctgggcgtggcggcaggcgcctgtaatcccagctactcgggaggctgaggcaggagaatcgcttgaacctgggaggcagaggttgcagtaagccaagatcacaccattgcactccagcctgagcaac

SEQ ID NO: 96849 - DNA, 111479 bp, Homo sapiens
  misc_feature (1)...(111479): n = A,T,C or G
ccaatgtcaatgaaaactgactttttacagaagattttagcaaacaagtaaatatttaaatgctcaatatattcacagcacatttgtgctgtgaatacaaattaccagaaattattcaaggaggaaccctctctcgagtgaactgggatgaaagtagtaactcttctcccacctcctgttcccagtgattttcatgttttcaggccgtgaactggatggccattcacaggggatggggaaaaaacccaaagaggaagcgcgtctggggtgagcttccccacctctctccgctgcagagcccaccaccacgcaccttcgttcagaacaatctttacccaatattccttaggttaaaaagctctaaggataaacaactgaactgcaggagacagggatgtgacagtgtctttcctactcacgtaacactcaacacaacgcctgacaccggacgtgggtgtcgcatcaagcagttctccaggggccaccagctgggtgtcctctaacttaatccaattcagacactatctaccaggaattagcatcagatcccacaggctgaaggctcagccccaaagactggcccccatttcagatggcagtcgcaagtagtgggctgtcacctccggttctgaccgacaggctacaaagcagggctcccactatccctcgcttcttgggttccattaatttactgcagcagcttacagaattcagagagctaggtttgccagcttattataacggacgttacagaggatatagacgaaaaggcagatggaggagaagcgcagagcctccctgtgctctccaggccaccaccctgcagaagcctccacctgttccgctgcatggagcccctgaacctggtccttttgggtttctatgaagatctcattatagaggcgtgattaatgacatcactgagcaccggtgatcaactcaactttcagccctcttccttctgggtggcagggggagacctaaaaggtcccaccctctaatcacgtggttggttccctggcaaggagccccagccatcaatcaagtcctcgtctacaaaaagacacttaccactttggaaattacaagggtttagacgctgagtgccaagagccaggcagagcccaaatacacatttcttaattatatcacaaagagcctttttgaaaaacactatcagggcagagaccggcacttaaactaggagactggagaatatacaagctcctgaaacaacttttttttttctttgtaaagagacagggtcttgttatgctgcccaggctagcctggaactcctgggctctagcaatcctcctgcctcagcctcccaagtagcagggactacaggtgggagctgccacccccactgagattaaataacagtatttttttcttagtggtaggtgaagctgttcttgatgtgatgaaatgcctcgcagggctgctggaaagcatcacgtgtcagaatttagaacacggccaggctcagtggctcacgcctgtaatcccagcattttgggaggccgaggcaggcagattacctgaggccaggagttcaagaccagcctggccaacatggtgaaacctgtccctaataaaaatacgagaaaaatgatccaagcatggtggtgggtgcctgtaattccagctactggagaggctggggcaggagaatcgcttgaacccaggagatggaggttgcagtgagccaagatcatgccactgcactccagcctgggagacagagtgagactccatctcaaataataataataatgataattccaacatactaaatatgcagatgtccgaaaatattctttactgtatttattctcaaaagttggctgggcatggtggctcactccagcgacagagcaagactccgtctcaaaaaaacactttcggaaatattgaaaactgacccagcatggtggctcacgcctgtaatcccagcatttttggaagccaaggaaggcaaatcacatgaggccaggagttcgagaccagcctggccaacaaggcaaaaccccatctgtattaaaaatacaaaaagtagccaggcatggtggcacatgcttataatcccagctacttgggaggctgaggcaggaaaatcgcttgaagcggggaggcagaggctgcggtgagccattgcactccagtctgagcaagagaatgagactctgtctcaaaaaaaaaaaggaaatattgaaaatactgccttaaaaaataatcgccgttttattttcaacgatgctaaaattgagacgaacaagagaaaaaaaagggaaaaaggcagttgccagtcactgcagtgccggacaccctgctatggaaactagtcaaatcctagggtaacttctaaagcacttaccatacaattaaatagcctgacaagcctgatctgaatttataaggctgcaataaaaagctcaacttttacacaaattgggtactccttcccacaagctcaaagcgtctagtctaggagaaactgcccacacgtaggaaggaaataaatgaagtaactacaccatgaagacacaacgccttgatcactctcagcccaagcatcggttacacgtggctcatggattcccaagcggtctccaggaaaaacagaagagaacaattctcaacactaaatagcaaatagaaagagaaagaatagttaatgagccaaaaaagacatttagagttaaaatcctggatcagctgaaacattaaactgaaaggatgattacagtttgagaagctaatctgtaccaaaaaagtaataaagcaagacagggactccaggccacctctggcctgctccttggaagacttggcccttctggaaagaactgatacagtcacctacggtcttgcacaatgaccctgaagggcagctcttctcataaagcacaaaacctgcgttaccacaaccaggagggccatgacaaagtcggcttcctgagccttagtcctcaggaccagatgcctcacctgtcactctggccaacactgcaccttcagggccacgtgggcccgctgaggacccacagccgtcacccagcctggccaaccctgtcgtcatattagcatcctctgactcttcccaattccagaagtaatctacgtattagaaatctgtgaattcgatgggctcaaataatgctttttaaaaaagtagcagaatatccaagggctcaaaataatcattaaaccaaaagttttgatttttaaaccataataacaattgaagcgttagaaagaacactgttctgagcaggagagtctggtgggccaagcagtacagacccactgggaattctcagcagcctactccaccttcagggacaagtttcctcaggactgaggggcgtagactagatgttcccaaagtctttagtttgtggtgtccttcctgcttttcatgctaaaatgtcttttatgaaaaaaaaaagtgtaatatagtaatggtcacagtaactgacagcgtttttattttttaatttttcactttttgagacagggtctcactctgtcgcccaggcagtggtgggatctaggctcactgcaacctccacctcctgggttaaagtgattctcgtgcctcagcctcccaagtacctgagactacaggtgtgcaccagcacacctggctgacttgtatttctgataacctttttttctttttctttttttttttttttttgagacggagtcttgctctgtcgcccaggatggagtgcagtggcaggatctcggctcactgcaagctccgcctcccaggttcacaccattctcctgcctcagcctccagagtagctgggaaatccaggtgcccgccaccacgcccggctaatttttttttatttttagtagagacggggtttcaccgtgttagccaggatggtgacctcgtgatccacccgtctcggcctcccaaagtgctgggattacaggcgtgagccacccagcccggccctctgatagccttttaaaaatacgtttaaatcataaattggcaactccatgttattcccgaaattgtcctggtgtatcgctggctacatcagcaagggtatttttatttttctcactctagtatcaacttagccaatctgcagaggctgatgtgttcccaacttaaaggcttaagagagctaaaaaacaaaagaaaaacaaatgagaccagctctcatcagaagtagcttcaggaaaaaatctctgagacaggaagcaaaaatatgcctgtaaatccaatcaaggttgagatgaaggcaaagctggctgttatcggcaatattaaaacctggaaaaataactctctttatagatttagcgcaagagataaagaaaaatcaaactggaatttcacagggtgcctgtcccactaaggaagtctctggagatggacaattctgaggggcaggaggacaaaatcaccggctctgccacaagctgttcctccgatccagaccttgggaggtctgactggtcagctctggggacacgtagacccgcaaacctgccaccgggtcttcggtttttgccgtacccccagctgctacactcacagcacacccagccataacggagtaccccatgtgccctctcccaccctctcagatttctggttgtcatgcaaatgcctggctcccgaagtgagctccaccctgtcccctttttcaggaaagaaaaggggaggcgctgggctctcagaacacttccagggcactcgggaacccctccctcggtggcttctcaggaacacacggacaccctcgctggaacttctgcacgaaccggtggcacagcccgacgatatctcccacctcgggaaccccagccacgctcccgcgccgctcgccagccccgccccgggcgccctcaccttcctcgctcacgtcgtccacgaagtcctcggggtcgctgaaggagggctcgtccgcgtcgccgttctccagcgcccggggttcggcctcggccgctctgccctcgtttcctcccgcgtcctcggacaccgcctgggcccggctgtcggagcgctcgtcccgagcctgctctcctggggcctcgccctgtgccgggacagggggctcagcatgcgacccgggcagctcctcggcggccggcggcgagggcgactcggacgggccggaggccgcctctgcctcggccgccggctcggtcctcacctcggactccggcccggcctccgcgatccccacctcctcactggaggcctcggtccccgcggcctccggagcgccgggccccgcgggccgcagcagcccctcggctggcggcggctcggcggccggctgctgctggccgggctcggcgcgctcctcggccgcctcgggcaccgccacgttctccgcgtcctgcatgggcccaacgctgcctactcgcagggctccgcggccgccgcgcttccgactctcccaggccgcaccgcgcgccgcgacggctacagcccagccatgtgcgtgcgacggggaggccgcaccaaggcgccgcggggcggggggcgcacccacgccctggggcctcacgaacgaccctgagaggactcgcatccacaagaccgcgcccgaaaatcatcaaactgatatatttgtgacaagaaagtgcttaattccattcagcaaggttgtttctgtgcatcagtaaactcatgggagcattgaccaccccatgtgtggcagcagatggttccgtccaacatggcgtcctccccctttcctttcccgtcggacgctgcggggcgggactgaactatttgtggagctgaaggcggggacaagaaatgattttagtacccggaatgctaggaaaatgtcctctaactcaacagttaataccctggaagagtggagactcaacaggcgattgctcagggcgtctgagcctttcgctagggaaaccgtttagtttacgttactaaagtcccccctgtccgtgtctgtcacttggactcgcctactgactgagcaaaaggccagactacttcaaaatagaaaaggaattcggggcgagccagagagggcccacacgactagaaggacgactgcctggcgcgatacaaaaatgtatggaagtttctttaatcgcttacccccagtccttccctagcggccgtcactgcctgtttccccccattcgggctttcacagtggttcagtccatccgaggccgccgccttcagcgcgggacagcgcgggtcacgtgggggcgggggcgggtcctcgccgcgtggagctcgaggctgactccggagggaccggagcggttcgctctgcgcgggtgctcacggnacgggcattgggtgcatgtggcttctatcttgttttttgccggagtggaggacaaccactggttgggggatgtcttaatcatcctagaaaacaacccagtggatcacgcctgttatcccagcactttgggaggctgaggtgggaagatcgcttgagcttaggagttggagaccagccttgccaacatagcaccaccaccccccgcacgccagccctcatctctacgaaaattaaataaataaataaaacaggtggtacccagaggctggggtggagagtggggagtgtttatcggggacggaccttcaatttgggaggatgagaacgttttggagatgacggtggtgatggtacaacatggtgaatgtacttgatgccactgaactgtatactaaacttcatattaaaatggctaggccctgcgcggtggctcacacctctcttcccagtactttgggaggccaagacaggaggatcacttgagcccaagagttcaagaccagtcagggcaacatagcgagaccctgtcttcgaaaaaataaaataaaatgccaaaaaggtaaattttatgtatatttcatcctatagtttttttgttttgtttgttttcagagatagggtctcgctctgttgcccaggctagagtgcggtggcataatcacagcgccgctgcaatcgggaccttccagcctcaagagaatcctcccacctcagcctcccaaagtgccaggattacaagcgtgaaccaccgcgcagggcctagccattttaatatgcaatttagtgtacagttcagtgacattaagtacattgccaagtacttgggactgaaggtatgtgccaccgtgcccagctaatttctttatttgtagatagcatctcactgtgttgcccaggctggtctcaaactcctggcctcaagcagtcttcctccctcagcttcccaaagtgccgggactataggcatgagccaccacacccatcccatcctaacggtgtttaaaagagcgaaaaagaagcagagtcttcccatgcctagtaccaggtttgactactcctcatcatgctgtcagtggtgtatctttgggcaggtcacttaatgcctccacctcagtttccgcatctgtacaataagggatgacaattttttttttttttatttagacggagtgttgctctgtcgcctaggctggagtgcagtggcacgatctcggctcactgcaagctccacctcccgggttcacgccattctcttgcctcagcctcccaagtagctgggaatacaggtgcccgccaccacgcctggctgattttttttgtatttttttagtagagacgaggtttcaccgtattagccaggatggtctcgatctcctgaccttgtgatccgcctgcctcrgcctcccaaagtgctgggattacaggtgtgagccaatacgcctgggagtatgttttttctacatatgcatgcttacaatagggcacagtaagagattaacagcaataactaatagaacaattataacaatatattgtcataaaagttatgtggatgtggtgtctggtggtgtgtctgtgtctctctctgtcaaattttcttcattatgtaatattttccaacctaattgaccataagtaactgaaacagtgcaatgtgaaactgggggtcgggggggctactgtgtttggaagcagtcttcccagatgtaatcaagatgaagtcaaagtggacgagagtggaccctaaatcagtgattgatgtccttattagaagaaggaaattatggccgggcatggtggctcacacctgtaatcccagcactttgggaggccaaggtgggcggatgcattacatgaggtcaggagttcgagaccagcctgaacaacatggtgaaaccccatctctactaaaaatacaaaaattagccaggcatggtggcacatgcctgtaatctcagctactcaggaggctgaggcgggagaatcacttgtaccctggaggcagagggcgtagtgagcggagattgcaccatttcactccagcctgggcaacgagcaaaaatccatctcaaaaaaaaaaaaaaaacaaaaaaccaacaacaacaacaaaaacttactcgattttttgtttttattattatttttatttatttatttatttattttttgagatggagtctcactctgtcgcccaggctggagtgcagtggtgctatctcggatcactgcaagctccacctcccgggttcaagcaattctcctgcctcagcctcccgagtagctgggactacaggcgcccgccaccacacccggctaattttttgtatttttagtagagacgggtttcatcctgttagtcaggatggtctcgatctcatgacctcgtgatccgcccgccttggcctcccgaagtgctgggattacaggcgtgagccactgcgcctggcctattattattttttaacagggtctcactctgtcacccaggctggagtacagtggtgccgtcgcacctcactgtagcttcagtctcacaggctcaccttagcttcctgagtatctggtagtacagatccacaccaccacatcgggctacctttttgtttttctgtagagatggggtctcactatgttgctcagtctggtcttgaactcctgggctcaagcagttctcccaactctgcctcccaaagtgctacaggcatgagccagcaggcctggcctccgctggtctatttctgagcctctgaggtgaaggagtgggaaacctgaggcaccgcaccaaccctggcagcagagatggccggatgaggctcccaggctgacctgcagcgtggcctgtgttgtgcttccaggggtagatttttttctttttgtttttgagacaaggtctcactctgtcacccaggccgggagcacagtggcgcaatcatggctcactgcagcctcaaactcccaggctcgtgatcctcccgccgcctcctcctgagtagttgagactataggcgtgcaccactgtgcccggctaattttttaaattgtttatttagagagcgaggcacagtggctcccaccggtaatcccagcactttgggagagtgaggcaggaggatcacttgaggtcaggagttcaagactagcctggccaacatggtgaaaccctatctctactaaaaatacaaaatttagccgggtgtggccgcaggcgcctgtaatcccagctactcaggaggctgaggcaggaggatcacttgagcccaggaggcagaggctgcagtgagccgaggttgtgccactgcactccaacctaaatgacagagtgagactctgtgtcaaaaaaaaaaaattgtttttagagatgggggagagtgtctcactgttagcccaagctggtcttgaactcctggcttagagcaaaccttctgcgttggcctcccaaagtgctgggattataggcatragccaccgcgctcggcccaggggtaagctttaatttccmtcaaaactctttctaaagaaacgtgacttcattttaaggccaaatttatagtttccgtgaaattataagttttatgggtttgttgcatttctattgatattaacattggttcataactatgaaaatgaaaaatgttccgccacacggccccttggggaagcctgacctggctggggagagaggctgcctgagcccggagactgggccgagactaacccctcccttgctatcaagagagcctcaacgtctctaggcctcagttttcttacctcgcaggcttgggggagtttggatgagataatgtaggaaagctgtgcctttattttcctgtgggtttatcttaacagaatgagaagtatttccaagtaggccaaccaggttctgagcgtggggatttcatgtctttgaggaagaggttcagagccgggaagtgtccagtccctgagcctgggagccatgaaccgggtggtagagatccagggtgacccttccagggcccaggcaggtgagatctctagtggggtggctccgggtgtagcctgggagcctcatgctgggctggagaggactgagactctgacctcaccacctgtccaccatgggccagcctgggtgggtttgtggacattcaggacctgtcacaggaggctgaggcaggaggatagcttgagcctggaaggttgaggctgcagtgagccaggatcgagccactgcactccagcctgggcaacagagtgagaccttgtcttaagaaaagctaaattggccaggcgcggtggctcacgcctgtaatcccaacactttgggagctgaggtgggcagatctcttgaaggcaggagttcaacatcagcctagacaacatggtgaaatctcatctttacaaaaaattagttgtgtgtgggggcgtgctcctgtagtcccagcttcttgggaggctgaggcaggagaatcgcttgaacatggggtgggggtagagattgcagtgagccgagatcacaccactgcactctagcctgagtgacagagtgataaactgtctcaaaaaaaaaaaagttaaattaaaaatatagggggtagggtgaaaaaaataaactaaaaatataacaaatttaaaaatataacacttaaaaaaggaaaataatttgggagatagtggtggtgatggctgcgtcagtgtgaacatgctttatgccaatataccatatgctttaacgtggttaagatggtacattttatgttatgtacactttactataatattacgcattttttttactttttttttttttgtttttgagacggagcctcactctgtcacccaggctggagtgcagtggtgtgatctcggctcactgcaacctccacctcccaggttcaagcagttctcctgcctcagcctcctgagtagctggtattgcaggtgtaagccacctcaccaggcttttttacaatttttttaaagaaaaaaaaattgaaagtcatgattttttggttgtagttctcttgctaacttgtgggtagcctatttttttttttttttttttttttgagacagagtctcactgtgttgcccaggctggagtgcagtggcacaatctctgctcactgtaactccgcctcccgggttcaaatgattcttctgcctcagcctccccagtagctgagattacaggcgcacaccactatgcccgtctaattttttttttttaatttttagtggagatggggttttaccatgttggccagctggccttgaactcctgacctcaggtgatccgcccgcctctcagagtgctggaattacaggtgtgagccaccgcgcctggccactggctgggtaaccctgaaaaagatactgggccgggcacggtggctcacgcctgtaatcccagcactttgggaggctgaggcgggtggatcacaaggtcaggagatcaagaccatcctggctaacacggtgaaaccccatctctactgaaaatacaaaaaaattagccgggcctggtggcgggcgcctgtagtcccagctactcgggaggctgaggcaggagaatggcgtgaacccggaaggcggagcttgcagtgagccgagatcgcgccactgcactccagcctgggcgacagagcgagactctgtctcaaaaaaaaaaaaaaaaaaagaaagaaagaaaagaaaaagatactgtactcgccagagcctctgccttgtccttcctgggtggagcgtgcaggctagagggggagctaggtagcttggacccatttaggtgtcaggaactgtggacagaattcgagttggcagaagaaacgattcacctacagatggcgatcttagcccgcccttttcagtgtgtgaactaggcttgctttttttacttagtttcttttttaaattccttacatagtaggaagccgaaaaagcagctttctctccagcaagtttctcagtatctcagtaatttctccaggatgttctacataaaccggtctgtgtccaatctcgcagggcacttggagacgcaaagaggcatccatggattcaaagggtccagtgtgggccaggcgtggtggctcacgcctgtaatctcaacactgggaggccgaagcgggcagatcacctgaggtcaggagttccagaccagcctggctaatatggcgaaaccccatgtactaaaaatacaaaacttagctggctgtggtggcacacgcctgtaattccagctacttgggaggctgacacaggagaattgcttcaacctgggaggtggaggttgcagtgagccgagatcacaccactgcactccagcctgggtgacagagcaagactccatctcaacaaaacaaagcaaaagaaaataaaatgagcaaaaaaaaaaaaaaaaaagaatccagtgtggccccaaatcatctgaacttccctgtctcgtttgaccatgctggtttcctcctggttttccctgccgcctactgccttcagccaaaggctcttttttttttctttttttttttttttttttgagacagcatcttgctctgtcgcccaagctggagtgcagtggtgctatcttggctccctgcaatctccacctcctaggttcaagcgattctcctgtctcagcctcctgaggattgaggactacaggcgcccaccacgaagcctgactaatttttgtatttttattagaaacaggtttcgccgtgttagccaggctggtctcaaactcctgacctcaggtgatccgtcagcctcggcctcccaaagtgctgggattacaggcgtgagccactgcgcccagcccaaaggctcttattattattgttttgtggagatggtgggggcggagggtgtctagctatgttgccccagctggtcttgaacttctggcctcaagtaattctcctacctcaggctcccatggctggattacaggtgagcaacacaccctgttcaaagacttatttgactttctgccctatgatgcttggcttcttcaaatgtagaggagtgaggcatggacaggaatcagatgctccctatttccctattccttttttcttttttttttttttttttttgagacggagtctcaatctctgtcgcccaggctggagtacagtggtgtgatctcggctcactgcagcctccacctcccaggctcaagagatcctctgaactcagcctcctgagtacttgtggctacaggtgtgagccaccatacttggctaatttttttctgttttttttttttttttttttttttgagacggagtccagcccaggctggagtgcagtggcgcaatctcagctcactgcaagctccgcctcccaggttcacgccattctcctgcctcagcctcccaagtagctgggactacaggtgcccaccaccacgcccggctaattttttgtattttagtagagacggggtttcactgtgttagccaggatggtctcgatctcctgacctcgtgatcctcccacctcggcctcccaaagtgctgggattacaggtgtgagccaccgtgcctggctgcctcaccttttttttttcgttttgagagtcttgctctttcagccaggctggagtgcagtggtgaaatcacagctcagagcagccttgacctcctgggttcaagcaaccctcctgtttcggcctccccagtagctggggctacaggcatgcaccaccatacccaactagttttctttttattttttgtagagaccagggtctcactatgttggccaggctgccctcaaacttctgggctcaagtcctctcctaaaatatattttctcctctgttcctcagaggaagccatcatgtacctgtaagtaatgtattcattgtttggtatttttattgatttatagtagacccatatgctattataagaaataggctgggtgtggtggctcacgcctgtaatcccagcactttgggaggctgagcaggcagatcacttgaggtcaggagttcgagaccagcctggccaacatggtgaaaccctgtctctactaaaaatacaaaaattagctgggagtggtggtgggtgcctataatcccagctactcgggaggctgaggtaggagaatcgcttgaacccaggaggtggaagttgcagtgagctgagatcttgccactgcacttcagcctgggcaacaagagtgaaactccgtctcaaaaaacaaaacaaaaataagaaataataccctttgcccagtatcctctaatgatgcagaagtacacaataatatcacaaccagaatgttgacgcaaataaaatccaccaaccttattcacatttcttcttctttttttttttttggacggattctcactctgtctcgcccaggctagagtgtgtagtggcacgatcttggctcactgcatcctccacctcctgggttcaagtgattctcctgcctcagcctcccaagtagctgggattacaggtgcctgccagcaggcccggctaattttgtatttttagtagagatggggttttttccacatgggccaggctggtcttgaactcctgacctcaggtgatctgcctgcctcagcctcccaaagtgctgggattacaagtatgtgagccactgtgcctggccagatttcctcagttttatttgtcccctttggttcatttacgtctttaaatggacgtgctgcactccacagacccttctgcagttttcttcacccacaatgatgttttcaagatctatccattctgtacatgctgttctagtttatacattgcatgaatatatcacaatttcttattcacttcacattcgtataaaagtaggttgttttggtttttttcagtgttataaatagtattacagtgaagactcttatgcttgtctctatgagctatagtttagagaatatgactaaaagtaggatttgcgggtcacaggatatctgcattccaatttattagacattaacaagttgttctccaaagtatctgtaccaatttacactycctccagcagtgtgggaatattgctgtttcttcctatctgctgtgcrtgaaagggtatcgtgttgtttgaatttgcatttctctgatgtaagtagatgtctgattcaagcagaaaatgaaattattaaaaggatctaaaaggccaagctggtctcgaactcctgaccatgtgatccgcctgcctcggcctcccaaagtgctgggattacaggcgtgagccgccgtgcccagctggctaattttcgtgttgttggtatagatgcggtttcatcctgttggccaggctgtcctcagatgatcctgaacttaaatgatctgcttgcctcagtgtcccaaagtgctgggattacaggtgtgagccaccacacccagccactttataatttttttttttttttttgagttggagtctcgctctgtcacccaggctggagtgcagtggcgcgatctcggcccactgctacctccgcctcccaggttcacaagattctcctgcctcagcctcccaagtagctgggactacaggcacccaccaccacgcccggctaatttttttgtatttttagtagagacggggtttcaccatctcagccaggatggtttcgatctcctgacctcgtgatccgcccgtctgggcctcccaaagtgctgggattacaggtgtgagccactgtctataatttttttaataaaatagagaggaggtcttaccatgttgcccaggctgatcttgaactcctgagctcaagcgatcttcccaccttggcctcccaaagtactaggattttctttttattttccttttcttgtttttgagactgagtcttgctctgtcgcccaggctcaattacgtgatcatggctcactgcagccttgaactcctgggttcaaggaatccttctgcctcagccacccaaatagctgggactacaggcgcacggcaccacacctggctaatttttttttttttttttttttgagatggagttttgctcttgttgcccaggctgcagtgaaatggcaggatctcagctcactgaaacctccacctccccagttcaagcgattctcctccctcagcctcctgagtagctgggattacaggcctgcaccactgtgcctgcaccactgtgcctggctaattttgtattttttagtagagacaggatttctccatgttggtcaggctggccttgaactcccgacctcargtgatcggccccctttggcctcccaaagtgctaggattacaggtgtgagccactgcatttggctcatatctggcatttttaccttctacagtgggaagataatcttcttttatttatttatttattgagattggatcttactctgtcgcctaggctggagggcagtggcaccatgttggctcactgcaagctccgcctcccgggtttacgccattctcctgcctcagcctccccagcagctgggactacaggtgcacgccaccacacccggctaattttttgtatttttagtagagacggggtttcaccgtgttagccaggatcgtctcgatctcctgatctcgtgatccgcccgcctcggcctcccaaggtgctgggattacaggcgtgagccaccatgcccggcctgtatgagctctttgtaagttcaggcttctagtctttaaactttgtatatgttaaaaatattttttcccagggtgtggctcatctttgcatctttgttcatggtctctttcatcatacagtttggtcatactaaatggccaaattaatatttaaaattatcaaggccaggtgcggtggctcatgcctgtaatcccagcactttgggaggccaaggtgggtggattatttgaggtcaggagttagagaccagcctggccaacatggtgaacccccacctctactaaaaatacaaaaatcaggccaggcgtggtggctcacacctgtaatcccagcagtctgggaggtcgaggcaggtggatcacctaaggtcaggagttcaagaccagcctgaccaatacggtaaaaccccgtctctactaaaaatacaaaaaaattagccggtggtgggcgcctgaggcaggagaattgtgtgaacgcgggaggtggagcttgcagcgagccgagatcatgccactgcactccagcctaggcgacagagcgagactccgtctcaaaaaaataaaaaataaataaataatgtaaataaataaataaaagcaaggatggagccctatttggctgatgggctatagtttgtcaccctgtgtcctgggctataaaagttactctgtcttctctcatctccacttacgtgatacttttgtcatgcactgtaattctatcctttttttttttttgggagatggagtctcgctctgtcgcctaggctgcagtgcagtggcctgatctcggctcactgcaacctctgcctcctgagttaagcaattctcctgcttcaggctcccaagtagctgtggctacagccccgcaccactgcgtccggctgatttttgtattttttagtacagacggggtttcaccatgttggccaggctggtcttgaactcctgacctcaagtgatccgccctcctcagccccccaaagtgctgggattacaggcgtgagccactgcgcccagccctgtaattctatccttaataaaacccttgagattattattactaatacatgcaatcagtgcttttgagatttatccatcttgcgtgttgaacatttcttttctcattccaggccttctacctggaattgctttctttctacctgaagtacatttatttatttatttatttattatttattattattttttttgagacagcgtttccctcttattgcccaggctggagtgcagtggtgagatctcggctcactgcaacctccgcctcccagatgcaagcgattctccttgcatctgagagatccagatgcaaggatcaatctcctgatcttgtgatccgcccgtctcagcctcccaaagtgctgggattacaggcgtgagccaccgggcccggcctatttttaattttttctcactctgtcatccaggctggagtgcagtggtgcgatctccgctcactgcaacctccaactcctgggttcaagtgattctcctgcctcagcctcccgagtagctcagattacacacccggctaatttttgtatttttagtagagacggggcttcaccatgttggccaggctggtcttgaactcctgacctcaggtgatctgcctgcgtcagcctccaaagttctaggattacaagcgtgagccactgcgcgtggccgatgcttgtttttagtttttggtttttgcttttgagataggctcttgcctctatcacccaggttggagtgaagtggtgagaacatggctcactgcagcctctaactcctgggctccagcaatcctcccatctcggcctcccaaagtgctaggactgtgggtgtaagccatggcacctagccttcaacttcatttttgcttttttttgagatggagtctcgctcttgttgcccaggctggagtgcagtagtgcgacctcagctcactgtaacctctgcctcctgggttctagcgattctcctgcctcagcctcccgagtagctgggattacaggcacctgccaccacacccggctaatttttgtatttttaatagagaagggattttgccatgttggccaggctggtctgaaatccctggcctcaagcgatcctcctgcctcagcctcatgtgagccactgcacctggctgatcaattttatttattttcttttttcttttcttttctttttctttctctccttttctttttttttttttaagagaagatctggatgtcacccaggctggagtgaatggcgtgatcacagcctgttgcagccccaaccacctgggctccagtgatcctcccacctcagtttcttgagtagctggggatgcatgccaccatgcctggctaattttcttcagagacagcatcttgctatgttgcccaggctggtcttaaattcctgggctcaagtgaccctcctgccttggcctcccaaagtgctgggattacaagcatgagccactgtacccgagtactgattagctttagagttttttttttttttttttttttttttttgagaagcagcctccctctgttacccaggctggagtgcagtggcgcaacctcgggtcactgcaacctccgccctccgggttcaagcgattctcctgctacagcctcctgagtagctgggagtacacacatacgccactgtgtctggctgacttctgtattattagcagagatggggtttcactatattggccaggctggtcttgaactcctgacctcaagtgacccgccctcttcagcctcccaaagtactgggattacaggcgtgagccaccgcacctggcctagttttagagtttgacaactaaagtatgcatgcagtagtcctaaaggaacctgtaaaaatatagagtgtcctagaataaccattaaaagaacagaaacagggaaaaatagaattttgaaaattccaaaaaaaaagcaagaaaagaaaaaaaaaaccctttcccactcataaagctattttcctctaaaagttttgtagtgtaggccgggcatggtgggtcacgcctgtaatcccagcactttgggaggccaaggtgggcagatcacgtgaggtcgggagttcgagaccagcctgaccaacatggagaaaccccatctataataaaaaaaaaaaaattatgaaaattagccgggcatggtggcgcatgcctgtaatcccagctacttgggaagctgaggcaggagaatcacttgaaccagggaggtagaggttgcagtgagctgagatcgtgccattgcactccagcctgacaataagagcggaactctgtctcaaaaaaaaaaaaaaagttttgtagcctagcttttcatatgtagatatatgtttcaattcaaattttttgtttgtatttttggtgtgcaagatgggtctaatttttattttctcttaaaatagccaattgtagagcactctttgttccataaatggtgtttcccagtgatatcgaagtgccaatctctgttatctaccacgtgcagaaaatacatggttccgtttctgggctctctattctgttctttttaaaaataaatctacgtgttcttatttatctgttcttatatatctaattctgcctgttttaaatattatagcataataatttctgatatctggtagtgaaaattctccttatctttcttcttcaaaattgctttggctaatcttgattctatactctttcatttggatttagaattcgcttggtaatttcctgatgagatttcaaaaaaaatggaaattacattaattttatacatcaatttgggtcaattgtcactttagatatattgaatctttgctatctgtgaatagttctaggtcttcatctctttagatcttcttttaagtcttttaataaagttttataattttctcccagcactttgggaggccagggtgggtggatcatgaggtcaggagatcgagaccatcttggccaacatggtgaaaccccatctctactaaaattaaaaaaaaaaaattagctgggcgtggtggcacgtgcctgtagtcccagctactcgggaggctgaggcaggagaattgcctgaacccaggaggtggaggttgcagtgagccgagatcgtgccgctgcactccagcctgagtgacagggccagactgcatctcaaaaaataaaaaataaataaggctgggcacaatggctcatgcctgtaatcccagcactttgggaggctgagacgagaggtttgcttgagactaggagatcagtcaggacaccatagcaagatcttgtatctacaaataatttttaaaaaacaggtgtggtgacttgtgcctatggttctagctactggggaggctgaggttggaggatcacttgagctctgaaaagttgaggctgcagtgagctgggattgtgccagtgcactccagcctgggtgacaggacagatcttgtctcggaaaaataaaaagaaatagaggcaaggtcttgctatgttgcccagggtggtctcaaactcctgatcttaaactcccagactcaagtgatccttctgcctcggcctcccaaagtgctgaaattataggcatgagccaccacaccctgccagtattttgctcttgaatcaaaaaatcctgctgaattctcttgttagttctaacagttagtttatatattttatggagttggggtcaaccctgttatttgagattagcaatcattgtatttcttccttcccaatattttttatttttttgagacagtcttgctctgtcgcccaggctggagtgcagaggtgcaatctcgggtcactgcgacctcagcctcccgggttcaagcaattcttatgcctcagtctccgcacagctgggactacaggcttgcgccaccacgcccgccaattttttgtattttttttttttttttgagacacagtctctctctgtcgcccaggctagagtgcagtggcatgatttcggctcactgcaacctctgcctcccgggttcatgccattctcctgcctcagcctcccgagtagctgggattacaggcacctgccaccrygccyggctaatttttggtatttttagtagagtcagagtttcaccatgttagccaggatggtcttgatctcctgacctcgtgatccgcccgcctcggcctcccaaagtgctgggattacaggtgtgagccaccgcgcctggccaatttttagtattttttagtagagatggggtttcgccatattgcccagactggtctcaaactcctgagctcaggcaatctgcctgccttggcttcccaaagtgttaggattacaggcgtgagccactgcgcctggccctttcgcagtctttattacactgtttgtatttgtcttcttgctttagctagatccttaaatacagagtttaatagttttcattataacaggcatacttctcccccctgattttaaagggaataattttgaagtttaagcttttgatataatggttgctctagggtttttcttttccctttttttttttttttttttacaagatatccttttatttgcttgaggaagttcctttatattcctaattagctaaaagaggtcttttgcatacttgttttttttttaatgtaataaaggggttgactctgtgattctttaactaacatctaaaattgaccctgagctaattaattytcaatctttcatgttttctcgtatttgcatttcagattatacgtttccctccaggcattgctctctgtctgcttcccttgagttctgataagtagaactttcattgtcaatttcaaatagtctgtaattttattatggattattttacatttccaaatacattggagatttttggctagaaatgtattactgatttttattaaagtgtaatttacataagggaaatgcacagacttttgttttgttttgkgacagggtcttgctctgtcacccaggctggagtgcaggggtgcaattacacagctcactgctacctctgcctcctgagctcaagtgatcctccctcctcagcctcccaactagctaggaccacaggtgcgtgccatcacgcctcactaattgttttactttttagggtctccttgtgttgcccgggctggtctcgaactcctgacctcaagtgatctgcctgcctcggcctctgaaagtgtggggattacaggcatgacccgtcacaccgggctggaatgcacggatcttatatgctacaaattaaagaatcttcacagctacgcacagtggtgtgacccttatcaagagacagaacatttctgtcactggcaaaattcccccacgccctcctccacaataggcaaccgctatactgatttctttcttttttttttttttgagacaaggactcagtctgtcacccaggctggagtgtagtaacgcagtctcggctcactgcaacctccgcctgctgggttcaagcgattctcatgcctcaggctccggagtagctgggattacaggcatgcatcaccatgcccagctcatttttttgtttttttagtagagatgaggtttcaccatgttggccatgctactctcgaactcctgacctcaaatgatctgccctccttggtctcccaaacagctgggataacaggggtgagccactstgcccaggcttatttatttatttttttgagaaggagtctcgctctgtagccaggctagagtgcagtgacgcaatctcggctcactgcaacctccgcctcccgggttcaagcaattctcctacctcagcctcccaagtagctgggtttacaggtgcgcaccaccaygcccagctaattttttgtatttttagtagagaagggatttcactgcgttaggcaggctggtttcaaactcctgacctcatgatctgcctgccttggcctcccaaagtgctaggattacaggtgtgagccaccacgcccagcattttttaaaaatttgttattattgttatttttgagacaggctgaagttgcccaggctggagtgaaatggcacgatctcggctcactgcaaactccgccacccagttcaagcgattctcctgcctcagccttctgagtagctgggattacaggcctgcgccaccatgcccggttaattttgtatttttagtagatatggggtttctccatgttggtcaggctggtctcgaattccctacctcaggtgatctgcctgcctcagcctcccaaagtgctgggatcacaggtgtgagccaccgtgcccagccctttttttttttttctcgagatggagtttcacactgtcacccaggctggagtgcagtggtgtgatcttgactcactgcaacctctgcgtccagggttcaaacaattctcctgtctcagcctctcaagtatctgggatgacagacgcctgacaccatgcccagctaatttttagcaattttagtagagatggggtttcaccatgttggccaggctggcattattctgatttctttcaccacaaattaacattcatttttctgaaattccatcaagttttgcctactgtagaattttttttttttttttttttttttttgagacagagtctcgctctgtcgcccaggctggagtgcagtgccgcggtctcggctcaccgcaagctccgcctcccaggttcacgccattcgcctgcctcagcctcccaagtggctgggactacaggcgcctgccaccacgcccagctaatttttttctatttttagtagagacggggtttcaccgtgttaaccaggatggtctagatctcctgacctcgtgatacgcccgcctcggcctcccgaagtgctgggattacaggcgtgagccaccgcgcctggctactttcactcagcatattgtttctttcttttttttattgagatgggctctggctatgttgcccaggcgggtttcgaactcctggcctcaagcaatgttctcgcctaggcctcccaaagtgctgggattacaggcgtgagccaccacgcccggctagcatgctgtttgagaggcttctccttgttgcctgtgtctgtagtttgcccctttttactgctgagtagtatccattgtatgagcatagaacaatttgtttatccgttggctgttcatgaacctctggcttgtttccaacatctggctattttttttttcttttttcttttgagacagagtctcactctgttgcccaggctggagtgcagtggcatgatctcagctcactgcaaactccgccttcagggttcaaatggttatcctgcctcagcctcccaagtagctgggattacaggcgcacacaaccacacccaggtaatttatgtattcttagtagagactgggtttcaccacattggacaggctggcctcgaactcctgacgtcaggtcatccatccaccttggcctcccaaattgtacctctggctattgtaaatgaagttgctgtgtaaatacttgaacaagtcttttttttttttttttttcagagatgggctcttactctgttgcctaggctggagtgcagtggtgcaatcatagctcactgcagcctcaacttctgggatcaggtgatcctcctgcctcagcctccaagtagctgggaccacagacatgtgccaccacacccagctaattgtttttgtttttgttttttgagaccgagtctctctctgtcacccaggctggagtgcagtggcttgatctcagcttactgcaacctctgcctcctgggctcgtgatcctcccacctcagcccccaagtagctgagaccacaggcccacaccaccacgcccagctaattttttttctgtatttttagcagagacagtgtttcactgtgtttgccaggctggtctccaactcctgacctcaagtgatccgcccgccttggcttcccaaagtgttgggattacaggcgcgagccactgtgcccagcacttttttttttttgagatggagtctcgctccgtcaccctggctggagtccagtggtgcgatctcagctcactgcaacgtctgcctcccgggttcaagtgattctcctgcctcagcctgccaagtagctgggactacaggtgcccgccaccacgcctggctaattttttgtatttttagtagagacggggtttcaccgtgttagccaagatggtctcgatctgctgacctcatgatccgaccccctcagctgggattacaggcatgagccaccgtgcctggcctgtgcccagcctttttaaaaattatttgtagagactgaggctccctatgttgcccaatctggtctggaactcctgggctcaagggatcctccctccttggccttccgagtagctgagactacaggtgtgtgcccctctgcctgctaatttttaaatttttgtagagatgagatctccctatgttgcccagactggtctcatactcccagtttcaagtgatcctcccgccttggcctcccaaagtgctgggattacgggcatgagcctgtaatcctgtgcctggccaacttttatgtttagacctatgacgtgggttaatatttgtttatggtatccgggaagaattgaggttcatttttttcttcaaatcgacattgattcattcaatgaggttaattgaattaatcctttacacaattaaattaccttggcacgtttattgaaaatcaattaaccatatgtgagtgagttaatttctgggctttctgttctgttccattgatctatttgtgtctccctatgacaataccacattatcttgattgctgctgctttatgtacatatttatttagagacaggttctcactctgccactcaggctggagtgcagtggtgtaatcttggctcaccacagccttgaactgctgggctcaagcaatcctcctgcctcagcctcccgagtagctgggactacaggcgcgcacaccaccatggccagctactatttgtatttttagtagaaatgggatttcaccatgtttgccaggatgttcttgatctcttgaccttggatccacccgcctcagcctcccacaatgttgggattataggcgtgagccactgcgcccagccaaattttattttttgtaaagagggggcctcactatcttgsccaggctggtctcaaactcctgggcttggctgggtacggtggttcacacctgtaatcccagcactttgggaggctgaggcaggaggattgcttgaggtcaggagttcaagaccagcctgggcaacatagtgagacccccgtctctatttttttaaatttaaaagaaacaaaaaagaactcctgggctcaagcaatcctcccaccttagcctcccaaagtgttgggactataggtgtagccactgtgcccagcttactacagctttagaagtcttgaaatcagatagtaagaattctccaagtttgttccctctctctctcctttctttcccttttttctttctttcttttctttctttctttctctttctttctctctctctctttttccctccctccctgccttccttccttcctttctttctctttctttcttttcttccttcccttccttctttccctccttccctccttccttccttccttccttccttccttttctctctctctctctctctcactggagtacagtggtcccattatagctcacagtagccttgatgtcccggacttaagcagtcctcctgcctcagccttccagctgggactacaggtgtcctccaccacgcccagctgatttttaaatttttggtagagatggggtctcagtatggttgtccaggcttgtctcaaactcctgggtcaagtgatactcctacttcgaccttcctaggtgctggatcacaggcgtcagccaccgcacccagccttctctaagattgtgttggttatgcaagatgatttgcttatctatatcaattttatgaaatttatagctcataaatatctgtggaaaaatcatgctaggattaggactagaactgcactgaggatatagattcatttgggaagagctgacgtcctaatatgtcartgtaaatatctgtcatctttagtttctctcagcaatgttttgtaatttattttattatatatgtgtatatattatatatacatatatatatatttttttctgagacagcctatggctctgtcacccaggctggagtacagtggtgtgatcttggttcactgcaacctttgcttccgaggctcaagcgatcctcccacctcagcctgccaactagctggaactacaggtgcaagccgacatgcccatttaatttttgtttattttttgtagagacagggtcttgctatgttgcctacactggtctcgaactcctggcctcaagccatcctcctgccttccttctcaaagtgctgggattgcaggactgagccaccacgcccggccttgtaatatcttttaaaatctgtccttaaatatttcttttttttgagacagaatcttgctgtgtcacccaggctggagtgcagtggcgtgatcttgactcactttaacctccatctcctgggttcaagcaattcttgtgcctcagcctgcggagtatctgtatttcctgttttttaatgctatggtatttatttatttatttatttatttatttatttattttgagacggagtctcactctgttgcccaggctggagtgcagtggtgtgatcttggctcactgcaagctctgacttctgggttcacaccattctcctgcctcagcctcctgagtagctggtattacagccgcctgccaccacgcccggctaattttttgtatttttagtggagacggggtttcaccgtgttagccaggatggtcttgatctcctgacctcgtgatctgccctcttgrcctcctaaagtgctgggattacaggcatgagccaccgcgcctggcctatttattctttttatataggtattttttaaagtttattttccaatagtacatcgctagtatatagaaatataattgaattttatatttgatgttgtatcttayaatatggctaaatcagattattagtctagtagcttttctggatttgatggaattttctatgtatattattatattgatattggttatgaattaattttcttttcttttctttctttctttttttttttttttttttgagacagagtctcgctctgtcgccaggctggagtgcagtagtgcaatctttgctcactgcaactttcgcctccctggctcaagcgattctcctgcctcagcctcccaagtagctgcaattacaggtgcctgccaccatgcctggctaattttttgtatttttagtagagacggggtttcaccatgttggccaggctggtcttgaattcctgacctcaagtgacccacctgcctcggcctcccaaagttttgggatcacaggcgtgagccaccgcgcccggtgtctaggaattttctgtgtatattatattggttatgatttaatcttcttttctatccatatgcattcttttctttttcttgcttcactgttgttttaggaaaaaccatgtttttcctgcattctcattcccccacagcagtcaacacagagggaggcttctgtgcccaaatgtgtgggggtttcccacagatcaagcagcaggcacagctgggtgtcctccactcagctctgagactgtctgcctggagatagagctggataccacaggttgggggctcagttcccaagactacctatccccccagaccctgatcacaagtctgggcctctcgaacttttgactgactggcttcatgttgaggttcccaggaccgtcttttggggttcaattaatttgctggagtggctcacagcactccaggaaatgcatacatttactggtttattagaaaggatattgcaaaagggctgggcacggtggctcacacctgtaatcccagcactttggaggccaaggcgggcagatcacttgaggttgggagttcaagaccagcctgggcaacatggtgaaaccctgtctctactaaaaatacaaaaattatctggacgtggtggcgggcacctgtaatcccagctacttggaaggctgaggcaggagaatcgcttgagcctgggaagtggaggttgtggtgagccgagatgccgccactgcactccagcctgggcaagagagtgagaccctgtctcaaaaaaaaaaaaaaaagaaaaaagggccgggcgcagtggctcatgcctgtaatcccagcactttgggaggccgaggtggtctgatcacttgaggtcaggagttcgagaccagcctggccaacatggtgaaatccagtctctactgaaaatacaaaaattagccgtggtggcatgcacctgtaatctcagctacttggggcggggggtgggtggagtggcgaattgcttgaacccaggaggcggaggttgcggtgagccgagatcgcaccactgcactccagcctggggaacagagcgagactttgtctcaaaaaaaaaaaaaggacattgcaaaaaatatggatgaagagctgactagggccaggtctggggcaggggcggtggagcttccatacccctccccgtgccactttccaggaaccttctctgttgtgcatccagaagctccaccacccagtcctcttggatttttatggaggcttcatgacgtcagctttccttcccccagggaatagggctggacacagtctgggaagggtcttaagacccacagtcttaaggtgggggaaggttagagtcctgccctggggcaggcaaaaggagaccaggagaaggtcagaggctgcccgaggcctaacagacaacatcatcacaaaacactgtagcaaggaccatggagttaggagccaagagcccccgcacgaaaaacaacgtagttcataacaccacaactgtgtgccgactaggccggcaatagggtgctgactgtgggtgataagacgctgtatatctggccttgttcccaagcattaggcattaccttttttttaaattttatttttatttatttattttttatttttatttttatttatttatttttttgagatggactcttgctctggtccaggctggagtgcagtggcgcagtcttggctcactgtaacctccgcctcctgggttcaagcgattctcctgcctcagcctcccgagtagctgagattacaggtgcctgccaccacacctggctaattttttgtattttgtatgttttgtttttttttttttgagacagagtctcactctgtcacccaggctggagtgcagtggcgtgatctcggctcactgcaagctctgcctcccgggttcacatgattctcctgcctcagcctcccgaatagctgggactacaggcacccgccaacacgcccggctaacttttttgtatttttagtagagacggggtttcaccatgttagccaggatggtctcgatctcctgaccttgtgatccacccacctcggcctcccaaagtgctgggattacaggcgtgagccaccacgcctggcgagtttttggtatttttagtagagacaggatttcaccaggttagccaggatggtctcgatctcctgaccttgtgatctgcccacctcggcctcccaaagtgctgggattacaggcgtgagccaccgtgcccagcgtgcaattttttgtatttttaatagagatggtgtttcaccatgttggccacactggtctcaaactcctgacctcaagtgatctgcctgccttagcctcctaaagtgctgggattacaggcgtgaaccaccgtgactggccacattcagtatttcgattcaaatattgaaagcattcaatggttgggcatgatggctcatgcctgtgatcccaacactttgggaggccaaggcaggaggatcatttgagcccaggagttgaagaccagcctgggcaatatagtgagaccctgtctgtacagaaaataaaaaaacaggccaggcatggtggctcacacctgtaatcccagcactttgggaggccaaggcaggtggatcacttgaagtcaggagtttgagactagcctgcctggccagcgtggagaaacccctgtctctactaaaaacagaaaaattagccaggcgtggtgacacgtgcctgtagtcccagctacttgggaggctgaggcaggagaatcacttgaatccttgaaaggcagaggttgcagtgagctgagatcatgtcacaacactccagcctgggtgacagagtgagtctccatctcaaaacaaacaaacaaataaaatcaaaataaaaaaataggttggacatggtggtgcgcacctgtggtcccagctatgtgggaagctgggacaggagggtccgttgagcccagcaggtccagaaagttgcagtgagccatgatcgtgccgctgcactccagcctgggtgacaaatggggaccttgtttcgaaaagaaaaaaaaaggaaataagaaaaagaaaatgctggccaggcgcggtggctsacgcctgtcaatccyagcactttgggaggccaaggcgggcggatcacgaggtcaggagatagagaccatcctggctaacacrgtgaaaccccgtctctactwaaaatacaaaaaattaggccgggtgcgatggctcacgcctgtaatcccagcactttgggaggccgaggcgggcggatcatgaggtcaggagatcgagaccatcctggctaacacagtgaaaccccatctctactaaaaacacaaaaaattagccgggcatggtggcgggcacatgtagtcccagcgactctggaggctgaggcaggagaatggcatgaaccagagatgcggagcttgcagtgagccgagatcgcgccactgcactccagcctgggcgacagagcgagactccgtttccaaaaaaaaaataaaaaaattagccaggcatggtggtgggcgcctgtagtcccagctacttgggaggcttaggcaggagaatggcgtgaacccaggatgcggagcttgcagtgagccgagattgcaccacagcactccagcctgggcaacagagccagactctgtctcaaaacaaaaaagaaaataaaaggaaaaaggaaatgccttgtgaagacagacatacaaggagaaggcagctgtgtgatgacagaggcagagactgaggtgacgtgttcacaaaccaggaaccccctaggagacaaacaccagaagctggaagaagcaagaaggaatcctcccctatgagtttcagagacagcgtggccctgccggcaacttgatttcagacttctagcctcaagcactctgagacaatatgtttctgttgtttcaagccaccaagttcgtaatattttttaaaaaataatttttatattatcttttgtagaggcagggttttgccattttgccaaggctggtctcgaacttatgagctcaagtgatctgcctgcctcggcctcccaaagtgctgggattataggtgtgagccactgtgcccagcccctggcgatacttttctatggcaccccagggaaactaatatatatggtgaattaccttgatttattttgaaatattaaaccaagcttgcatttcatttggtcacaacattttatccctttaatttatttaattcaattaattattattatttttttttgagatggagtgagactctgtcgcccaggctggagtgcagtggcgtgatctcggctcactgcaagctctgcctcctgggttcaagccattctcctgcctcagcctcccgagtagctgggactacagactcccgccaccacgcccggctaatttttttgtatttttagtagagacggggtttcaccgcgttagccaggatggtcttgatctcctgacctcgtgatctgcccgccttggccttccaaagtgctgggattacaggcgtgagccaccgtgcccggccccttttattttatttattaagagacagggtctcactctcttgctaggctggagttcagtggcatgatcacagctcactgcaacctccgcctccctggttcgagcgatcctcttgcctcagcctcccragtaactaggatcacagacatgtgccaccatgcctggctaatttgtgtattttttgtagagacaggggtctcactattttgcccaggctggtcttgaactcctgaattcctcccaactcagcctcccacagtgctgggattatasgcatgagccaccgtgcctggctgatttatctctttcctcttacatttactataagcagcaagaaaaaaccaagcctcactttcaatactttgcttggaagtcttcttagttaaatatccaagtttataatttataagtttggctttgcatataattcaaagatacattcccgctaagatttctgagactacataatggggtccccctttctccagtttccaagaacacattcctgttaccttcttttatttttttatttttatttaaaaaaattttttttgagacagagtcttgctctgttgccgaggctggggtgcagtggcacgatcttggctcactgcagtctccgcctcccaagttcaagcaattctcatgcctcagctcctgagtagctgggactacaggcgcttgccaacacacccagctaattttttgtatatatattttgtagagacggggttttgccatgttgcccaagctggtctcaaattcctgagctcaagcaatccgcccacctcagcctcccaaagtgctgagattacaggcatgagccaccccacctggcctgatattcctcattacattctgagccctcatcagcagcacctttaacgtctgtattgttaccaagagtctgtttgtgaccatttaggcatcctcccagatgatttaggttttctataccacgttcctcatttccttctaaaagtcctcactagcagagtttttaacttccctatttctagtaacaaccaattccaggaaacctaagctttttctgtatccacctcaaaacttttccactgccgctggcgtgatggtgcatgcctacagtcccagcactttgggaggctggggcaggaagattgcttgagcccaggagattaatgctgcagtgagctctgattgcaccactgtgccctagcctagtcaagagagcaaaactctgtctctaaaaaaatttttttataaaagcagtgggccaggcatggtggctcatgcctgtaatcctggcactttgggaggccaagtcaggaggatagcttgagactgtccttgagactggcctgggcaatacagtgagacaccattctacaaaaaataaatagcctgtagctgggactacaggcgtgtgccaccatgcctggctacatggccaatgcctgcagtcccagctacgcagcaggctgaggaaggaggatctcttgtacccaggagacggaggctgcagtgagccatgatcctaccactgcactccggcctgggtgtgatagcaagaccctgtctcaaaaaattaaaaaaaggaagagtgttgagaagaaattggtagctttataacacagggcaaatgcccacaagggttgtgagaatggtgtcttgcagcctaggctaggatctcagctctgggatcttagggtgttgaacttttctggtcttggttgcctgcaaagtactgatcataccacttcctaaattttttttattcttagtttatttttatttttatttttttgaaaaataggtcagtcacagtggctcactcttgtaatcctagcactttaggaggctgaggtgggcagattgcctgagctcaggagttcgagaccaccctgggcaacatggtgaaaccctgtctctactaaaatacaaaaaattagccaggcgtggtggcgcatgcctgtaatcccagctacttgggaggctgaggcaggagaattgtttgaacctgggaggtggaggttgtagtgagccaagatcacaccactgcactctagcctggacgacacagtgaaactctgtctcaaaaaaaaaaaaaaagaaagaaagaaaatagagatggggtgtcactacgttgcccaggctggttttgaattcctgggctcaagtaaccctcctgccttggcctctcaaagtgctatgattacagacgtgagccactgcccccggccaggatgagatacattctttttttataaattcttttttttttgagatggagtcttgcccttgccaccccaggctggagtacagtggcgtgatctcagctcactgcaacctctgcctcccaggttcaagcgattatcctgcctcagcctcccaagtagctgggactagaagcatgcaccaccatgcccagcttatttttgtatttttagtagagacggggttttaccatgttggctaggctggtctcgaactcttgatctcaggtgatccacctgaggttgcagtgagccgagatggtgccactgcactcaagcctgggcaacagagcaagagtcggtctcaaaacaaaaacaaaaaaccaagaagactcagttcctagtacgcattcaatacgtgttagcgtggttagtgtttggtgctgtcctggcttctggcgtgccaggcacgtggtagtactgcacttctggtccttctgaggttgagcgagaccacatcactggtcctggccaatgcgttgtgaacagcaatgagtcttacttctgggccatatcatttagcggctcctgcagcatcctccagatcctttctctctgttaacatggcagaaatgcaggatggtggccgctctgtgatcctgggtctctgcatgccggtgacagacatgaacccckttgtgactttaagcctctgggatttgagattgttactgcagcatgatatagcctatcctaaacaactcattagccattattagtatttctaagatacgctaaacaatgcattacccattattagtttttttgtttgtttggttgkttttttttttttttttttttgagacagactctcactctgtcgccgtggctggagggcagtggcacaatctcagctcactgcaacctccacccccaaagttcaagcgattttcatgcctcagcttcccgagcagatgggattacaggcacctgccatcatgtccagctaatttttgtatttttagtaggaatggggtttcaccgtattggccgggctggtctagaactcctgacctcagatgatccactggccttggcctcccaaagtgctgggattacaggtgtaagccaccatgcctggcccacaccatttatttatttatttatttatttagagacagagtcttgttctgttgcccaggctggagtgcagcagcaagatctcggcttactgcaacctctgcctcccaggttcaagtaattctcttgcttcagcttcccgagtagctgggataacaggtgcccaccaccacgcccggatttttttttatttttagtagagacagggtttcaccatgttgcccaggctggtcttgaactcctggccacaggtgatccacatacttcagcctcccaaagtgctgggattacaggcgtgacccatagcacctggccyacagcatttattttattttattctattttattttacttttgagatggagtctcaatctgtcacccaggctggagtgcagtggcgcgattatggctcactgcaacatccacctcctgggttcaagcgattctcctgcctcagcctcccgagtagctgggattacaggcgtgcgccaccacaccragttaattttgtatttttagtagagatggggtttcatcatgttagccaggctgatctcgaacccctgacctcaggtgatccacccgccttggcctcccaaagtgctgggattacaggtgtgagccacggcgcccagccagcatttatttttaagtgatggggtcttgctctgtggcccaggctggaatacggtggcacaatcatagctcactgtagcttccacctcctggactgaagcacttctcctgccttggcctcccaaagcactgcaattataggcgtgagccaccacaccagcattttagtaactgtttctgaaaggtccttagcaggtcctttctgcacgtcctcctgtgtagttaaattctgactccgatgctctgcatgctaagttctgtccatttgcccagctagttcccattttcctaaatgaaaagcactacatgtgaatcaaaaaaacagattaaccatcgtgatataactgggttcttgctactaagcaaaatgttttagaattgagaaattcgaggccgggcgcagtggctcacgcctataatcccagcactttgggaggcttaggcggcagatcacctgaggccaggagttcgagaccagtttggccaatatggtgaaagcttgtctctactaaaaatacgaaaattagctggacatggtggcgggcgcctgtaatcccagctactcrggaggctgaggcaggagaattgattgaaccygggaggcagaggttgcagtgagccgagatccgagatcgcaacattgcactccagcctgggtgacaagcgtgagactctgtctcaaaaaaaaaaaaaaaaaaaaggccgggcgcggtggctcacagctgtaatcccagcactttgggaggccgaggagggcggatcacaaggtaaggagatcgagaccacagtgaaaccttgtctctgctaaaaacacaaaaaattagccaggcgtagtggcgggcgcctgttattccagctacttgggaggctgaggcaggagaatggcatgaacctgggaggaggagcttgcagtgagctgagatcacgccactgcactccagcctgggtgacagagggagactccgtctcaaaaaaaaaaaaaaaaagaaattccattttctttttacagttccctgaatacgcaggaatagtattctgtggggaggatctgctgaaggcagacgtgtcggtgcacattcccaaggcactctccaaacactagagggatccagcagcggagctgacgatgtatgaagactgccttttctctcctstcggcattctggattagagctgattattccccccaccgtttcctgccacagccctcacgttcccacctgtagccctggctttattctgcgtgtgtgagaattctgctgtgttcttctccacctgcttccatcaggaggctttgcaggacagagaccttgtctggctgtccctgcagtgcctcccaccggctacacacatttcgtttttgtttttatttttatttwacttatttatttattgtgagacagagtttcactgtcacccagactggagtgcagtggcgcgatctyggctcactgcaacctccacctgccgggttcaagctattctcttgcctcagcctcccaagtagttgggattacaggcacccaccaccaggcccggctaatttttgtatttttagtagagacagggtttcacatgttggccaggctggtctcaaactcctgacctcaggtgatccgcccgcctcggcctcccaaattgctgggattacaggcgtgagccaccgcgcctggccttgtttatattttcggagccagagcctcactctgtcatccagactggagtggagcagggcaatcatggctcactgcagcctcgacctcccaggctcaagcgatcctcctacctcagcctttcgtgtagctgggactacaggaacacaccaccaccaggctaatttttttgtttgtattttttgtagagtcagggtcttgctgtgttgccaggctggtcttgaactcctgggctcaagtcatcctcctgccttggcctcccaaactgctgagattgcaggtgtgagctgctgtgcccagctgctagccatacaaattttgataaacagtaaatactctggaaatgttcacaggaagaagacaaacttttcaacttagagcaggggwcttccaactgggctgcacatttgaattatctgaggaactttaaaaaaaatcctcccccacaacctccgcctcccaggttcaagcaaatctcctgcctcagcctccaaagtagctgggattacaggcatatgacaccatgcccggctaattttgtatttttagtagagagggggtttcttcatgttggtcaggctggtctcaaactcccgatctcaggtgatccgcctgcctcaggctcccaaagtgctgggattacaggcgtgagccatgtgcctggcctcacatgtaaaatgtaaaaatacaataaaggtattattgtacttttatacttgtataacgatttacggttttttgtttgtttgtttgtttgttttgagatgtagtctccttctgttgcccaggctggagtgcagtggcatgatctcggctcactgcaacctctgcctcctgggttcaagcaattctcttgcctcagcctcctgagtagctgggactacaggcgcccgccaccacacccagctaattttttttttttttttgagacggagtctcgctctgtcgcccaggctggagtgcagtggtgcagtctcagctcactgcaagctccggctcccaggttcgcaccattctcctgccttagcctcccgaggagctgggactacaggcgcccgccaccacacccagctaatttttggtatttttagtagagacggggtttcaccgtgttagccaggatggtctcgatctcctgaccttgtgatctgcccacctcagcctcccaaggtgctgggattacaggcgtgagccaccgcgcctggcccacacctagctaatttttgtatttttagtagagatggggttttaccatgttggccatggttggccaagcttgtcttgaacttctgacctcaggtgatgcgcccacctctgcctcccaaagtgctgggattacaggcgtgagccaccatgcctggccacaatttacagttttttattttattttattttttttgaggcagggtcttactctgtcacccaggctggagtgcagtggtgtgatctcagctcactgcaacctctgcctccccgggtcaagtggttctcccacgtcagcttcttccccagtagctgggattacaggcatgtgccacaacacccggctaagttttgtacttttattggagacggagtttccctgtgttgaccaggctggtcttgaacttctgaactcaggtgatctgctggtctcggcctcccaaagtgctggggttacaggcgtgagccaccgtatccggccaatttacagttttttagtgcaacaattttatttttattttttatttttagacaaagaggctcgctctatcacccaggctggagtgcagtgatgcgatcacagctcaccacagccttgacatcctgggctcaagcaatcctcttgccttggccttcagggtagctgggactataggtgtgtgccattgtgcctggctttttttttttttttagagatggggtctcactatgttgcccaggttggtctagaattcctgggctcaagtgatcctcctgcctcgacctcccaaagtgttggaattacaggcatgtgccactgtgcccagctgagtacaattaattttaaatttttttttttttttgagacaaagtctccctgttttcgcccaagctggagtacaatggcgcaatctcaggtcactgcaacatctgcctcccaggttcaagcaatctcctgcctcagcctcccgagtagctgggattacaggcgcctgccaccatgcccagctaattttttttttcttttttttttttgagacagagtttcgctcttttgccgaggctggagtgcagtggcatgatcttggctcactgcaagctctgcctcccgggttcacaccattctcctgcctcagcctcccgagtagctgggattacaggcgcccggtagagactgtagtggtttcctcatgttggccaggctggtctcgaactcctgacctcaggtgatctgcctgcctcagcctcccaaagtgctgggattacaggtgtgagcaactgtgcctggctacaaatttaataagtaaatattttataatctagtttgagaccaaaaatacgtaggaaacagctgggcatggtggcctgtgccttagtcccagctacttgggaggctgaggtgggaggactgattgaggccaggagtttgaggctatagtgagctatgattgggcagctacagtccagcctgggcaacacagcaagaccctgcctctaataaaaatatgatcaggaagtgggcagagtatatatgtgtgcgtggcacagggaaagtgctgagtacattatttggcagcaacagcagctggaaggaagtgagggtggaggaaggaagcagctatcagatatggggggaggtcacaggatcctgccatgtcccactgtgcctagggaaagttgttatatgtccatcagcagaaggacatctcgatctcggctcactgcaaccttggcctcccaggttatggtggagagagcatcaatggtgtgcctgcttgcatggaggtcctggtgtgcggggaccctatggcgtcctaggtgcagtcatctgttaccgaggcagggtccagcagctatagccagaggaagtaactaccttgtgagaaggggacgcttcctaggaactgacrtggttctgggctcttggttctgtaatcaactccccggacattgtgtgacatcagcgttagaaggtccaggatggccgggcacggtggctcacacctgtaatcccagcactttggaaggccaaggtgggcggatcacttgaggtcaggagttcgagaccagcctggccaacatggtgaaaacccatctctacaaaaatacaaaaattagctgggtgtggtggcacacgcctgtaataccagctacacgggaggctgagacaggagaatcgcttgacctgggaggcggaggttgcagtgagccaagatcatgccactgccctccgctccaggcaacagagtgagactctgtctcaaaaaaaaaaaaaaaaaaaaaaaaaaaaaaaaaaaaaaaaaaaaagaaggtccaggatccttcctttggaaacaagcccttcctgatgcaggcctaccaatctccatgccaaaccccacacttttagcctggaatgaccacagcatctgcagctgatgtctcagagccttcgtgccctcctcctacttaactccttattcctccagccctaactctggtaccacccatccagggatcccttcacccatgtagggaagggatcgcccttcacccttcaccctcttctgcggtgtgttgcacagccttgctcccgttttggaacagttagcacacttgctccactctggccatctgtgcctcctccagatcaaggaatgcacaggaaacatctttgtattctcagcacccagcacagggcttcctgacctcctggtggcagccagcaaacctgagtgggccagtgggtgggtggatagatgcaggatgcagtgagtgagtgagtgagtgggtgggtggatgaatgcaggatgcagtgagtgagtgggtgggtgaatgaatgaatgcaggatgcagtgagtgagtgagtggttgcatgaatgaatgcatgatgcagtgactcagtgagtgggtgaatgaatgaatgcaggatgcagtgagtgagtggttgtgtgaatgaatgcaggatgcagtgcgtgagtgagtgggtgaatgaatgaatgaatgcaggatgcagtgagtgagtggttgtgtgaatgaatgcaggatgcagtgcgtgagtgagtgagtgggtgaatgaatgaatgcaggatgcagtgagtgagtgagtgggtgaatgaatgcaggatgcagtgagtaagtgggtgaatgaatgcaggatgcagtgagtgagtggttgcgtgaatgaatgcaggatgcagtgcatgagtgagtgagtgagtgaatgaatgaatgcaggatgcagtgagtgggtgggtgaatgaatgcaggatgcagtgagtgagtgagtgagtggttgtgtgaatgaattcaggatgcagagtgagtgagtgggtgaatgaatgaatgcaggatgcagtgagtgagtgggtgggtgagtgaatgcaggatgcagtgagtgagtgggtgaatgaatgcagggtgcagtgagtgagtggttgcgtgaatgaaagcaggatgcagtgagtgagtgagtgggtgaatgaatgcaggatgaagtgcatgagtgagtgggtgggtagatgaatgaatgcaggatgcagtgagtgggtgagtgagtgggtgaatgaatgcaggatgcagtgagtgtgggtgaatgaatgtatgaagaagcagtgagtgagtgagtggatgaatgaatgcaggatgcagtgagtgagtgagtgggtggatgaatgaatgcaggatgcagttagtgagtgagtgaatgaatgcaggatgcagttagtgagtgagtgaatgaatgcaggatgcagtaagtgagtgagtgggtgaatgaatgaatgcaggatgcagtgagtgaatgaatgaatgtaggatgcagtaagtgagtgagtgggtgaatgaatgaatgcaggatgcagtgagtgagtgactgaatgaatgcagaatgcagtgagtgggttggtgaatgaatgaatgcaggatgcagtgcgtgagtgggtgaatgaatgtacgaagaagcagtaagtgagtgagtgagtgaatggatgaatgaatgcaggatgcagtgcatgagtgagtgggtggatgaatgaatgcaggatgcagtgagtgagtgggtgaatgaacgtatgaagaagcagtaagtgagtgagtgagtgaatggatgaatgaatgcaggatgcagtgcatgagtgagtgggtggatgaatgaatgcaggatgcagtgagtgagtgggtgagtgggtgaatgaatgcaggatgcaataagtgagtgaatgagtgaatgcaggatgcagagagtgagtgggtgagtgggtgaatgaatgaatgcaggatgcagtgagtgagtgggtgagtgggtgaatgaatgcaggatgcagtgcgtgagtgggtgaatgaatgaatgcaggatgcagtgagtgagtgggtgaatgaatgaatgcaggatgcagtgagtgagtggctggatgaatgaatgcaggatgcagtgagtgagtggctggatgaatgcaggatgcggtgagtgtgtgagtggatgaatgaatgtaggatgcagtgagtgagtgggtgaatgaatgaatgcaggatgcagtgagtgagtgggtgaatgaatgaatgcaggatgcagtgagtgagtgggtgaatgattgcaggatgcagtgagtgagtgagtggctggatgaatgcaggatgcggtgagtgagtgtgtgagtggatgaatgaatgtaggatgcagtgagtgagtgggtgaatgaatgaatgcaggatgcagtgcgtgggtgagcgaatgagtgggtgagtggatgaatgaggaagtgcgagtcagaaaaccccagtgtaaccggtgaatgagcgaacaagggcgtgactgggcgaggagagatgggagtgaatgagggtgcggtgggtgcaggcttgcgcctgaggtagtgcacctgcgagtccggaggtccaacctgaggggaggtaacctgcgccaccagcaggctccgtgtccacgtggacggggaggggcatgtgggcgtggctaggcgggttgtaggcgtggcgaggccgggcgaggagcgcggcgggcccgcaggggcggactgtgggcgtggcgcgcgggggagggggcgtgaccaggcggggtgtgggcggggcgagggcgcggcgcggcagggctgcgcggccgggtggcgcgggaggaagtcacgtgggagcgcgggctcacatgactggccgcgcgatggacccgctgcccgcggctgcagtcggggcggcagctgaggcggaggctgacgaggaggcggatcccccggcgtcaggtagggcgtggggcggcggtagcccccacctgcccagggcgcgcggcccgaccacccccggcggacggggctcagccgccgcgcttggtccccgactcgtttcctgcccccgcgccccgcgttcggccccacgccccagtccctcggaggtccccctgccctcctgcgcgcctgtcctttgggggtccccgtgctctctcgcgcctccgtccctcggggtcccctgccctcctgcgccgggagagccctgtccaggttacagctggccgcgttccgaggcgctttcccggggctctcagaggcgtcctcggggacagtttcctcctcgccccgttcctggtgccctgctcttctgccctgccyggtcacgctgagcgatggcactgggggccacttccccggacttgggcgcctttcctagccacatcctctctcccaagctcctgtcggttgtgtggtcttgggccagtaatttcacctctcgggacctctgttttctcatctgtgaaccgaatctatagatgtgtagctgcttttctctctctttcaagtgatcctccgccttagcctcccaaagtgctgggactacgggcgcgtgcagttacgcccggtaattttttttatttttgtagagatgggatcttgctatgttgtccaggctggtctggagcttctggcctcaagcggtcctcctgccttggcctcccaaagtgctgggagtacgggcatgagccatcgtgcctggcctgtatttctgtctttttcttttttctttttcttttcttttcttttttttttttttttgagacagattctcactgtcactcaggctggagtgcaatggtgcgatctcggctcattgcaacctccgcctcccgggttcaagcgattctcctgcctcagcctcctgagtagctgggattacaggcatccaccatgacactcggctaaattttgtatttttagtagagacggagtttcaccatgttggccaggctggtctcgaactcctgacctcaggtgatccaaccacctcagcttcccagagtgctgggattacaggcgtgagccaccgcgcctggcctcttgtatttctctttaagggatttgggttaatgaggctaaacatggctgggcacggtggctcacgcttgtaatctcagcactttgggaggccgaggcgggcggatcacgaggtcaggagatcaagaccatcctggctaacacggtgaaaccctgtctctactaaaaatacaaaaaaaattagccaggcgcggtggcgggcgcctgtagtcccagctactcgggaggctgaggcaggagaatggcgtgaacccgggaggcagagcttgtagtgagccgagatagcgccactgcactccagcctgggcgacagagcgagactccgcctcaaaaaaaacaaaacaaaacaaaacaaacgaggctaaacattagaaggaatacaggagggtgccccttatttctggatgttccttcctgtggtcctagctgccagagaagagatgtaggtgggtgttggtgtgagttacggtttcttcttggtggggggggacaagattggggaatccccttgtggggaggtctggcaaggtgtcgctgaggaggtgatgactgaagtgagctctggagggttggtagacagtttcttcgtcggcgagaaacggcagcggggagcaggggagggattgttgcatttggtgggcatcctcgatgtgaagactgtgtctagaaagaagggcctttcagaatgggtcttcagttattttttcctttcccttgtatcagtgtaaggggaggcacgtgatagttctcgctgattagaacattgtgtccatgaagtcacatgttggaggccagcgtgagtctcaggcgggaccctttccgaggggtcacttgggaacaggtaggctgtgattggatcggaatgctgctgctatctcagcttgtaaagcaatttggcrttgctggaggggtcctctgcaggtgtaggggactgtgtttccttcaggcttcacagaagtagactccagaggctaccataatggtgtaatttagagatagtctgagcgctgtacacctgagggagctgtgtctctgggagaccgccctccctttggtgtggcctggaattcctgtaggtagttggctttttctgggggcagtggtgatttcatcaggagtgctgatgggatccacagatgggggttgctgggacaaggcagtgcttcacagtgccctttcctgtaaccaggcaagtctgaaagtggggctcacagactcttgggacgtagactgtccttctgtttgaaacttggtcgtcatcctggcaggtgggtgaagtggtatagcaggtctttttttttttttcttgagacggagtctcgctctgtcgcccaggctggagtgcagtggtgtgatctcggctcactgcaagctctgcctcccgggttcaygccattctcctgcctcagcctccmgagtagctgggactacaggcgcccgccaccacgcccggctaattttttgtatttttagtagagacggggtttcaccatgttagccaggatggtctcgatctcctgacctcgtgatctagccgcctcggcctcccaaagtgctgggattacaggcgtgagccaccgcgcccggcctcgcaggtctttttacattgagaaaactaaaatccagaggtaagtaatttgcccaaagtgggcaatgtcaagggaatgtgtgttgatggggaccctgattgggtgggctggagtgagaaaacctcagccttgagaccaagcactgtggctcacgtctgaaatcacagcacttggggaggctgaggagggaggatcgcccgagcccaggcgctagagaccagcctggacaacgtagcgaaatcctgtctcaaatttttaaaaaagaaaacaaaaacaaaaacagcaaagaaaaaagttaagtctctgaatattgtccggagactatgtgtgtgacttacacgttcactaaggttggtttgaaggagtggttgtgccttacgggtatacagtgaatttcctcttctctagagttttggccacacagccagagcccactggtggtattcatgtgggaactgtgaaatctcctgcatcttcggtgttgccagaaaaaaatgtgcttgttgtacttttccacattaagagtctcattctatttgaattctttgaagcttaagctgtgaatgctctctagggcaaccctctttataaaaacttaattttcagttatgccatacatggacaaatgtattttctttaaaaaagaatagaacattgtagattaagtgaaagtcccatcctaattgccatcatctcctgtctgtacctgagaggtgaccattgttctcagtttgggatggaccgttttagttctgttttcacattttattcatatrtgtactcaggaaacatatacttccttatataagtgtgctcatgtttccctagcgtagtatattytctagctttcttttgttycttttatttttatttatttatttttttgagacgtagtttcactcttttgcccaggctggagtgcrgtggtgcgatcttggctcactgcaagctccacctcctgggttgacgccattcttctttctgcctcagcctcctgagtagctgggactacaggtgcctgccaccacacctgactaattttttgtatttttagtagagatggcatttcaccgtgttagccaggttggtcttgatctcctgacctcrtgatctgcctgcctcggcctaccaaagtgctgagattacaggggtgaaccactgcgcccagccacgcctggccaatttttaaaattttttgtagagacagtctggctgtgttgcccaggctggtgtggaactcctggcctcaagcaatcctcccacccgggcctcccaaagtgctgggatttcaggcatgaggcaccgagcctggctggattttatattgaaactattcctgtcaaaatatctgattgaccggaacattctgtcctctgactatgcaggataagggtttttttcagggcctgttcttaggtcatgaagctcaatgattgtgacatccagcgagaacggcagtgagtgtggtaagtgtgcttggtcgtccagcctgatttctcgggatcgattaatacatggatagaaatatgtacagatgaccacggcgtatcctggctctgccgtatacagtcctgcggccctacattgactctttagaacgagggtgagtcacgcttcacttgcggctcatcccatggcattccatacattccattcggttcggaagctccgtgctgtttgtccgcgttgacctggcgatgactccttgagtgtcattgaggcaggtccagggcctttgctgaccctcggggctccttcacccctgccccgagccttcccctcttgcctgggcgacttccatgcaccctgggctcccatcaacccttacctgcagctgctcgctcatgtcaggtctgttctctgtgtgaatacgttggtcagaattcattgcgctgtcacttaaagtttatacttttttttttttgagatggagtctcgctcttgttgtccaggctggagtgcgatggcgcgatctcggctcaccgcaacctcctcctcccgggttcaagcaattctcttgcctcagcctcctgagtagctgggattacaggcatgcgtcaccacacctggctaattttgtattttcagtagagacggggtttctccatgttggtcaggctggtctcgaactcccaacctcaggtgatctgcccaccttggcctcccaaagcactgggattacaggcgtgagccaccgcgcccggctggttctggtgattcttgtgcctcagcctccccagtagctgggattacaggcgtgtgccaccacacctggctaatttttgtatttttagtagagacgaagtttcgccatgttggccaggaaggatgatctcaaactcctgacctcatgtgatccacttgctttggcctcccaaagtgctgggattacaggggtgatccaccccactgggcctatttatacattttgagcagggtgtggtggctcacacctgtaatcctaacactttgggaggttaaggcaggaggatcacttcaggccaggagtttgaggccagcctgggcaatagagtgagaccccatccctatttaaaaaaaagatttgtgtctgggcctggtggttcacgcctgtaatcccagcactttgggaggccgaggtgggcggatcacctgaggtcaggaattcaagaccagcctggccaacatggtgaaaccccgtctgtacaaaaatccaataattagctgggcataatggcgagtgcctgtaatcccagctactcgggaggctgaggtgggagaattgcgttaacctgggaggcagaggttgtagaggttgtagtgagccgagatggtgccgcgctgcagcctggttgacagaacaagactccagctcaaaaaaaaaaaaaaaaaaaaatttgttcattttatggtgattaaattatgccccacagtattgtttgcattagggacaaaaccttctgccccatttcgctcccttccatgacccytttttttttttttttttttttgagacagagtctcactctgttgcccaggctggagtgcagtggtgccatctagcctcactgcaacctccatctcctaggttcaagtgactcctgcctcagtctcccccgtagttgggattacaggcgtgtgccaccatgcccagctaatttttgtatttttagtagagtcggggttttaccatgttgaccaggctggtctcgaactcctgacttcaggtgatccgcccgctgcagcctcccaaagtgctgggattacaggtgtgagccaccgtgactggccatgacacatattttggtagtaaactcctgatgagcaaacttatttttattttttttacaagtttattttgtttatatagttttgttacttttttctttttttaattctggctctctccagaaaacagaaacctatttttctttaaccacagtatctagaatactatstgctatgtagcagagtctcaaatatttgaatagaattacatttttataaatttttgtattatatttcttatgtgataagacttgacaacactgcaaatatgttttgttactggtctttaaacttgctcatcctctctctctctctgtctctctctcacacacacacacacgcacacatacacaatttgcaaggtaaaacgtgtcaatttgaagaaagaggaactaactgaatcactgttatgtagaacagattttgccagaatttgtggttagcaagaaagtgatgtgttccgggtaggggaattctgttttggtattattttgtctttcctgagaaaagcatcacaaaaagagatgtttgcccatcctgtttgctggggtagtgggaagagaccgggggtgatggtggtgctggctggacgtgggtggtttcacaggacctgctgtgtctgagaggagccatgcggtgattagaagcttggaggctgcaggtaggaggcacagagcccgagagtgcatggagagcctggctgtcggtctccagcattgtcactgtcacctttttttttttttttttttttttggagacaaagtttttgctcttgttgcccaggctggagtgcaatggtgcgatctcggcacactgcaccctccgcctccygggttcaagcgagtcttctgcctcagcctcccgagtagctgggattacacgtgtccaccaccgcacctggctaatttttgtatttttagtagagatggggtttcaccatgttggccaggctggtctcgaacttggaacctcagtgatccccccgccttggcttcccaaagtgctgggattacaggcgtgagccactgcacctggtccattgtcatcctctgagaaactggagcgcggccacgctctgcatatttctactatagaatcaccaaaaaaaaaaaatcacataaccagacttaaagggcagaagtgctttgtgagaagtgtttttgggaaaatattggcattaaaatatcaggtagggtcccttttgggaggactgaggaggggtgtgtgttcagctccgggaggatctggtctgcccttcctgctgttttctgttgactgggtgggaggaggcactttgctgtttctgttgtgtgtagcaggggtttaatgggggtctttttagctccctataagcattttgaagtttgtgtgttatggaaatctgaagtgaaattacacaaagtaatttgattwaccccaggaagtactgtaggggccggagaaactcaggttaggtaatatctttcaagaagcccagttacgttattttccaggaatcttccaaaacctgatttgtgcgggtgtccaccaggagcctgatgagtgagttgtcatcagacccagtaatgcgctgttgttgtgtgaattggtgctttcagaaaattttgttatacaagtgatacaaccacaatcgcaaaaatttcatagacaaatcacctgtagttccaccccttttaacagccgttgcattttaatatatttccttttttcctgtgcattgctttgtatgtagttatcatcatagtgaatatgcgtctttatagttagttcctttcacttgacatttttctacactgctagttttcgtaattttctacctagtgtctgtataatagtgcattaaggaatataaagttgtgcttcgaaagtgctaatatgataaaatttcagttaaaaaaaatttcagttaragatattcttgccacatgttttccagaaaatgatttgttaaatggaatccatattaaaatttgtcccggaggctgggcacggtggctcacgcctgtaatcccagcactttgggaggctgaggtggctggattacagcctggccaacatggtgaaaccccgtctctactaaaaaaaaatacaaaaattagccaggcttggtggcatgcgcctgtaatcccagctactcgggagcctgaggaaggagaattgctcgaggttgcagtgagctgagatcgcgccactgcactccagcctgggcgacagaacaagactgtctcaaaaacaaaaaacaaacaaaaaaatgacttgtcccgggttgggcacagtggctcatgcctgtaatcccaatgctttgggagaccctacagagcctgataagggataagactgaatgaaaatcgaggaagatgccgtaccaattaggctggtagttccctctggcgggaagaaggcacccagatctgtcagggatgcaaccagaaggagcgtttccagggtgccgctgtctttattttttattttgtagagacagggactcactacgttgctgaggctgttcttgaactcctgggctcaagcagttctcctgcttcggcctcccaaagtgctgggattactggtgtgagccaccgtgcctagtctggctgtctttaattcttggcctggatggtggttacacgtgtttggtaaataattttgttcgagtgttcatagaagttttatagtcctttctgtgcatgtgtaaagtatttaataatacaaaataatacaatacaggccgggcatggtggctcacgcctgtaatcccagcacttagggaggccgaggcaggcggatcacctgaggtcaggagttcgagaccagcatgaccaacatggtgaaacctcctctctaataaaagtataaacattagccaggtgtggtggcgggtgcctgtaatcccagctacttgggaggctgagacaggagaatcacttgaacccrggaggcagaggttgcagtgagctgagattgcaccactgcactcaagcctgggcaacagagcaagactttatctcaaaaacaaacaaacaaacaaaaatacaaaatgttgggggaaaacctgaggttcctaagataattttgtaggactatctggactgactgccttggtattcatgccccaagtcccgttggatttacccagagggaggtgcctttagggtgaaatccgttttcttgcctcagtgtctgctcctaacagagggcactgcggttgatcagcagaagagctcccctgcctccagctgtttctgaggcctgagtgctgctggctcagcccggtgctctgttgagtccagctgtttcggtgacccaccggcagcacagcaggaaggagcacccagaccctccggcgtctgcaggaacagcaaggcttgtctgggaacctcactctcagccaaaagccaaaagcagctctctggccaaagctgtcaaggagagtcagatgatattcattactgggcacagttcattatcttcaggaccgaaatttcacctcccagctcctgagaaattccagtccaggctgggggtggacctgtctttcaagaaccggccacttagtgcccgtgttttgcaccaaaaggagatttgaaattgcattttcagctcttcagagtctggggagtgtctctgtgtgtgcagtttcttatctcaggacggcatgtgcacggttagccttccttccttggctagataggaaaggagggacactcctggaagcttctgcgaagtttaaagtgaccctgtgttatgtgcaaatgggcgtgcttccctccaaggtgggctactcagtgaggggaccgtattcccatctgcccctgtccttgrggagatggaattttttttttttttgagatggagtctcgctctgtcgcccaggctggagtacagtggggcaatctccgctcgctgcaagctccgcctcccgggttcacgccattctcctgcctcagcctcccgagtagctgggactacaggcgcccgccaccacgcctggctaattttttgtatttttagtggagatggggtttcaccctgttagccaggatggtctckatctcctgacctcgtgatcygcccaccttggcctcccaaagtgctgggattccaggcgtgagctgccgtgcccggccggggagatggatttatgtgtagtcggtccttctttgcagagcaggggtgggagaatgagtcccactgatccccaactctcttttttttttttttttgagacggagtctcgctctgtcgtccaggctggagtgcagtggcacagtctcggctcactgcaagctccgcctcctggattcatgccattctcctgcctcagcctcccgagtagctgggactacaggcgcccgccaccacgcctggctaatttttttgtattttttttttttaagtttttawtttttttwattttttatttattattattatttttttaattgatcattcttgtgtttctcgcagagggggatttggcagggtcataggacaatagtggagggaaggtcggcagataaacacgtgaacaaaggtctctggttttcctaggcagaggaccctgcggccttccacagtgtttgtgtccctgggtacttgagattagggagtggtgatgactcttaacgagcatgctgccttcaggatctgtttaacaaagcatatcttgcaccgcccttaatccatttaaccctgagtggacacagcacatgtttcagagagcacagggttggtggtaaggtcacagatcaacaggatcccaaggcagaagaatttttcttagtacagaacaaaatgaaaagtctcccatgtctacttctttctacacagacacggcaaccatccgatttctcaatcttttccccacctttcccgcccttctattccacaaaaccgccattgtcatcctggcctgttctcaatgagctgttgagtacacctcccagacggggtggtggccgggcagaggggctcctcacttcccagtaggggcggccgggcagaggcgcccctcacctcccagacggggcggctggctgggcggggggctgacccctccacctccctcccggacggggcggctggccgggcggggggctgacccccccacctccctcccggacggggcggctggccgggcggggggctgaccccctgacctccctcctggatggggcggctggccgggcagaggggctcctcacttcccagtagggacggctgggcagaggcactcctcacctcccggacggggcggctggccgggcggggggctgacccccccacctccctcccggacggggcggctggccgggyggggggctgacctccccacctccctcctggacggggcggctggcctggcgggggctgacccccacctctgtcccggacggggtggctgccgggcggagacgctcctcacttcccagacggggtggctgctgggcggagaggctcctcacttctcagacagggcggctgccgggcggaggggctcctcacttctcagacggggcggttgccaggcagagggtctcctcacttctcagacggggcggccgggcagagacgctcctcacctcccagacgaggtcgcggccgggcagaggcgctcctcacatcccagacggggcggyggggcagaggcgctccccacatctcagacgatgggcggccgggcaaagacactcctcacttcctagatgtggtggcggccgggaagaggtgctcctcacttcctagatggggtggcagctgggcagagacgctcctcactttccagactgggcagccaggcagaagggctcctcacatcccagacgatgggcggccaggcagagacgctcctcacttcccagacggggtggtggccgggcagaggctgcaatctcggcactttgggaggccaaggcaggcggctgggaggtggaggttgtagccagccgagatcacrccrctgcactccagcctgggcaccattgagcactgagtgaactagactccgtctgcaatcccggcacctcgggaggccgaggctggtggatcactcacggttaggagctgagaccggcctggccaacacagcgaaaccccgtctccaccaaaaaaatacgaaaaccagtcaggcgtggcggcgcgagcctgcaatcgcaggcactcggcaggctgaggcaggagaatcaggcagggaggttgcagtgagccgagatggcagcagtacagtccagcttcggctcggcatcagagggagaccgtggaaagagagggagagggagaccgtcgggagaggggagagggtatttttttttaatagagatgaagtttcaccgtgttagccaggatggtctcgatctcttgacctggtgatctgcctgcctcggcctcccaaagtgctgggattacaggtgtgagccaccgcgcctggccgatccccaactctttgagagcctggacaatgtgctctgcattctccttagggtctgtgtgtgaactaacaagctgagaagtaggtagtcctagcctcacttcagagatgaggaaactgaggcatacagaggtttggtaatgagttaggagacagaactcgacgctggaggcagggcctggatagcagtcgaaattgaggactagctgaaataggtccagggcagaatcaccttcccataagacacgcctgccagtgggccatgtcagtttaccatcaccatggcaacacgtggatgcccttttccatgacaatgactggacaacccggaatttactacccccattctagaaatttctgcataaatcaccccttagtttgcatataattaaaagtaggtataaatatgagtgcaacactgcctctaagttgctgctctgggtgccctggtaagggggtggttctgctctgcaaggagcaggacctctgttgctgctgtgcgtgctgctgcttcaataaaagttgctaacaccatcggctcarccttgaattccttcctagacaaagcctagaagcctctgggctaagcccgaatttgggggctggcctgccttgtattcatatgcccatgagcacacggccaataggtggtggtgctgggattcacaccaggtgtggggctgcagctgggacatgagcagtgtggcctggcctgtgagggtctctgttggatttgcgtctggccacgttaagcagccattcgtaggcatggagctttccctcttcagatggttttccttagagggagatagttgcacagacctttctcataaataacaccctagacaattgtgctaggtcctttttatcttttcagaacaggaatgcactttaaagttaggaaacaggacgtaatgaaagagcatgtaaattcagaatgcctgttgtgagtgttgaagtcattttgtgggagaatggttacttgtctcgttcgaggttgggtttaagctccacaacaggggctgggcacagtgactcacgcctgtaatcccagcactttgggaggccaaggtagacagatcatttgaggtcaggagttcgagaacagcctggccaacatggtgaaaccccgtctctactaaaaatacaaaaattagctgggcgtggtggcatgcgcctataatcctagctactcgggaggctgaggcaggagaatcatttgaacccaggaggtggaggttgcagggagccaagattgcaccactgcactccagcctgggtgacaagaatgaaactctgtctcaataatttaaaaaaaaaagaaaaaaagaccagcctgggcattacatagcgagaccttttctctacaaaaaaatgaaaaaattagccaggcatggtggtacgtgtctgtagttccggttacttgggaggctgaggcaggaggatcgcttgagcccaagagactgaggctacagtgagcyaagatcgtgccactgcactccagcctaggtgacaacagatcaagactctgtctccaaaaaaaagagagaaagctttgcaacgtgtctactgaaaatatttagttcattctggacaactgggtgtagacagtctgtttccagttgagttcaacataaaatctccttgaattgtcagctctgaaaaaacaaatcacttcttgaattttgtgaggcacaggctgagttcccttaaacgcgttaagataatctgagcatcctggttaaccaatcttggagttttggggtctgtaagacaccagatgagagtccagccttctgtgcatggaaaactaggtcttcgtgttcagtgcaaatttagccgtgggggaaaaactgactaaatatttctcttcctgtgacatttttcacagttcctaatttgttcttgctgacttctgaggcgttacattttctggttgattaattgcgttccttgttgtctacccttaaggcagccaggagaaggaagtgcgccttcttccttgctgtgcttgccatagatcaatcaaggtttgctgaaatggatttaattgtatctcacttggcccattatgctggctgactgcttggaattttcttggagggaccttatttggtggccaatgaaggttcttctccatttggcctctatgaggatcaagacagacttagccccgtcagatattttggaatmttttcactttcatgtcaggagaccctagaaaaaaaccggagtcactttcagaccaaaccaaccaccagccaggaggagggttaaaaaagaaaacgcaagaaaccaggcatgggtggcatttagttaaacagagacgaggactctttttggaactccaaactcctacttggtaggttattccaagattcccccaatttgctaaaatagtattcctttttaactccggaacaaatcgctgggcctcccctcagataaacattcccgaaatgagagacccgagaggtgttttgaggaatgagctgaagtccaatgggccctttcagaagggggttccgggggattggtgggacggatggctctgatgtccttggctggctccgcttgtcccttgactctgatttgagtcagaggaaatcatctgagcggtgagtatttccagcaccacacttcagttttgtgacgtggaaccagtgattttttttttcccctttgtggtctggtctcttgcatctcccatgtcctgcttgtgtgtgggtgtgcgtggggggttcatatgcagttccctgggtctcagcgatggatggcccgtgctctgtttgtaatcatccacggaacctcaggcgtggtctggttcctgatgagaacaagatgccgttgtcctatcgaggaacctagctctctggggagccctgaccctggtcagcagcttgctctgtctgtggtttgatctgggaatttggtatcaggagtataggcccattaaaaaagaaaagctcagaccaggcatggtgggtcacgcatgtaatcccagcactttaggaggccgaggtgggaggatcacttgaggtcaggagttcgagaccagcctggccatcatggcgaaaccctgtctctaccaaaaatccaaaaaattagctaggcgtggtagcatgtgcctgtaatcccagctgctcgggaggctgaggtatgagaatctcttgaacctgggaggtggaggttgcagtgagctgagatcgtgccactgcactccaggctgggggacagagcaagactccatctcaaaaacaaaaaacaaaaaacaaaaacaaaaccaaaacccaggttgggtgtggtggctcatgcctgtaatcccagcactttgggaggctgaggcgggtggatcacctgaggttaggagttcgagaccagcctggccaacatggtgaaaccccgtctctactaaaaatacaaaaattacctgggcgtgctggtgcatgcctgtaatcccagctacccgggaggctgaggcaggagaattgctggaacctgggaggctgckgttgcagagagccgagattgcaccactgcactccagcctgggggacagaatgagactccgtctcaaaaaacaaaacaaaacaacccaaaccaaaaataaaacgaaaaagaaaagttcagagcctgggcaccatagtgagactttgcctctacaaaaaaaataaaaagttagctgcacatgatggggcaggcctgtagccccggctactcgggagtctgaggcaggaagatcactagagcctgggagttcgaggtgatctcgcactgtgcgagctgtgatcgcactactgtactccagcctgcacgacagagcgagatcctctctaaaaataagaataaagaaaagcttgggccctgggcaccatgctaggtgctttaacattttttgtgtttttttagtgtttcttttaaaaaaatatttttatttcaatagttttagggctggtttttggttatgtagatgaattgttcgttggtcgaggctgggtttttattgtacttgtcaccaaaataatgtccatggtacacagtaggtaatttttcatccttcaccccctcccgccctctgagggtccagtgtctgttatcccacttttgcctgcttttgtgtccccgtagttcagctctcacttataagtgagaacatgtggtatttgggtttctgatcctgagttacttcacttaggataatggcctccagtctcatccaagttgctgcaaaagacatgatttcattcttttctatgactgagtagaattccatgatgtatatgaaccacattttctgcatctactcatcggttgaygggcacttaggttgattccatatctttgcaactgtgaattgtgctgcgataaatgggcatgtgcaggtatttttttttttttttttttttttttttgcggcggggttttgctcctgttgcccaggctgcagtgcagtggcacaatctcggctcactgcaacctgtccctcttgggttcaagcgattctcctgcctcagcctcccaaatagctgggattataggcatgtgccaccgtgcctggctaattttgtatttttagtagagatggggtttcaccatgttggccaggctggtctcgaactcctgacctcaagtgatctgcccgcctcggcctcccaaagtgctgggattacaggtgtgagccaccatgcccgtcccctttttgatgtaattatttcttttcttttgggtgattacccagtagtgggactactggattgaatggtagatgtgcctttagttttctgagaaatctccatactgttttccgcaaaggctgtactaatttcattcccatcggtagcgtgtaagcattccctctgtaccacatctacgccaacatctgttgttctttgactttttaataatagccattctggctggggtaagatactatctcattgtggttttaatttgcatgtccctgtgatggattagtgattttgagcattttgcatatattttttggccatttgtatatatttttttcttttttgagacagagtctcactcttgttgcccaggctggagtgcaatggcgtgatctcagctcactgcaacctctgcctcccaggttcaagcgattctcatgcctcagcctcctgagtagctgggattacaggtgtccgccaccatgcctggctaatttttgtatttttgtagagatggggtttaaccatgttggctaggctggtctcgaactcctgacctcaggtgatccacccgcctcggcctcccaaagtgctgggattacaggtgtgagccaccacacccggctgtttcaaaatatcttaatgttacatcacattaaataaggtattaaatagccccatttatatagcaatcaggcaagagaaataaagtgcatctggattggaagagaggaagtcaaactatctctgtttgctgatgatatgatattatacctagaacaccctcaagactcctctagaagactcctagatttgagaaaagaattcagtgaagtttcaggttacaaaatcagtatacacaaatcagtagcatgctatctgccagcagcgaccaagctgagaatcaaatcaagaactcattcccatttacaatagctacaataacaacaaccaaacaccctaggaatatagttacccaaggatgtgaaagatctctacaaggagaacaataaaacactgatgaaataaatcatagatgacacaaacaaatggaaaaacatcccgtgctcagggattgggagaatcaatattgtgaaaatgaccacactgccaaaagcaatctacagagtcagtgtgattcctaccaagataccaacgtcatttttcacagaattagaaaaagatccaaaaattcacatggaaacaatgagcccgaaaaggcaaagcaatcctaagcaaaaggaatgaatttggagggatcgcattacctgattcaagttaatctctaaggctgtagtaaccaaaatagcatgatcctggtataaacgtgcacacagacccatggaacagaataggaacccagaaataaagctacatttttacaagcagctgatctttgacaaaacatacaaaaacatatcactggggaaaggacgccctggttaataagtggcgctaggaaaattggatagccacatgcaaaagaatgaaactgggtcgctcgctctcaccatatgcaaaaatcaactcaagacttaaatctaagacctgaaactataacaactctagaagataacattgggagaactcttccggacataggccaaggcaaagaatttatgcccaaggccccaaaagcaacagaaacacatttccctttttttttttttttttttttttttgctgggattacaggcgcctgccaccatgcctggctgatttttgtatttttagtagagacagggtttcaccatgttggccaggctagtcttgcactcctgttctcaggtgatccacctgccttggcctcccaaagtgctgagattacaggtgtgtgcctccgtgcctggcctctttttttttttttttttttgagatggagtatccctctgttacccgggctgggtgcaatggcacgaactcggctcactgcagcctccgtctcctgagttcaagcagttctcgagcctcagactcccgagtagctgggattacaggcacgtgccaccacacttggctaatttttgtatttttattagatatgctgtttcaccatgttggccaggctggtctcgaactcctgacctcaagtgatctgcccgccttggcctcccaaagttgctgggataacaggtgtgagccaccgcgcttggcctacattttctgttttgaattcttgcaaccaaacagtgaggtggatggtcttgtcttttattattttattttatttatttttatattttaggagacagggtcttattctgttacccaggttggaatgcagtggcacaatcatagctcactgtagccttgaactcctggggctcaagtgatcctcctacctcagcttcccaagtagctgggaccacaggtgtgcaccaccatgcctgactttttatttttttgtagagatggggtattgccatgttccccgggctggtctccagctcctggctcaagtgatcctccctgtttggcctcacaaagtgctgggattacaggtgtgagccgctgctggccttggcctcattttagagcagggacctcggagtgcagaggggtgaactgcttgctgatggtcacagacagacctgcggctccagctcctgctcctgctcacatgtttttgggtgttgaatgaggccaccagggagggagcctaggctctggtgtcactgagtagcctggtacatgttctgtccccccagccaccttgctggctctgtgaccttgggcaggtcatcacccgctgggcctccaatttctgcatctgtaaaatgagatcacaaatgtacctacttacagtgtttttaggaacaaagagatggtctatgaagtgtccggtagacttccagacaccagcactgyatgagggctccaatctccaagtccttgccagtactggtgactgcctgtctttgtgattatagccattgtggtgggggtggtgacatctcactgtggttgagcatcttttttttttcttttttttcttatttatttatttattttgagatggagtcttgcacttgtcgcctgggctggggtgcaatggcgtgatctcggctcactgcaacctctgcctcccaggttcaaacgattctctggcctcagcctcccgagtagctgagattacaggtgcccaccaccatgcccagctaattttttgtatttctagtagagacagggtttcactatgttggccaggctggtctcgaactcctgacctcgtgatccacccacctcggcctcccaaagtgctgggattacaggcatgagccactgcgctcagcctctatttttttttttgagacagagtttcactcttgttgcccaggctggagtgcactggtgtgatctcggctcaccgcaacctccccctcccgggtaccagttcaagcagttctgcctcagcctcctgagtagttgggattactggcacgcaccaccacacccagctaatttttgtatttttagtagagacgggatttcaccatgttggccaggcaggtctcgaactcctgacctcgtgatccgcccgcctcagcctcccaaagtgctgggattacaggcgtgagccaccatgcctggcctggcctctttttttaatttttgagatggagtcttgctttgtcacccaggctggagtacaatggcgctatcttggctcactgcaaccatcacctcctgggttcaagcgattctcctgcttcagccttccgagtagctgggattgcaggcacacaccaccacacccagctaatttttgtatttttgtatttttagtagagatggggtttcaccatgttggccagggtggtctcgatctcctgacctcatgatccacctgcctyggcctcccagagtgctaggattccaggcgtgagccaccgcacccgactgagcatcttttcaggtgctcattggccatttctgcatcttatttagataaatgactattcaaattttttgtacatctttaaaattaggtaatttggcttgtttcagtggctcacgcctgtaattccagcactttgggaggccgaggtgggtggatcacttaagcttaggaattggagacctgcgctcatgtgatcctcccacctcagcctcccaaaagtgctatgattacaggcgtgagccactgtgcccagcctggtctcactttcttggtggtgtcatttgcagcacagcagttttaaattttgatgaagttcagtttatctcttttgttatgtatttacttattatttttaggtataaggtcttactctatcacccgggctggagtgcagtggcacgattgtagctcactgcagcctcaacctgggctcaagtcattctgccaccttggcttcttgggtagctgggactacaagcatgagccaccatgcctggctaattttttatttttgttttgtagaggcaggatcttgccgcgttgcccaggctggtgtccaaatctagcctcgaggaaaccctctcacctcaacctcccaaattgctgggtattttgttcttttgttgctgtgcttttggtgtcatatctaagaagtctttgcctgggccgggcacagtggctcacgcctgtaatcccagcacttcgggaggccgaggcgggtggatcatgaggtcaggagattgagaccatcctggccaacatggtgaaaccacgtttctactaaaaatacaaaaaattagccgggtgtggtggtggacgcctgtagtcccagctactcgggaggctgaggcaggagaatggcgtgaacctgggaggcggagcttgcagtgagccgagatcgcgccactgcactacagcctgggcgacagagcaagactccgtcttaaaaaaaaaaaaaaagaagtctttgcctatcccaaggtcatgaagatttatgcctatattttctgctaagagttttgtaatggtagctcttgcatttaggtctgtgatcagttttgagttagttatcatatatggtgtgagggaggggtccggcttcatttttttttgagatggagtctcactgtgttgcccaggctggagtacaatggtgggatcttggctcactgcaacctctgcctcccaggttcaagtgattctcctgcctcagcctcccaagtagctgggattacaggcatgcaccaccacgcctggctaatttcgtatttttagtagagacagggtttcaccatgttggtcaggctggtgtcgaactcctgacctcaggtgatccatccacctcggcctcccagagtgttgggattacaggcatgagccagtgcgcccagccatgcctcatgcttttgaaggtgggtacccagttgtccgtcattagacgtgttctgggtgcacctgtggtgtgctcctcccatgataggcagcagtgggaagccacagctctctaagggagtgtttgttttagtttgggagaagcctgtgaatgagacaggttgaggaaggttcaaaaaggagagtgaagccagttgtaggagtgtgaaggaaggaaggactgatagacccttaaccggggtgggaagtacttcattgttgaagtggggtttgaactgagcttggagcctggagagaactgatttcagaaattctcagtaatcaggaccagggggttgggtcttccgagactggtttcctttttttttttttcttttttctttttgagaccgagtctcgctctataacccaggctagagtgcagtgccatgatctcggctccctgcagcctctgcctcctgggttcaagtgattctcgtgcctcagccttccaagtagctgagattacaggcatgtgccaccacagccagctaatttttgtatttttagtagagacagggtttcgccatgttggccatgctggtctcgaactcctgagctcaggtgatctgcccgccttggcctcccaaagtgctgggattacaggtgtagtccaccacatccggcctagtttctttttttttttaaacagggtgtcttctgctccccaggctagactgcagtagcgcaatcatagcttactgcagccttgaacttctgggctcaaaggaccctcctgcctcagctttggaagcagctggaactacagattcacaccaccacgcctgactggttttttttcttttttttggtagaaatagggtcttgctgtgttgcccaggttggtctcaaactcctgggctcaagtgatcctctccagcctcagcctcccaaagttctgggattgcaggcgtgagccagtgccccgctacaagactgtttatactttgcttcaaggtagaaacactgagaccattgcaggaagacagcaaccttcttctctgactgtaggttggttgttctgacgatgcggcagtgtttcctcacctgggttcctcctcctgttctcctgggggaaaaggytgtagctgagaattggcagagaggccgtggtggaggagggaagattctctgctttgtgcggaggtcactctcgggactcagtgtggcagggtctgttgactacgttctctttgtgtcagcagcttttgcttggtgctgtggctgactgaggcgcggtccccatcaccatgagacctcacaggtgctgggagggcatgcggctgttgccctgcctcggccaccctcctggccccaaattaagttatatggctttcttgctcacgtgaattaaattattttcattcattcagcagatgtttatttagcatctattatgtgctgggcactgttatttttcttttcttttctttattttttgagacagagtctcattctgtcactgaggctagagtgcagtggtgtgatctcggctcactgcaacttctacctcctgggttcaagagattctcgtgcctcagcctctggagtatctggaattacaggcatgcatcaccgtgcctggctaattttatttgtatttttagtagagaccgagtctgactgtgttgtcctggctggtctcgaactccaggcctccagtgatccgcccatcttggcctccaaaagtgctgggattacaggtacgagccattgcactggctttatttatttattttttcatttatttagaggcagagttttgcccttgtcgccaggctggagggccgtggtgtaatctccgcgcactgcaacctccacctcccaggttcaagcgattttccttcctcagcctcctgagtagctgggattacaggtgcgcaccaccacgcccggctaatttttgtatttttagtagaggtagggtttcaccatgttggccaggctggtactgaactcctgacctcaggtgatccacccgcctcagcctcccaaagtgttggcattacaggtgtgtgctatcacgctggccttatttttattttttgaaatggagtcttgctctgttgcccaggcaggagygtagtggctcgatcatggctcactgtagcctccgcctcaccctcccgaatagctgggactataggtgcgtgccacggtgcctggcccgaatggctttgttatacccacgtgaacagtactacgttttactaacagaaaagcatcaaatgagacttttcttccgaaactatgttcagagagtgactgcagtattgccttggcaatctagtgaatgtatcctcaccgcattaaaaaaaagagaaaaacagaatttttgcttcctctctgaggattgggaatatggaacggtggttataacgtaaagggaaaagcatctagatggaacagtgaactaatggatcgcaactgtgttaaaagaggcacagtcctcctggaatgagggaagacggacggaaaatgctgaatgttggctcgtgtgcgaggcagctggagctcttgctggtgggagtgtgaattggctcagtcactttggaaaactgaaatatttaccaagctgaacatatgcagatcccgtgatccagcaatttcacttgtagatatgttatggagccaacagaaaggcacacatatgtccaccaagagccacgtgctggaatgttcgtaacagcaccgtgtggaacagggaggtgctggaaccctcccagatgccccgcagcagagggaggaggaggcgacgaggacacatagtcacgcagcggcgcccaccacaggggcagccatcgccccacagccacgtgcacaacaggtctcgcagcctgatgctgagggaaagacgtcaggaacaaaggaactgactttcgaccgtggttacataatataaaaacaagccaggtgcagaggctcacacctgtaatcccagcacttttggaggctgaggaaggaggattgcttgagactcggagttggagaccagcctgagcaacatggggaaacctcatctctacaaaaaataacgaaaattagctgggtgtggtggcatgtgcctgtggtcccagctacactcaggaggctgagatgggaggattgcttgagccggggacgtcaaggctacagtgagctgtgactgcatcactgcactccagcctgggcgacagagtgagaccctgtctcaaaaacaaaaaccccaaaacaggcaaacccccaaaaaacccctgagcttgagaagtcagtggttactcttggggtggtgacaggttctgagtgggcatcgatgctaattctgctgttgcttctctgggtgcgatggccctggggcactcatgtagaaaactcactgggctgcgcagtcgagaaacacctgcctggaaacggtacccatcagctctagaaagcactcactttgagtagggaaagggagaggaggggaatgacgtgtgtctgtaatgtgtgtgtgtgtattttcactgtaaatttaatatatccatgacagaaatttatctctggatgccataaaaatattcactaagattttctacaaagacagtatctgaatttttttttttttttttttttttaagacagtcttgctctgtcgcctaggctggagtgcagtggtgcgatctcggctcacagcaacctccacctccgcctctcaggctcaagtgattctccttcctcagcctcccgagtaggtgggattacaggcacacaccaccctgcctggccaatttttgtattattagtagagatgggggtttcaccatggtggccaggctggtctcgaactcctgacctcaggtaatccacccgcctcagcctcccacagtgttgggattacgggcgtgagccactctgcccagccagtacctgaatattgaactgtaggctccgtggatggtccagaacacatgacaacaccaccagtgtgttcaaaagcacagtcagccacacagccacactgaagagtatagccaagttgaagggtttttcccagaacaccatgaagcatagttcttttttttttttttctgctcgcccaggcaggagtgcaatggtgttatcctggctcactgcagtcccaaagtgttgggattacaggcatgagccactgcgcccagcctctatatagagttttkttgttgttgttgttgtttatttttgtttttgtttgagacggagtctcactctgtcgcccaggctggagtgcagtgtggtgcgatctcagctcagtgcaacctccaccttctgggttcaagcgattctcctgcctcagtctcccaagtagctgggactataggtgcccgccagcatgtgtagctaatttttgtattattattatttttgagacaaagttttgctcttgttgcccaggctggagtgcaatggcgtgatctcggctcactgcaacctctgcctcccaggttcaagtgattgtcctgcctcagcctccctagtagctgggattacaggcatgcgccaccacacccgtctaatttttgtatttttagtagagatggggtttctctatgttggccaggctggtctcgaactcctcactcaatggatccacctgcttcagcctcccaaagtactggaattacaggtgtgaggcaccccgcctggacaataatcacttttaatatttttttcatcagtcttttttttttgaaacagagtcttgctctgttgcccaggctggattgcttgagcccaggagtttgagactagcctgagcaacatggcgagaccctatctctatgaaaaattattattattattatttttgagacagagtctcactctgttgcccaggctggagtacagtggtgcaatctcggctcactgcaacctctgcctcctgagttcaagcaattctctgcctcagcctcctgagtagctgggattacaggtgcccaccaccacgcctggctaatttttgtatgtttagtagagatggagtttcaccatgttggccaggctggtcttgaactcctgacctcatgatctgcccacctcagcctcccaaagtgctgcgatcacaggtgtgagccacctcgcctggccaaaaaattaattttttaaaaatataaaatctataaaaaatttaggctggttgcggtggctcatgcctgtaatcccagcactttgggaggctgaggcatggatcacgaggtcaggagatcgagaccatcctggctaacatggtgaaaccccatctctactaaaaatacaaaaaattagccggatgtggtggtgggcgcctgtagtcccrgctactcaggaggctgaggcaggagaatggcgtgaaccccgggaggtggaggttgcagtgagccgagatcgtgccactgcactccagcctgggcgacagagcaagactccattaaaaaaaaaaaaaaattataaaatagcccgtatggcacattacagctttatgcacatggaaagtaatatgcaaaaatgaatatagatgtgtacaggttgtagggatggagtgagtttatttcaaaatatcttaatgttacatcacattaaataaggtattaaaaataaacctaaaggttaatgaaattgaggctatgaaaagtttctgtttaaagtatacgacctaggctgggtgaggtggctctcgtctgtaatcccagcactttgggaggccgaggcaggcggatcacctgagttcaggagttcaagaccagcctggccatcatggtgaaaccccgtctctacccaaaatacaaaaattagtcaggtgtggtggtgtgtgcctgtaatcccagctgctctgaaggctgaggcaggagaatcgcttgaacctgggacttggaggttgcagtgagccgagatagcgccacagcattccagcttgggagacagagcaagactccctctcaaaaaagaaaaaaaaaaaaaaagttactgtttaaagtatacaacctaggctgggtgctatggctcacgcctgtaatcccagcactttgataggttgaggtgggaggattgcttgagtccaggagttcgagaccagcctgggcaacatagtgagacccccccgcatatctacaaaaaatacaaaaattagctgggcatggtggtgcacacgtgtactacatttatagttccagctacttgggaggctgaggtgggaggattgcttgagcccaggaggtcctggcaacagtgagctgtgatcgtgccactgcattccagcctaggcaacagagaaagatcctgtctcaaataaaaaaaatagaaaaagaaagtatgagacctgtatggcagttagcgcagtagttaggggagctgtcttgggcatgagaggatcatgggtgaagtgtgttacctgtaacagaagcatctctatttctccatgttcgaggggcgttcctgctgttccctggccacagagctgccaaactctcatgtctaatgccatggctataatatggatcaggaaacttctgcttccatttcctgagaacagtttgttaatttcagaataacatagtagcttagagaaagtttttttgttttgagactgagtctcgctctgttgcccaggctggaatgcagtggcgcgawcttggctcaccgcaacctctgcctcccgggttcaagcaattctcctgcctcagcctcccaagtagctgggactacaggcgcccgccaccatgcctaactaattttttgcatttttttttttttttttttgagacggagtcttgctctgtcacccaggctggagtgcagtggcgccatctcggctcactgcaacttctgcctcccgggttcacgccattctcctgcctcagactcccgagtagctgggactacaggtgtccgccaccacacccggctaattttttgtatttttagaagagatgaggtttcatcgtgttagccaggatggtctcgatctcctgaccttgtgatccgcccacctcagcctccaaaagtgctgggatttacaggcgtgaggcactccgcccagccaagaagttttaattaatttacttatttatttattagccgactcagaatgtgtaagtagagaaggttttaatccagggtagaaagtgtttatgagcggaagaaggaatattcacattgaaaattgaagacatctgcggactgtctttcatttgatttcagtggaaaaggtgtagtctgacttgtcgtttttcattctccccatccagatgaagaaataaaagcaataggccaggcacagtggctcacgcctgtaatcccagcactttgggaggctgaggtgggcggatcacaaggtcaggagatcgagaccagcctggccaacgtggtgaaaacctgtctctactaaaaacacaaaaaattagctgggcatggtggtgtgcacctgtagtccctgctactcagtaggaggctgaggcaggagaatcgcttaaacccgggaggcggagattgcagtgaactgagattgcaccattgcactccagcctgggcaacagagtgagactctgtctcaaaaaaaaaaaaaaaaaaaaaaaggaaataaaagcagtgtttatgaacacctgatttccattctacttcgggggcggggtcaggacaagggatcgaattccttctctctgttgccctatgacaagggctttcaaactgtggcccctgaccagaagcagcatctgggaacttgttagaaatgcagattccaggctgggtgtggtggctcacgcctgtcatcccagcactataggaggctgaggcgggtggatcacctgaggtcaggagttcgagactagcctggacaacatggtgaaacmccatctctactaaaaatacaaaaattagccgggcgtggtggcgggtgcctgtaatcccagcaatttgggaagcagaggcgggtagatcacttgaggtcaggagttcaggacaagcctggtcaacatggtgaaaccccatgtctcctaaaaatgcaaaattagccaggtatggtggcacatgcctgtaatcccagctactcgggaggttgaggcatgagaatcgctggaaccctggacactgaggttgcagtgagccaagattgtgccrctgcactctagcttgggtgacagagtaagactccggcaccccctccaaaaaaagcagattcccagtccccaccccagccctcctgttggagagacgctgggagtgggcccagccctctgtgtttgaaggagcccaccaggtgattctgatacgcacccactttggggaatttagccctgggacgctgtgccatccttgctggtcctgatctcccctccgttctagggaactggcagctggggacagcagccgtgtgtcgtggaagagcagggaacttggagtccatgggaatgcgcattcaggtcctccctgccactaaaggggacagtaggaaccacactcgtggtctccttgggaaggcccctgccctgtcctggctctgaaagcaccggccctgaaggcctctccatcggcacggggaaccccagggagtgcctgggcggcgcggacctggagctgggggtgtgtctgagtgctcagtgtagccccacgctgggtcagcaggaagtagtgtgcgggccagtccggggcgggcttggcctccaggcaacagctgcagctgtgctgcttgggaccctccagtgtctgtcccgtgccacctgcgccgaggctggcagggcctgtgacttctgctgaggtcagcatttgcgaaggtgtgcttcaatgaagggggagcgtctttgcatggggtttgtcggtaaatcctgtttgtttgtttctttttttttttttgagacggagtctggttttgtcgcccaggctggagtgcagtggcgcgatctctgctcactgcaagctccgcctcccgggttcacaccattctcctgcctcagcctcccgagtagctgggactacaggcttccgccaccatgcccggctaattttttgtatttttagtagagacggggtttcaccatgttagccaggatggtctcgatctcctgacctcgtgatccacccgcctcggcctgccaaagtgctgggattacaggcgtgagccaccatgcctggccatgcccagctaatttttgtgtgtttagtagagatggaatttcgccacgttggccaggcaggcctcaaactcctgaccttaggtgatccacctgcctcggcctcccaaagtgctrggaattcaggcgtgagccactgcgcccggccaatccttttttgtttctaaagctgcggtctctggggtgggaggcccgagatgtcagctgtgaaaagaatgtagtgctcacctgctctgtgttgttactgtctgaagttcctggtgaaagacactgggcgggagatgggtgtgtgtgtttgaagtttcgttaccttctgatttgyggataactcgcttggagattcacagacttgtgaggctgaaaggatcttgaatgttgcttgtgggttgtttcccctttttttgttgcaaagaggggtcacagtgggccggcggctgacttgggcctgactttgcccctcaccgcatgcctggtttctgtgacagctgcccagccccctctcacagtttatctttgcaagtgcagcatccaagtgtgactcccacacattgtgtggaaggcaccaatttgtgagccagtctgggagctgaccgccaccgaaaacttgctgagaggggaatgcattctgagttttagtgggtagatctgcagaatcttttcggattggagcgtggtaaatctggaaggaagtcagggacacttattgaatgttttctatttgctagttattttcagctctcccacctcactgaattctgaggcccttggcctgggatctgaggggctgcttccctcccagggtctcacagatagtgagcggcatttcaggggcaagacacttccaagtccaggttccgggttgggtctgaagcccacagtgaagcagtttggtgccagaagggttggagtggggaggggctgtcgttcgaggggcctgtggggggttgctgtagtatcagggcatagatggcgatggccaggcccaggggtgagggcatccttacacccaccgcacggatttgaacagtaagctcagaggcggctgcgtgctaggccacaaagctaggaaatgatggaggctggatttcagccaggatctctctgagccagatcccatcctgcgtccacagcctttccagctgggggccaagctggcctccctcatctcatctgttttctctctgtgggactgggttagtttagggtgtattgtccaggctctgtgtcttatgggctgtgtgcactgcttcaaggggtgtcagtttgatagagtattgaagttccattagtgagcataacgtttattcctgcagaaagccgggctcctcctcctggtgtttctgcccgttctgcagtgtgtggtccgtcacctggcagtgtacccatttgaaatgatgtttttttttttttcctttttgtttttatagacagggtcttactctgtcacccaggctggagtgcagtggcccaatcttggcataccgcagccgtgaactcttgggctcaagcaatcctcctgcctcagcctcctgagtagctgggactacaggttgcgccaacatgcccgtaattttattttttgtagagatggcatcttattatgttgcccaggctggtctttaactcctgggctcaagtgatcctcttgcctcagcctcccaaagtgctgggattgtaggtgctagccatagtacctggtctttttctttctttttcttaattaaaatttattttgcaaatatgggcatctggccgggcgcggtgtctcatgcctgtaatcccagcactttgggaggctgaggtgggtggatcatttgaggtcaggagtttgagaccagtctggccaacatggtaaaaccctgtttctactaaaaatacaaaaattagctgggcatattggtgcacgcctgtcatcccacttactctggaggctgaggcagcagaattgcttgaacccgggaggtggaggttgcagtgagccaagattgtgccattgcactccagcctgggcaacagagcgagactctgtctctcaaaaaaaaaaaaaaaaagggcattctagtttagtaaattgatatttgaaagcatagctttctaatgattggaacttgtacatagaagttattgagatgtttgagacaatcgagagttaaagaagtgtctttgatttaaaatgtgttttttgagctctttcagattctcatgcaatcaaagttcaaattcttcaccaacatgtgaccacttggtaatcattactgagtttacattctttcttggaagattatcttatcttaataatcaggaaaatcataaaaattaatacatgcttaatagagaacacttattttaaacttttttttttttttgagacagagtctctgttgcccaggctggagtgcagtggcgtgatctgggctcaccacaacctccgcttcctgagtttaagtgataattttcctgcctcaacctcctgagtagctgggattacaggtgtgcgctaacatgtaaaaaacaaaaaaaatgagaaacacttttttttctatttagaactcactttgtattaaaaaccaaactgactttttaaacattattccttgttttggttttttctttgcaagctgggcgtaggatctctgatttgcttttgctgctttgtgcagggtgcacggtgacttcttgtctgtaaggcagctggagttttctggcttaattcttccgtgcatgtggttgggagtcctagctataagcaggcctggagttttttctctttctttcctcccttcttctctcccctccctcctgtctgtccagatgactttttggcatatgaaagtaatgtgttcactgtgaacacactggggcatttagaagatcgtatggctagtttatttggtttgagcctgttctcttggctctagagaaaaggaagattctttttcacacaaaacttgtacatatttcactttgttttccttccccaaggttaagactgatttgatgtagtcacagaaatgtgggtgtacttgctgattcgtgagcaggtggaagccttccagggaagagttttttttttttttttttctttttttttgagacagggtctcactctgttgcctaggctagaatgcagtggtgcaatcatggctcactgcagcctccgccttcccggactcaggtgatcctctcacctcccgagtagctgggactgcaaaattagccagtgagccaccacgcatggctaattttgtattttttgtagcgatggggttttgccatcttgcccagggtggtcttgaactcctgagctcaagcgatcctcttgcctcggtctccccaagtcccaggattacaggcgtgagccatggtgcctgaccaccatgatttttttgaacaaaaggacgtgcccgcagcgtcgactctgtagcatgagtgagtgggtccagcgttgactccgtagcatgagtgggtgtagtgtgagtgagtccagcgtcgactccgtagtgtgagtgagtccagcgtcgactccgtagtgtgagtgagtccggcttcgactccgtagtgtgagtgagtccggcgtcgactccgtagtgtgagtgagtccggcgtcgactccgtagtgtgagtgagtccggcgtcgactccgtagtgtgagtgagtccggcgtcgactccgtagtgtgagtgagtccggcttcgactccgtagtgtgagtgagtccggcgtcgactccgtagtgtgagtgagtccggcgtcgactccgtagtgtgagtccggcgtcgactccgtagtgtgagtgagtccggcgtcgactccgtagtgtgagtgagtccggcttcgactccgtagtgtcagtgagtccggcttcaactccgtagtgtgagtgagtccggcgtcgactccgtagtgtgagtgagtccggcgtcgactccgtagtgtgagtccagcttcgactccgtagtgtgagtgagtccggcgtcgactccgtagtgtgagtgagtgagtgtggctggctgacgatgggacctgttgcatgacgtggccagagtccatgtgctgagctagcacacagcagagggaggctgcacttttcaatttattttattttttgtacagatggggtctcaccatattacctaggctggtcttgaactccagggctcaagtgatactccctcctgggcctcccaaagtgctgggattacagggctgcgccactgtgcccagccaaggctccagcttttgagcagctattctcactggtcattcaccatctcccctgcagatctgccgacaccccaggccatcgagccccaggccatcgtgcagcaggtcccagcccccagtcgaatgcagatgccgcaggggaacccgctgctgctgtcccacaccctgcaggagctgctggccagggacaccgtgcaggtggagctcattccggagaagaagggcctcttcctgaagcatgtggagtatgaggtttccagccaggtaactggcaaattgtgtgtgtgtcggggcaggagggggaagaaagggtcacgtctcaacatctcagggcaggagtggtgtgacaggagaaggctgaagggtgagtctgtgtggctggcttacaggcaagatccagaactcgcagcagagtcaggctgcggaggtgacttttccacacctctgctccccgcacctcactctggcccagccacgtccccacctggtcacccctggtccagtttgtcctccccaccactgtgctctggagtcctgtttcttttttttttttccccgatgtggagtctcgctctgtcgcccaggctggagtgcagtggcatgatctcggctcactgcaaactctgcctcccgggttcaagcgattctcctgcctcagcctcccaagtagctgggatgacaggtgcccgccaccacgcctggcaaatttttttgtattttttttttagtagagacagggtttcaccatgttagccagggtggtcttgatctcctgaccttatgatccacccgcctcggcctcccaaagtgctgggattactggcgtgagccaccgcgcccggcctggaggcctgtttcttaggaatctcccgcggacggtccacagagcacaaagcgggatccacaccagcctcgctttgtaatagtgggaaacccccgaggattagaatgtcagccccatcgactccggaccccaaacagtgaatgaaatttgcatggcaggatcaatatgtgtcactctaatcccctttaataacacggccctcctgttgctgggcatcccgatattgggcaggtgagacacagacaccgagtgcctgatgcccgtctggagcaacaccgtggctctctctgtcccttgcttcrttgtctcagttccattacgacagattctgatgggagttttcattgttcatcctgggcattgagtaattgatgagctaacactgtccttgggaggtgtggagtcagcagggcttgtgggattcgcacagacagagcagggcccactcctgtgtgggagagggcggccctggcccagccccggccggacggcactgccaggggcttgtttgaaaagcgtcatgagcagatggtcctgggtaaaagttgtgtctttttgtttgcttgtttttaaagagacagggtattgctctgtcaaccaggctggagtgcagtggcacgatcatagctcactacagcctcaacctcccaggctcaagcaaccctcccacctcagtctcctgagtagctggaaccacaggcggatgccaccacaccaggcagttttttaaattatttgtagagatgggatctcactatattgtccaggctggtcttgagctcctgggctcaagtggtcctcctgccttggtttcccaaagtgctgggattacaggcgtgagccaccatgcccagtcttttttttttttttttttttaaagtacaaatggagacttgctatgttgtctcagctggtctcgaactcctgggctcaagcagtcctctcactttggcccgccaaagtgctaggctcacaggcatgagccactgcacctggccttaaggacaagcgagccggtctcccctccctgccgtctgctctgctgtgcttcactgtgttccagagcctgtggccacacggtccgaatggttgtcagtactgctaccaaaggacaaagcgggtcagaggggaggactcccttggaggaccgtgtcagagccgccttgctgtctggctttgccgtggttcccggccctctgggccgcagtcggggatgtggaccagctggtgggatgccacgggggagcagagcgagccaccccttccttctggggcctggcagcctgggggtgaggcaactctgagcgtgtgagacgtgccgttgcctgccagggagccagcggctggccttttgtccagtcttactaagctgcccgtcccttaagtaaattcattgccacatagggaacatttgtcaagggggcagtttggtcaccctgatgtgtgtgtaacgggccagtcactgaccaggtgggaagccactatgcttcataccatttgtttagttttttttttttttttgaaatggagtctcgctctgccgcccaggctggagtgcagtggcgtgatctcagctcaccgcaagctctgcctcccgggttcacgccattctcctgcctcagcttcctgagtagctgggactacaggtgcccaccaccacgcccggctaattttttgtgtttttagtagagacgaggtttcaccgtgttggccaggatggtctcgatctcctgacctcatgatccgcctgtctcggcctcccaaagtgctgggaatgcaggcgtgagccaccgcgcccggccttttttaatttttttaagacaaggtctcgctttgtcgtccaggctagagtgcagtggcacgatcttggatcactgcaacctctgtctccagggttcaagggattctcctgcctcaggctccaaagtagctgggactacagccgcccaccaccatgcccagctaatttttgtatttttagtagagatgggattttgccatgttggccaggctggtctctttaactcctgacctcaggtgattcacccrcctcaacctcccagaatgctgagattacaggcgggagccaccgcacccrgcctaagagctatacaaagtttaaaagttgtatttccatatacgaagscgtcacagggtttctccatttagtaaaggcctggtgagagaagatgcacttggtgctgtcgttttcccgggctctgttgaggggaagtgacgcgacagcatagtttccaacgtcggatctaagcaccgacccttctcttgcagcgcttcaagtcctcggtatacagacggtacaatgacttcgtggtcttccaggagatgctcctgcacaagttcccctaccgtatggtgcctgccctgccacccaagagaatgctgggaggtaaagccaggcgtgctgcccaccgggggcggagggagcgagcccatctcctggaccctgtggtcctggctcagggatggaccccactgtagacyggggcaggtgcagggctgcggggraactccagccttttggcatctgggacagagctgtggcttsagcccagccttggtgcaggcagggagactggcacccggcagccttggcccaccagagccttcagctgcatgactgacaggtggggaagcccttgctgtgcaggtgtgaaagagaaccctagttctcctctccagagtgcagtggccagggctcccgagagctcccgagagggctgccaggagcactgtgtgctcacctggctggcattgccctgcctgcatctgcaaagccatggcagcctgagccatgggcaccatgggagcgctcggtggcctcatggaagagaactgagttgtgcaagtaggaaatgtcagctgcatcttgcaggagagaaaaagcagcacacggctgcctcaccttcacctctctgcctgaagatggcctcgggccaggtgggagatcgcagacgacctcagagctgctccccaggcctgtgtccccctgggctgcagagcttgggatggcggctgccagctctgatctcactggtggtctctccctcagcccgttcctcaaattctgaataaaacatgctggggaaatgagtgcttagagctgatcatggctttctgccgttcccagcccttccacagtcaccgtgtcctggacggggacgcagcatgggagctaacacagtcgccagttccccgcatctgaaatcgtacgatgatgcataaatgcttctgcctctcatcggtcactgagcaagcagcccagggtctgatgatgtgattttcaccccgccgcatgtgaaggccacagagcagatcattcagctcacgctgaagggcacacgggcgctcagggcagcagagagcagaggacgcgacagggatgtgtgatgctggctcaggcctgggcatccgagttgatgagcgctggctggcgttcagcgcctggaaactgcacacgcgcgctgggccgcttgcgcatttaaggaagtgcagcctcatcggaagaggcctgccagtgctgagccaggagggagccccagccacctacctgtattgtttgttttctttcttttatggtgttttttttttttttttacatggagtctcgctctgtcgcccaggctggagtgcagtggtgcaatctcggctcatggcaagctccgcctcccgggttcacgccattctcctgcctcagcctcccgcgtagctgggactacaggcgcccgccaccacgcctggctaatttttttgtatttttagtagagacggggtttcaccgtgttagccaggatggtctcaatctcctgacctcgtgatccgcgcacctcagcctcccaaagtgctgggattacaggtgtgagccaccgcacctggcctcttttatggtgttttttgtttttgtttttgtttttgagacgaagactcgccgtgtcacccaggctggagtgcagtggtgcggtctcggctcactgcaagctccgcctgccgggttcacgccattctcctgcctgagtctcccaagtagctgggactacaggcgcccgccaccacgcctggctaattatttttttttgtatttttagtggagatggggtttcaccgtgttaggatggtctcaatctcctgacctcatgatccacctgcctcagcctcccaaagtgctgggattacaggtgtgagccactgcgcctggcctcttttatggtatttttcagagacagggtttcgctacgctggccaggctgatgtagaactccttggcctcaagtgatctgccctcctcagcctcccaagaggctgggattacaggtgtgagccacactcctggctgtatttcttaatacattaaaaatagtatttaaaggctgggcgctggtggctcatgcctgtaatcccagcactttgggaggctgaggtgggcggatcacctgaggtcaggagttcgagaccagcatgaccaacatggtgaaacctcctctctaataaaagtataaacattagccaggtgtggtggcgggtgcctgtaatcccagctacttgggaggctgaggcaggagaatcgcttgaacctgggagttagaggttgcagtgagccgagatgacaccactgcactccagcctgggcaacaagagtgaaactccgtctcaaaaaaagtatttaaataccatttttgtttgtgttcagattgaaatgtcctgaatgcatcagtatatgcttttactttttttccccttggagtgaaaatatttaacccgaatgaaagcaatgagtaattgcatcctttgcagagtaagttataagcacagtgaatagaaaaactcggccgggcgcggtggcttacgcctgtaatatcagcactttgggaggccgaggcaggtggatcacctgaggtcaggagttggagaccagcgtgaccaacatggtgaaaccccatctctactaaaaatacaaaaattagccaggcatgttggcgggcccctgtaatcccagctaattccagaggctgagacaggagaatcgcttgaacctggaaggcggaggtagcagtgagccgagattgcgccactgcactccagcctgggcaacaggagcgaaactctgtctcaaaaaaaaaaaaaagaaaagaagacctgggttgcgttagtgttagagcgtagcaaaacccatttgtttgcagtgagaagtgccaggaggggattatggaagatgtctttaacggaggtgattaaagtgaccactcacgtggttcccaggactcccgatggaaacaagcagatctgtggttttccytggcakctcctggacccaagtgtgtgtggctggagggggcctctgggggtgaggttattgctctgggcrgccttttcagacccattgtctgagcagcactgggggcccagccagtgccctctgctagccgcygggccctctgccacctctagggagagttttgagaactcgcccagagcagaagatgggggccggcgccctggactctgtccagtgaccccgtgtgctcctccagctgacagggagttcatcgaggccaggaggagagccctgaagcgcttcgtcaacctggtggcgcgacaccccctgttctccgaggatgtggtcctcaagctcttcctgtccttcagcggctcggtgagtgtgtctgccctgcccatgtcccggccccggggagtccccgagcctccggacccgccttttcctctctcaggtgtggtttcttatcctcctggtcccttgtttggacgcccagcaggaatgacatggacaagacttctttcctttccagataacagtctgaatgtgattttcagaggtgtccctggtgttgactttgcaggattttgtaaatcygcgtggagatcatggatctctgtggtcactttgaggatttaggctggatggtttggagggtttagggaggtgccagagactccagatgggaagaagtgttgacttaaaacaaggccctgtctgactaaggaccactggaacacaggctgagcctccttgtcagagccacagcccacacctgcatccgggaattaacttgttgtacatgcactccgtcagaggtctgagtggggcttccctcctcccagctgctgcggcacagccttattgtgtgtcaagaagctacagttcrcaggtacagtggcccacgcctctaatcccagcgctcggagaggccgaggctggatggtcccttaagcccaggcgtttgagaccagcctggacaacatagcgagacttcgtctctaccaaaacaaaactgaggccaggcatggtggtgcacacctgtaatcccagtcacttgggaggctgaggcatgagaatcgcttgaacccaggaggtggagcttgcagtgagctgtgattgtgccactgcactccagcctgggcgacagagtgagaccctgtctcaaaaaaacaaaaaacaaccctgcagcccagctcctgtttcctggaggaggaagcagctgccagcccctccagggaaggcgggtcctgtgcttctcctccacctgtgcctgcaggaccctctccctgtgcggggaggggcgggggctccactggaatagaggtttccaggctctcctctatttcagggaaaccccgtcttgaatggggacctgacggcctctgtccttgtccctgctgcaggaagacaccccctctcccaggctgacttcacacaagccttggttccttttgtcttcgttcctctcggaggcagaggggccttccccctgtgcctgagatgtccctgggatgcccccggggatgtctggagcaggcagtgggatcttttgagccctggggttggaaaccttcctttggaggcgatctgcattgccagcagaggaatgtggcaggacctgggaggggcggtgggcaggggtgcagtgggtcacaggtgggcaatacccctgttctgggggcaggacgttccctgtggccttcccacaggtatcattctctgtcacttcccggcctcagttttcttgcttgctttctgtttttagagatggggtctcactatgttacccaggctggccctgaacccctgggctccagcgatcctcccgcctcaggctctgagtagctgggactacaggcacgcaccatgctgggcctcaggtctttttttttttttttttttttttttttttttgtaaaatgagagttgagtcagatgatctttaaggcatctctgaaacctgagaattcctggacacgcaaacagctgcatattagggtttccccttgtatctcctgggtggctcctgactttaaggcacggctttgcccaggaggcctctttcagatgagagggctccggtgccaggggctgggcctgtccctctgcccagcagctccctgggctctggtgtccctggcgccatggatgcattcccaggaaggaagacacttttgccctgttctattgcgtttttggaagctaccagggtctcaggtatctctggggctgacgccgccccgggtctgtggatggaggggccgtttctctgcagagccgcccctggtctgtggatggagtggctgtttctctggagagctgccccccgtctgcggatggagtggctgtgcctctggagagaggctgcaggtttgtggtgctcctgctgtgaagccaggctgtcctgtttggtgagaaaaacatctaagggagagtcaagagattgcagaatactaatgtcaaagccaacatatggaaatgtgtttctcctgaggaaagacgacctccygctccacagtgacccataccccacagcagctttcttgctgctagtagaagagggtgaagctgtgtgttttccttttgcaggatgtgcagaacaagttaaaggagtcagcacagtgcgtcggggacgaattcctgaactgtaagctggctaccagggccaaggtatttttcttttttttttctttttttttttttttaatttatttttttattgatcattcttgggtgtttctcgcagagggggatttggcagggtcatgggacaatagtggagggaaggtcagcagataaacaagtgaacaaaggtctctggttttcctaggcagaggtaccctgcggccttccgcagtgtttgtgtccctgattacttgagattagggagtggtgatgactcttaacgagcatgctgccttcaagcatctgtttaacaaagcacatcctgcaccgcccttaatccatttaaccctgagtggacacagcacagggttgggggtaaggtcacagatcaacaggatcccaaggcagaggaatttttcttagtacagaacaaaatgaaaagtctcccatgtctacttctttctacacagacacggcaaccatccgatttctcaatcttttccccacctttcccgcctttctattccacaaagccgccattgtcatcctggcccgttctcaatgagctgttgggcacacctcccagacggggtggtggccgggcagaggggctcctcacttcccagtaggggtggccgggcagaggcgcccctcacctcccggacggggcggctggccaggcaggggggctgaccccccccacctccctcccggacggggcggctggccgggcggggggctgacccccccacctccctcccggacggggcggctggccgggcagagggcctcctcacttcccagtaggggcggccgggcagaggcgcccctcacctcccggacggggcggctggccgggctggggggctgaccccccccacctccctcccggacggggcggctggctgggcagaggggctcctcacttcccagtaggggcggccgggcagaggcgcccctcacctcccagacggggcggctggctgggcggagggctgacccccccacctccctcccggacagggcggctggccaggcggggggctgacccccccacctccctcccggatggcacggctggccgggcgggggggctgaccccccacctccctcccggatggggcggctggccgggcggggggctgaccccccccacctccctcccggatggggtggctgccgggcggagacgctcctcacttcccagatggggtggctgccgggcggagaggctcctcacttctcagacagggcagctgccgggcggaggggctcctcacttctcagacggggtggttgccaggcagagggtctcctcacttctcagacggggcggccgggcagagacgctcctcacctcccagacggggtctcgccgggcagaggcgctcctcacatcccagatggggcggctggccgggcggagggctgacgccccccacctccctcccggatggggcggctggccaggcggggggctgacccccccacctccctcccggacggggcggctggccaggtggtggggctgacccccccatctccctcccggacggggtggctggccgggcagagacgctcctcacctcccagacrgggtctcggccgggcagaggcgctcctcacatcccagatggggcggcggggcagaggcgctccccacatctcagacgatgggcggccgggcagagacgctcctcacttcctagatgtgatggcggctgggaagaggcgctcctcacttcctagatgggatggcggccgggcggagacgctcctcactttccagactgggcagccaggcagaggggctcctcacatcccagacgatgggcggccaggcagagacactcctcacttcccagacggggtggcggccgggcagaggctgcagtctcggcactttgggaggccaaggcaggcggctgggaggtgtaggttgtagtgagccgagatcacgtcactgcactccagcctgggcaccattgagcactgagtgaacgagactccgtctgcaatcccggcacctcgggaggccgaggttggcggatcactcgcggttaggggctggagaccggcccggccaacacagcgaaaccccgtctccaccaaaaccagtcaggcgtggcggcgcgtgcctgcaatcgcaggcattcggcagactgaggcaggagaatcaggcagggaggttgcagtgagccgagatggcagcagtacagtccagcttcggctccgcatgagagggagactgtggggtgagggagagggagagggggagggggagggggagggggagggagagggccaaggtatttttctaactttgaagagtacatccctttttaaccagagaaacaagttttaacccttcaaagtgattttgcctcctctgtgtggcagggattatgctgacatctgtcgcatggtttcctcatttaaccctcgtttcagttgctccgacacagggctgggaggcctgttttacggatggagaaacaggctcagggaggctgtcatttgccaaggccccgagcctctaagcagcagggccgggttgcggctgagctctgccctcaggccctctaggcacctcgtgccctctgcccttttctgtgactcagacagacggatgcttgtgtcaccaccttttcagatttctggggattcattgttacatttgtttattattaaatgtttaaagtttggtctttttccaaaaaagactaaggtagctacttggtagtttttttgtttttggttttttctttttaaacctcttcttcaggctggcgcggtggctccttcctgtaatcccagcactttgggaggctgaggctgtcggatcacttgaggtcaggagtttgagaccagcctggccaacatagcaaaaccccatctctaataaaaatacaaaacaaaaaaggaaaacaaaaaaaagcaaaacaaaccccaaaaaaccggccgggcgtggtggcttacgcctgtaatcctagcactttgggaggccgaggcgggtggatcacgaggtcaggagttcaagactagcctgactaacatggtgaaaccccgcctctactaaaaatacaaaaattagctgggtgcggtggcgtgcacctgtaattccagctactcaggaggctgaggcaggagaattgcttgaacctaggaggaagaggttggagtgagccaagattgcgccactgcactccagcctggacgacagagacaccatcaaaaaaaagaaaaaaaaaaattagccaggcttggtggcaggcacctgtaatcccagctatttgggaggctgaggcaagaggactgcttgaacccaggaggcagaggctgcagtgagcccaggtcgtgccattgcactccagcctgggtaacagagtgagactttgtgtcaaagacgacaacaacaacaacaaaaaaaccagaaaaaaacctgcttcttcatacaaaaattaaaaatctattttattttattttttgagacaaggtcttgctctgtcctctaggctatagtgcagtggtgcaatcgtaggtcattgcagcctcgacctcctgagttcaagcaattctcccacttcagcctcccagaatagctgggaccacaggcatgcaccacagtacttggctgatttgtttgtttgtttttggtatagatgaagtctcactatgttgcccaggctggtcttgaactcttggcctcaagcaatcctcctggcatggccccccaaagtactgggattaaaggcatgagccaccatgcctggccaaatcttttaccttcattttactctctgagctttctgttttctgaactctgatagttagtatcaaatcttataaaaagtctttgggaataaacgcggcatagaagaggccttccccccatgtggagagtctttcaggaatttatgttcattgtgtttaacttgaagattgtttgtttttatttttgttgttttctggggacagggtccccaggctggagtgcagtgttgtgatcatggctccttgcagcatggaactcctgggctcaagtgatcctcctgcctcagccctctgtaagcacctgggaccacaggcgctccaccacgcctggctaattttttgattttttgggagagatggggtttcactatgttgcccaggctgttcttaaactcccaggctctagcaatcctcttgcctcagtctcccagagcgctggggtacaggtgtgagtcactgtatccagctaaagattagtattgttagtttttgagacggagtctcgctctgttgcccaggctggggtgcagtggtgtgatcgcagctcactgcaagctccgcctccggggttcatgccattctcctgcctcagcctcccaagtagctgggactaggtgcccaccaccaggctcggctaattttttgtatttttagtagagatggggtttcaccatagtctcgatctccttacctcgtgattcgccctactcggcctcccaaagtgctgggattacaggcgtgagccactgcgcccggcaagattattattcgagtgttttgttggtttgtttgttttgagacagagtctcgttctgtcgcccaractggagtgtggttgygcgatctcagctcactgcaacctctgcctcccggattcaagcaattctcctgtctcagcctctggagtagctgggattacaggtgcatgccgccatgcccagctaatttttgtatttttagtggagatggggtttcaccatattggtcaggctggtcttgaactcctgacctgaggtgatccacctgcctcagcctccaaagtgctgggattacaggtgtgagtgactgcccctggccttatttgagtgtttttggataggtcctccagtgtgatgagatttcagtggactctgtggtcctcatcccatgggatcatttgtctttgtgtttgtggcatgcaggtgatgatgrtttttgtttcttttttggacacacagagtgatccctgcaggcctggaggagtggggctcccggggtggctcatggacctgctgkgtctcccgtggctcagcttctgggggaccggctgctgccgtctgacaggtgctccccagcractaacacagtgtctctccccccatcatgatgtcaggacttcctcccagctgwcatccaggctcagtttgccatcagccgggagctgatccggaacatctacaatagctttcacaagcttcgcgacagggccgagcggatcgcrtcgcgggccatcgacaatgcggcagatcttctcatattcgggaaggagctaaggtaggtgacctttcagcttctgcaggggcacgcgcggtgggacgggaatccatgctggtgaagggcttgggcggaaagtgcgtttaccgtaataaccagcatcctgacctgtttcatctcagaaggggcagaaagtggctcaggcacatggggggtcatatttggaagaaacacgggagaatttcggccctgaaacacggatttctgagcacgagtaaatgctcaccagtttctagtctggtagttttttcactgtcaggatgagactttaaaaaaagatcccaggccaggcgtggtggctcacacctgtaatcccagcactttgggaggccgaggtgggtggatcacgaggtcaggagttcaagatcagcctggccaagatggtgaaacccgtctctactaaaaatacaaaaaaaagttctctgggcgtggtggcgggtgcctgtcatctcagctactcgggaggctgaggcagagaattgcttgaacctaggaggcggaggttgcagtgagccgagatcgcgccactgcactccagcctgggtgatacagcgagactccgtctcaaaaaaaaaaaagatccctttgacttggggaagaacagaccatgggctggcagcgcttcctttgcctgaggggaggggagaccccacccgggactctgcttgccccagcagtgcccgtcacctgtgcacacatgtcacctgggggctggttgggaagaagagacgcagcaggtcctgaggtgcagccccagggccaccctttctcccgggctcccagggtccccacaggccactctttgagcagcagggtcctaggayggggtcacgcaggttgccgtggaggacatctgtcrggggggatgccagactcgactgccaggtgagctccaggccttgagtgtctcctctcctgtgtgcttgctccctcagtgcaatagggtctgacacgaccccgctgccctcctgggccgctctgaatagcagcacgtgggggtccctgaagcaggctctgaaaggcctgtctgtggaattcgcgctgctcgccgacaaggctgcacaacaggtgagtggatcggttctcccaggcgcctgttccagagaacacgctatgcctttgcatggggagtgcctcctgcttagatgggcgtcacagttcgtttttgttttgttgttttgagaaggagtctccctctgttgccaggctggagcgcaaaggcgcaatctcggctcgctgcaacctctgcctcctgggttcaagtgattctcctgccttagcctcctgagtagctgggattacaggtgtccaccaccatgcctggctaattttttgtatttttagtagagatgaggtttcaccatgttcgtcaggctggtcttgaactcctgaccttaggtgacctrcccgcctcggcctcccaaagtgctgggattacaggcgtgagccactgtgcccggcyggcttcccagttctgagccgagtgaatgacagctgtgccctgggtgggagctgcccgtccacatctgttcctggtggctccctgggagcgtttacgctttcgagagggggttccagcgacaaaacagattaggctgtagtcttgagtgttgattttgctgaggttggaagacagactctgtctttgaaaagatgatcttgggcttccaggcatactcctgggtggaccagatagttcccactttgctgtctgagtccactaggatttggcactggagacttaactcatcagaataataaagccccagcacctgagcggctcccacctcccgctccacacacaacctcaggcagtgctcctgctgcatgggcagaagctgatttcagaaattcgccaagatcttggagtcatttgggatcagtttgaagatacggtgtttactatcacactggaaagctcatctgggtgcttttatgttaaaaaaaagtgatacatggctgggcacagcggctcacacctatcatcccagcgctttgggaggctgaggcaggaggactgcttgagcccaggagttcaggaccaccctgggcaacagagcaagatctcatctctatcaaaaataaaaaaaaattagccaggggtggtggtgcgtgtctgtagtcccagctactcacgaggctgaggtgggaggatcacctgaacccaagaggtagaggcttcagtgagccatgatggtgccactgcacaccagcctgggcgacagagcgagaccctgtctcaaaaacaaaaaaaagtggacatagttgtgaatgtgggagcttgctgcctagttcctatttcttgggaaagtggcctccaggctactcatattagtttgaagagagtgatcagmgtgtgcccgtgagggctgtgcttcccctgagccccggagctcctgagtggcttggtgaatggtgaacccacctgctgtggagtcggggcttttyaagctggaaacggggcgctcaggtgcccgtgacgtttttcgtgctgaagaggaaattcgatgtctttgctggtgtggaaagtcttgggttttcttcctcttccgcccccgtgcttctgtgttccctttagaaacggagggagggcactgttggtttctgtagattggggctgagtctcttctgtctccaggtctgtgtgcccactccccccaggtggaggggaccgagaacgtggggctgggggcttttcaggatagagacagaggacctcagggccctgccctatgcattgtgtgtctgtgctgtgaccatgatcaagctattctggtctccaggcctcagtttccccatcaattaaatacaagggggttggactagattattaaaacagctatttcttttttttgtttgtttttgagacggagtctcgctctgtcgcccaggctggagggcagtggtgtgatctcggctcactgcaacctctgcctcccgggttcaagcgattctcctgcctcagcctccccagtagctgggattacaggtgtgcaccaccacacccggctaatttttgtatttttagtagagatggggtttcaccgtgttggccgggctggtctcaaactcctgacctcaagtgatccgccagcctcggcctcccaaagtgctgggattacaggcacgagcctctgtgcccagccaaaggagctgtttctgtaatctgctgaccctttcccccaagctcagtgtgcaaagcataaaagccattcttgtcacagggacccagaaccttcccacattccactccctcttcagcaggtggctgttggcggggtgcccagagtgccctggggctctgcagagctcaggatgagcatcactcatgaggtgatttccaaggttttttctgattcagccctggatgccgcatttccaccttgaagagggagagaaggttgaggcttctggtgcagtaggagtttatggcttgaggttctgcccagctctgtgactcttggacatctcatgagttgtgttttgggactgtgatgtctggagaagtgctgtttcctgaatctctctcactgtccttggttgtagtgaaattgagcttttacatgaaacaaacctcgaggcctttcatttgatgcagcagaagttccatctcacccttgctgttcagtcgggggcagcgaggaccgtttttcctaagtctgcttgtacttacaccagttatactctccccagacctattaggagctgaaggtagccatatcccagcaagacacgtgagactcggagtagggtctgtgttttccatggtgacgggatcttcgccttggttaaaggcgcatgcattaatggtttagggcacatttgtccaacctgtggcccacaggctgcgtgtggcccaggacagctttgaatgtggcctaacacaaatccgtaaacttggctgggtgcagtggctcatgcctgtaatcttagcactttgggaggctgagatgggcagatcacctgaggtcaggagtttgagaccagcctggccaacatggtgaaaccccatctctactaaaaatacaaacwttagccaggcgtggtggcgggcacctgtaatctcagctactcgggaggctgaggcaggagagaatcgcttgaacctgggaggcggaggttgcagtgagctgagatcatgccactgcactccagcctgggtaacagagcaagactctgtctcaaaaaaaaagccaaatctgtaaactttctgaaaacattatgagatttasacacagacctacctaccttccttccttcctctctctctctttctttctctctctctttcttttttccttttttgttttttttagttcatcagctatcatagtgttagcgtattttatgtgtggctcaagacaattcttcttcttccaatgtggccctgggaagccaaaacattggacacccctggtttagggccttgtgcagcactgaaccacagatgggacttggtgacaaatgacacgaacagagggacccctgaactccccctcttctgctgggccagggaataagcctacattctcctgagcccctgcctggtcaggtgggagctgggcacctgcggtcagctggcgttttctctctagagttttagaaactcttaacacacctcttctcctggcacattttactggctggaatcccagctgctttgggtgtggggttggtggccggggagcctccgggttcagtcggcctgaggtctggagggtggaaggggtatcttagggtcccctggggtgcagcagggcctgggcggcacccctggctcccattccagggctgtgtcccgtaaaactcgttccatccacttctgcctgccccgtctcctgctgagcttgacgtgcagtgcgtggggtgagcttttcaccccctaccacgggtggagcccgaggaatcgtggagggagcttggtctccccgaggtgctcagtgagctgtggggactgagggcgtgagctgtggggaccggagcccttcagggcccgggtgtgactgaaggcgtcagtgtcgggggtttccccaggatacctgccatcggcctggcttggttgcggttgtggctggggggtctgtggtgagctgtgcaggtcaggggtggatgggctgccgcttccgctgccttccccagacccctgctgtctccagagcttggatgctcccctcagtggcagctggagcccagggctttggaccgactcttcataccgcagatgcctctgagcaccgtgtgttcgggccgtgtgcactgtgcctggcctgcgcccccaccgagggctgctactggtgtaagccggggaggccgaggcagcgtctgggtggggttcgcccgtgggggctgcttcgtgtccccaggtgctgtggtgactctgggagcagggcatccctctgccgtgatggggcccctgttccactccagggctgcccgccgtttgctgtgcactcactgccctgttgggctctctctgtggctgtgctgcccgcacagagccttgtgtgagggccgaagaggagcctgtgtccaccgctgcccccaccgccgagtgtggtgcttctgcgtgcagcctggggcggccgcctctcttcctggatcagcagcacgtccttcctgcagctgctgtctctcctacctaccctgcgcccccttccctgtgcccccttcctaggcctgcgtttctctctcctgttactgatgcrgagacaacacccttgttctcctccgtgcccctcctgggcgtgcccgttttgcacacggctcacagcgttatatgggaactcgggttttctgcagtgcttgatggagccttaggggtcggggggtctggggcatctggctctcccagcatatgtgtygggagagtcgccggctttgcgaaggcctgagaaaggcaaggcaggccgggctgatgagcaggagggcgggcagctgtcccgcgggaacgcaggccttgttcccatcaagactgctgggccaggcccagcgcggtggctcacgcctgtaatccagcactttgggaggccgaggcgggcggatcacgaggtctggagatcaagaccatcctcgctaacacggtgaaaccccgtctctactaaaaaaagaaatacaaaaaattagccgggcatggtggagggcgcctgtagtcccagctactcgggaggctgaggcaggagaatggcgtgaacccgggaggcggagcttgcagtgagccgagatcgtgccactgcattccagcctgggcgacagagcgaagactccgactcaaaaaaaaaaaaaaaaaaagactgctgggctcgaaggcgtgtccgcctggtaatgggtgggctggtggggaagggggccccctgcagacctggctggtggtcctggggagcccgtctgactctgggaggaaggaaccggcccaggccaggcttgggtctgagttcccgggcagggaccgggtcctatgtgcgtccgcgtgggtgagctccccctcgccttccagggtaagcaggaagagaacgacgtggtggagaagctgaacctcttcttggatctgctgcagtcctataaggtgagtcttggctgctccttggctgggggcagaactttcaggaatgatcttaggatccttcaagggtctaactcctgggggacggaagaggagctgagaagccagggctgcaggggaagacggggccttccgtctggcgggggtgcttccctcggccrgctccgcagggccctggcgcaggcatccagacagcgggcgaatgcctcccccggccccgcaggacctgtgcgagcggcatgagaagggcgtgttgcacaagcaccagcgggccctgcacaagtacagcctgatgaagaggcagatgatgagcgccaccgcgcagaaccgcgagccggagtccgtggagcagctggagtcccgcatygtggaggtgggtggcggggcggccgagcaggcccgtgggagcctttcccctcccggccatggtgggacccggagccgtcctggtgggctcccctgggttggctccttgtgtctggaacagagctgggggtgcagtggaggcagggagctggcccgcgtgcccagagcgatgcggctccctgcacggtgctccctccccggccctctcttacctcgccaccttccaaatgcctggtgaaggctgaaggagaaggggccgccctggctcagggagcacgctggtgwtcgggccttggtgctcccgtcgccgkctgggccgggtgcgaaaggcggctgtttgctccgcagcaggagaacgcgattcagacgatggagctgcggaactacttctccctgtactgcctgcaccaggagacgcagctcatccacgtctacctgcccctcacctcccacatcctccgcgccttcgtcaactctcagatccaagggcacaaggaggtgagtcckccctgcyccggccgccgtctcggccacggcctttctttgtccctccgcccttccttcaagcccggcagcgcggtggccggccgccctagagaggttctttagtggagttgggctccgcatgggccttggaacacggtgctcgcccggatcttctagtctcctgtgtagccaaaatcagaatcgtgagggtgtccctgtgattcctggggggcggagggaggagcagacagggagagtttgcctcctggagggatttgagaagtcggaggtaaagcccgcagagctcccgcaccctgcggctgagagaaggtttctagcgcttcggagcgccgcaggtggctgttcttccagagagccctggccggcttcctccagagcagatggcggttccttcagcctgggagaagaaacgctcccaaggtcctgggacaggcctccgttgatttctggtggccagctcactgcagcaccgctgggattacaggcgagcaccttgtgcccggctgaaattaagtttattaagtagctgcaagtagctttcaagccatggtctgtggtgtgtgtggaatggcaccgagtgtctggggtggtcacgagattccacactgtccccgggaggtgcttggtgccgtgggtgccgtccagcactttgggaatggcaggctggaggcggccgtggtggggctggagaggcggtagacagccgccgtgttaggagcatcactgtgagatggccagggtctcagggaccaggttggacttggacatgtgagtggccgggtgtgtcctcagtgaaggaatgggaccaacaggcgcccggagcatgatgccataaccccagtcctaccaggttttttattgtggtggtgaggaatttccagccctgtgatgctgtgtgcgctgtggtccagtgactcagcctcccctgcaggcccccagggtgcgccctgcccttctctggccacctgagcccctgcacggcaggtcttggcctgacccctgcctcactgccgcgctcccctcctcacatccacagcatccgttccttgccctggttccaaaagtgcttggcgagtggggccgccgtttgcattccggtttgggtattattgatttggtggatgtggtctttgtgtttttggtttgctttttggttttgaggtggagtcttgctctgtcacccaagctggagtgcagtggtgcaatcacagctcactgcagcctcaacctcccgagtagctgggaccacaggcaggtgccaccacatccgactcatatttctgattttctgtggagacagggtgtccgtgtgttgcccaggctggccttggtgtttgacctgccaaggcttccatgaggccagtgcccgcacggcagctagagcatgtactggcagtgacgcgatagtaacgtttctcacgattccacggcaggcagatttgcagccctttggtcctgggtgcagggatcgaagcgtgggtgtctgtgaccacaggtcacatgtcgctggtccactyctcatttgggcttcctctgtgcaggatgggcagcactggttctgccagaggtttgaggagctggcgcacctgagggcccctccctccctgtcactggcaggcgaaggaactgggatcagagcgtgaggaggagccccggccccgcctgctgatcttgttctcttcgcttccctttcagatgagcaaggtgtggaacgacctgaggcccaagctcagctgcctctttscgggaccacacagcaccctgaccccaccgtgctccccgccggaggacggcctgtgtcctcactagcgcctgaggctgaggtggtgctccctgcggccgcactaaaacctctttccaaacggtgtgtcccggtgtaattccctttggacggcagctcccctccccgccacgccccgtgctgcagctggagcagaggagctcacgcctgcgggtcgggaggcgcatccgtggaccatgggggcagctgggccacactgtccttcgccctgtggcctgctagcctggtcgagagaggtggtggggttctctggaatggtttcctcctgacacccagagctgtgcggggaggcagggatctctcatctcacagagattgtgcctgggggagcgtggaggcagggcctccaggtgctggaacagtcgggaggggcagcatcatggtgctcggtcagccgaggagagagggcagggctgccctgcagcccaggcatgggactgaccacggacagcgaggggacagccagtggtgctgaggctgggagggagggccattgggcgtggggcacgcacggtgaattttctagggaaattgctgcagtcaacacctggagccctggtctgggagtggcctgtagggtccagtggcctcatgccctgtgcccatatgatgaccccatgtgtgcctgtgtccacaccatgaccctgtgtgtgcccaggcctggaagacaaaggcgtgacggagagctggggctctgagagtgggcgctacagcagctgtgttctcgtcccctggactcccttgatttctggtggccagtgttggggtctgcaccgtgtggcactgaggctggatgggctggcagaggacaggtgggggcgtgggggggcgtgttccattccagctgaggctttagaggagggacagcccccttttaagtggatttccttctctgaggcacctagagccctcctcccagcctcccgtcacgcacttgccggcccagccacctgctcacagagggaaccagtggtctttcaggccccttccctgctctggatgaagaaggccattctcctgagctctgtggggctggactgtccgcctcaggcctgggtctgcttctgcccgaaccccttttgtggaaggcacatgggagcccagtggacccctgcacttctccggagcctgacgcccctccctggccggggaggggtgctggaagaggcccgccgggctccagggtttccgaggtccctccgctccgcagatgctcactggcctctggggcgttcactcctctcacggagggtgcttcccttccgcctgtacctacgggcagctcacggccgtgggatggagaggggactcctgtgtgtgccccgcaggcaggtgatccatcgtccactgcgagccggccagagggaacggccgtgccttctggccccgtgggctgtgctgactcggtggctgtggggctcgggcccagcctgccctgccctgtgggttctgctgctgccttcctgctgtgaggtgggctgcttccttctggccagatgagcagagggcagcgttccctttggagcccgatgggtgggctgtcccgtgagtccctagtccacccgagtcttgggctgcgctgccttctgacgcccctctgcagagacaggttctcagttgccatgaatggcaccatgacacccgagccatgaagcgtgaccccgtgtgggcagaaggctgcaaggcctctccgtccaccccgcaccttcctggggcctgtccagctgcaggaccatagaggctgtggggagtcgtggagggcatcaggtgctggggcctctgtgtctccagagtaggcaaggcacgcgctcctgacacagcccccaaggattgagcaagacttcagaatgagcttttctgaaggagctttcctggcagggactccggggtcagtgagtgtatgagaggccacatacctggcggcatctccctgtgttggaaacttcaagagcagggtctcagggtcctcatgtccagaggctgaggatggaggtggaaggctggagggcaggggtgaggagggagcaggagggcaggagttgggggagcaggagggcaggggtcaggagaacaggagaacaggggtaagggagggcaggggtgagggggagcagaagagggatgagggggagcaggagggcaggcgttgggacaggagggcaggggtgagagcaagggggcaggggtgagagagcaggagagcaggggtgaggagagcaggagagtaggggtgatggggaataggagggcaggggtgaggagggagcaggagaacgggtaagggagggcaggggtgagggggagcaggagggcaggggtgaggagagagcaagagggcaggggtgaggagagcaagagggcaggggtgggaaggcaggagggcggtgggggggcaggaaggcaggggtgggagggtcaggagggcagggtgaagggggggctggagggcagcggtgacgagggcagcctgtctcccacgtgtggtggctgcttcctgtgtgccctggggttggctctgtggaggggtgggcactggctttggaacacctccctccccttcctcctctgccacccagtgccttctaaagggcagcagaaagaggcctgctaggcaggggtggcggaggccaccttccttctcacaaatacttcttggccctggccctgtgctgcccgggcaggtccccaggctcaggggctgagaggctgcttactgctgcaggtggaggccccatgccggagggagagcggggtttcccccatgcctctccagccctcctgctgcccacggcccaagcccaagcttgtgccggtcattacggccttgcctagctggcagggacagctgcgtgtgatgctggtggagatgccagatgccgcctgccctgtgaggacggctggcggggccgtgggaggggggttgtgggctggcggggctgtgggaagggggctgccgatcatggtgaaaggggacattttcattgggtcctcgtggtccgtgtcctgggtactcggggtcaccgtgcagacagctgccctttgtctgccggacacagtgcaggcaggggagacaggtttagggctctgacatggggcacagggactccgagccaagggatgtcagggcagctctgtgcatctgaggcctttgcccttgctttgcgggtcagttcatgtccaaagcactttaggaggctgcagggatcaatacccaatatacccaacaactggaattgtttacacatgacctacattttggacggtttatcaataaacatgtgtgaacaactgttattaaatgtgtatgaaagttgggcaggggaggggactagcctatgaggcgttcaacctgggttttagcccagagcccttggccgagcctcagcttcccacactgtgcaggggggttttaagaggacacatccccagcttgtggcactgagcatgtgtgtctctgccctgggccagctgcccacctcggggacagagtctccatcctctcccacctctgtgcagcagtgcgggctgaagcccagcacatctggtagcttcctgtggacgggacctggcaggctgtgctggtgtctggagaagaacgtttgaaaggttagagaccggccgggtgcagtggctcacgcctggaatcccagcactttgggaggctgaggcaggtggatcacctgaggtcaggagttcaagaccagcctggtcaacatggtgaaaccccatctctactaaacagacaaatattagttgggtgtggcaatgtgcgcctgtaatcccacctcttcgggaggctgagatgggaggatcgcttgaacctgggaggcggaggttgacgtgagccgagatcgtgccattgcactccagcctgggcaacagagagagactccatctccaaaaaaaaaaaaaaaaaaccaccgctagatagctttattttcccttccatccagttaattccagatgaaacccggctctgcgccactcaatgcccccaggtgaagatggtttgcggctgttcagcagccacgtctcctgcccaggggctgccctgggctcccgctagaccgtgtccacctcgcggagtgtgtagtccaggatggtgtcctgaccctggaacttgaagtacccgtggaatttcttcttctgaagcaggagtggaaaccagtagctgtcgtcgggccacatgtccttgaaggggatctgatccagctggaaccagcatgggcgcatttctgtaccaatgggggaagaggaggcactgaggtgcaacccaaacttcatgcttaaaaaacatgttttttttggccgggcgcggtggctcacacctgtaatcccagcactttgggaggccgaggcgggcggatcacaaggtcagagctcaagaccatcctggctaacacggtgaaaccccgtctctactaaaaatacaaaaaaattagccgggcgtggtggcgggcgcctgtagtcccagctacttgggaggctgaggcaggagaatggtgtgaacctgggaggtggagcttgcagtgagccgagattgcgccactgcactccagcctgggcgacagagcgagacttcgtctcaaaacaacaacagcaacaacaacaaaaccatgtttttttgtagagatggggtctcactgtgttgcccagactggtcttgaactcctgggctcaacgatcctcctgcctcggcctcccacagtccacagtgctgggattacaggggtgagccactgcgtctggccagcccaaacgtacactgactctctgaggagttcactgagtgattgtgaggaacctgacgatcgtttatatttcatcctcatgaccgtgtttctcattttagggtgggcgcagagcaggggcaggtacgctactggagcctcggtgcagagaccacggctcatgggccccacgctggcactgtggggtggagggggacgcaggctgcccggtccctggcactcagagatggtttgggcggatggcctttctcccagccaggagatgggacccgcatagtggggagggggagcaggccctgtgagactcaccgtcgctctccacgggggtcccctggatgctgtctgtgcagaagacatgcacgtccatgagctcaggctcgcccacgaactcaaacacgatctggcccaccttgtgcagggcgtccactgtcagaccgctctcctcctgcagctccctgcgggcagaggtgggcaggggagggaggccgtcagggcatggtgccatgcccacacgatggcagggaggaggagctgggcatctacacacagcccagggagccaccagggtggatgggagacccaggaggatgtcccctagaatgcattatctggtcccgacctggctgagcttcagaatcaacttgaactttgaagacactgattttggttgagaggctctggggaggggcccggagatggtgtggagcctctggtgggaggaacgcagttctagcccagtgccctctgtgtaccagtgacagcccaggcccagtggagtccagccacttgtccaccgtctcgagacccgcacgtggcagggttgggactgaccccacttccttcattcccggttacttgcttttccgcggctgagcatcagagcccatgcagcggtagttacgaccgccggggccctgggacgcttgctctgggaacctgggccctatactctgggcctgtctgcccaaagaaatgtctttccagcctggtgcctcttctctgagaacacaggatgaaaccacaggcttctatgatctgtttcctgaaggaggagctctggttttaactctggtccccaggctgaccacacgggacacgtggcctgggcctcttcctgcgccttctcgggacatgctccccacagctgtgcctggaggaggtgtaaggggctgacttcaccacgggatgcccaagtgctgctgcgcctgggaacaagcccttccctgcttcgtggcacacagagccaggtttccccgaagtagtctaacgctgttgctaatttaaaaattacatatttgttatagacaaccaggaaacaaaacgccataaactcatcacccaggaatgctaccatttcagtgtttttcctttggctctttctcctctgtttttcccttaagaaatgcaaacattaacccttaatagcttaaagttaaaaaataaaaatgcaaacaggttgggtgcagggtggctcatgcctgtaatcccagcatttttggaggccaaggtgggaggattgattgcttgagctccggagtttgagaccagcttgggcaatatggcaaaaccctgtttctacaaaaaggacagaaattagctgggcatggtggcactcgcctgtagtcccagctcctcaggagactgagatgggaggaatgcttgagcccaggagttggaggctgcagtgagctgggattactccactgcactccagcctggk

SEQ ID NO: 96850 - DNA, 51749 bp, Homo sapiens
gcaagttggaagcaaggtgggctcagtgcagggactggggactgtgacattccaagagggaggtggctgtgggtggtgagaagcagccatattccacggtccctgggaatctgagggagggcctgccagatttgctgtggcttggatgaaggcatgagagaaagacccaaggtcaaccccaaggcttgtgtagtaggaggaggtcaaggtctgagatggaaagactgaggcaggagcagtttgcagagaaagaacagagcccagttttcaacgtgtggagtctgagatacgacatccagggccctggagccagggggagttctggctggagacatacagtcgggagcccttgatatctagatggtatttaaagctgttgtctggacaaggttgcctggaacaggccttctcaaacgttgacgtgcacacgattcccttggggatcttgtgaaaacgcaggttcggatccagcaggtctgggacaggacctaagagtttgatttctttttgttttttttttttttttgaaacggagttttcctctgttgcccaggctggaatacagtggtgtgacctcagcttgctgagatcaacctccgcctcccgggttcaagcaattctcctgcctcagcctcatgagtagctgggattacaggcgcgcgaccccacacctaatttttgtattttcagtagagacagggtttcaccatgttgcccaggctggtctcgaactcctgacctcaggtgatccacctgcctcggcctcccaaagtgctggattacaggcgtgagccactgtgcccagcccttgcatttctttttattaaaatgttttcatttttcatttttattatttatttgagacagagtctcgctgtgtcacccaggatggagtacagtggtgcaatctcagctcactgcaacctccacctcctgggttcaagagattctcctgtctcagcttcccaagtagctgggattataggcacccaccaccacacctggctaatttttgtacttttagttgagacggggttttgccatgttggccagtctggtctcaaactcctgacctcatgtgatccacccaccttggcctcccaaagtgctgggattacaggcgtgagccaccacacccggtccttcattttttattttttagagacaaggtcttgctctgtcacccaggctggaacacagtgacgtgatcacagcttactgcagccttgaactcctgggctcaagcaatcctcctgcctcagcctcctgagtagccgggactgcaggcttttaccactaagcctggctcaaatctgcatttataagaagcttccagaagaaacaagaccacactttgagtagcaacagtctagggcatgacattttatggccgagactcgttggtgggtaacaaaaccaacagatgagcttgtgacgagtagtgaaagaaaatgcaacaggttgggggttactggagggcatcacagccgcaaatctatctacaggaccacaaaatgcgtttccattatttgagtctgagtcccagggtctgtgttgggacgtgacaccagggtcacaaaggtttgcgaaaacctggcttgggagtgagggtaaacaaagaaggaaggggccagcaaccaagcctgggggaacaaggaggaaccagggaggagacagataaggtgaccagggaggtgggaggaaagccaggacagaatgttctggaagccaagggaaaaaggcctggatttcaattatcctctgcctcttcccagccctgtggccttgcaaacctgagcctcagtttcttccatcgtaaaatgctgacatgacagcctcagccactgaagtggctgcaaagtggcacttggcacagggccaggcaagctcatggatggtggtgcaattccaattcttgtcttgccctttgaactcctccagaccagcaggctgccctccccttgtgcagatgaagaaactgaggctcagaaagtggaaagatctggctgggtgcggtggctcacgcctgtaatcccagcactttgggagggtaaggcgggtggatcacttgaggtcaggagttcaagaccagcctgggcaacatggtgaaatcccgtctctactaaaagtacaaaaattagccgggtgtgatggtgcatgttcccagctactcgggaggctgaggcaggagaattgcttgaacccaggaagcggaagttgcagtgagccaagatcatgccactgcactccagcctgggtgacagagtgagactctgtctcaaacaaacaaagatcctgcctgatgccacctggccagtgtagggcagagcctgggcaccctgctccgccctgtgggtctggccctgctgttatcaatggcccctggctccaggccagtgctggagacagtcagccgcctggtgggtccctgggggccgcctgaaattccttcagtggccagtggccagggtggacgtgctctgtcttttcctgcagccctggccttcctggccagccaggaggaagaaagagcagaaagtgtgcatctgccctctgtggggtccaggcacaggggcctggccatcagccacgcgtctctcgggcgtgtggacagacggcacctgaacacatccgtatcagtcaaagccccggcaggaaacagatggcacgttccagtaggatcattagaggagagtttggtgaagggtctgtttacacaggtgtggtcggggtgtagggaagccccaagggacggtgcagaaccccagggctggcagcggcgtgggctgtgaccaccctcagcctgaagaggccaggggaggagctgagtccacagctggacagggctgggtggagggggtccccaacaggaccgtggccttcagtggagggaggccaccagtatgcagtgaccctgcagggaaggggctggaagacggaccctcctcctcctgcctcctctgacctctgcaggggtggggaagtggatgtgtcccacaagagggagagtgcagctgggggatgtagaagacagctaccccaaggcctgtgcccagcagggaggccatgtggccaccaggcttcctcgggcaggagacccagtccaggactggccttttctcctgggaaccaatgacaaggcccacttctctgggcctccatgacccccacccctgccttgacttctagggtccctcatgctttcagcaaatccatctcaagagctgaaaggccctgggctctgtgctggggacacagcagtgcaaagggtgtcaaagtctctgccttcatggggcttctaatcaagtagagagatacatgcagatggctgcacacaggcttaggtgtgacagggaaggtcaggatgctgtgggagccagaggtgacttccgcttcaccccccacccgcggtggtcccaatctcttccttcctccatgaggtgtctggggtcggggccccagttcttcctggagtccatctggagtctctcctactttctagagaatccattgggtcttgtttacaacgtggatggggacagactgtgcagcgtggagggaaggggagggagggagttttgggaagagcctcctgtggggtccctgtcactgccccagatgcccccaacaccctgtgatacctgcagcccctgccacatctgtccctcactccaaactcagctcaggggatggtggcagggaaggaggtgagcttggacccaggcagccctggggtcaccaccctccagctggggttcctcctctgtaaagtggaggtataacggtacccacctcctggggtggctgtgaggattcagagctgataaggtgaacgcctagggcgggccctggtgcagagagagcgctcagctcctagggctggattaactgtccctggggcacagatctcggtctggggcctgtggaaacctcagagccacccctgaacccccaccgagccaccctttgcctcgcagtgcccatggcctcgtctccgaggttacaggaaaaggcagaggagatgcccttctcagggtggccctctgggagaggacactctcccttgacctcaaagccacgcttggctgcaaactggccaggcagccacaaggctgggcaagcagaacgatccctaatccccacccaaagagccacaccgaccctcccagccgctgtgacagctcctgcagagacaaacacacggcctactcttgtcacccgggccggccaataagcacggagaggcaaggcctcagaccctggacagacatcctccctccagaggcacccagggcctcagccttctcctccctccctgggcctcaatttctccacctgtgacccagggcaggtggatccagggagaagaaccttctggctccatctcaccgtgggtcctgccagcacacacaaagatttggcctctcaaagcctagctctgccagcgtccttctgctcaagaactctccatgactcccagtggccctaaggacaaagtcctggcatttgaggccctcccaatgcagggccagactctgcctctccagcttcctgtccccaccacacccctgctggtctcacggtggtccgactgtttcctgcttctgtgcctttgcttagtctggcacccctgcctggcatgctttcctcaccccttcttctccccaatcccaactcacccagtctttcaaagggcaggcctaaataccaggccctccaggtggcccaggattccttctctgagctttcatgggcctggccctgggtgctacctgtgagtagtcccacggtgggtacatagtaggtgcgcttactgtttgcagaatgaacatgggacagtttggggactgtcacccagctcagggagcactgatggggaagcatctcctgtatgtcccagggctcagtgctgtagtgtcctgaccctcagaaatctcataatggcttggtcaggaaggcatcgtgccccactttgcaaacagggggtgctgagaattgaggggccttgtccaaggtctcatggctaggagcaagcagaatcggatttgaacccagggccacgtgacttcagaagtgccattaaagtccccataatttggagctgtcttctttttttttttcttttcttttttttgagaccgagcctcactctgtcacctaggccaggagtgcagtggtctgatctcagctcactgcaacctccgcctcctaggttcaagtgattctctagcctcagcctcccaagtagctgggactacaggcgcacgtcatcatgcccagctaacttttgtatttttagtagagatgggttttcaccatgttggtcaggctggtctcgaactcctgacctcaagtgatccgtctgcctcggcctctcaaagtgctgggattataggcttgagccactacactcggcctggagctgtgttttgtcggtgaaggattttccacccatgaaggggtcagacgtgaagtgtgtggccctgggcagctcctctgagcccagagacgccagccctagccgccttgctgtgccactttgggacttccctccctagcctgagcttcagttttcctgcctgttaggcagccccatgtcaactgcacttagtaggccgggtttgatgcccgacaagacgtgaagtggtggaggtgggcaggatcccagcgctaccatcttcttgaaccagtgatctcaacacatcggatttctgtttcctcatctgcaaaatgggatcagtgagctcaggtgggtcacaaattctacaggaactactttagccaagcccggccccctgaaagttcccctcggtgggctgttagggtgattgttttcatctgtggggctccctgatgcgtcccacccaccagccttggagagggtgggatgggagggtggggtgcttggggagacaagcctagagcctgggccctcccaccccactgcctccccccatcccagggccccccacccagtgacaaagcccgtggcacttcctctacccggttggcaggcggcctggcccagccccttctctaaggaagcgcatttcctgcctccctgggccggccgggctggatgagccaggagctccctgctgccggtcataccacagccttcatctgcgccctggggccaggactgctgctgtcactgccatccattggagcccagcaccccctccccgcccatccttcggacagcaactccagcccagccccgcgtccctgtgtccacttctcctgacccctcggccgccaccccagaaggctggagcagggacgccgtcgctccggccgcctgctcccctcgggtccccgtgcgagcccacgccggccccggtgcccgcccgcagmcctgccactggacacaggataaggcccagcgcacaggcccccacgtggacagcayggaccgcggcaygctccctctggctgttgccctgctgctggccagctgcagcctcagccccacaagtaggtgtccagggacccagggtggggagactcggcctccggtgcacggaccaggccccaagtattcccggcctccttcctgtatcctgagctcacgcccagcagagccatccttggggctctggagggtcaccaaccctcccagtttgctggaactaaatggttatgcaggactttcagtgttgaaagaaagcctcgggcaaactgggctgactctttcactttaaccctggtctctggcgtctgctcacccagctgcgttccattactccccgggaagcctaggtcccagaatgctgtgcagcgacgggagagtttcctggcctctctgggccttgagtttccccatgaggaatggatgggaaggagggcccacagcctgggctctgagcaccgtctctgggttcaaatctcacataggcacttccttgtggtgtgatcctgggggactgccttcgggcctctgagcgaagtggggaagagaacagacttccctctcagagctgctgaggaggtgggtggtgagggatcattgcagagagggctctggcagactggccacttctgtgttgttttatttttagctttaagttcctccagctcaccttccccagggcctttgggcagctcctcaaaccctttgaacaggccaaggctgcagggccctgccctgcctccctcctacctccctgatccccagaaagggtgcaggagtgggtgcaggccaggttaggggttctgtggggctccttggcctgggggctcttccaaggggtcatggcctctgctgctttctgaaactgaccagaggaggggyggtgaggagcaagggacccccagccccatgtcccactccctatccctcggccacctcaagccgctggccggtcctgtggacatcctttgacccacctgtgcatccaggggcttcctgacagatttgggggaagaggggcagaaatgagctgagagtgtggggaggaaggggaaggaaaacagcggtggggcagccaacttctccccacctccccacctgatggcattttagagtccctgattctgggtctctaaagctctgcccaccacctgattgacaggaaactgagtctcagacatattaagtgacttagcagggatttgactcccggcctgcggctccctaaatgtttgctcctagtaaggtgtgatagggcgaaccctcttaatgcggctcacaacgaccctgcaagatggctgccatcatcatccccattttacagaagagaaaagggaggctctaacctgccaagttcacatggctaagacggagcccctacctgagctccaagatctccctctctcgtatttgtcgctgcagtaacactctcttcctcttggtcgttagagaaaggtccatgcagacatttagggcctggttttaaaggatcaaaggcagtgatatgctgctgaataattaacaacggggtggggagctcaatttgtagcgtttgtggattttcacagcgtaagtactcccacccggctgacttcaagccaccaactcaccaagtttggagctgggaatcagtgcccggtagcacctggcggttggttctccagagtctctgcaggcgcagatcacaccgagagcagagatgacagtcaggggtgtaaaaygattagaaagaaatgagtttggacattcatgaccttttaaaaatatatagtaatagctatgtaacagccagttggaaaaactcctggaaacgtatccgtctgttcctgtgagcaggtaggagctggtcccagtgcaccaggagtcacaggctcaaaggtacaacagaccatcaacccaactcatttatggtctgggaagctgaggcccatggaaggcagaggggagcctggggccagggcctggaagccagctgggggtaggggtcggagtgaccctgacctcctagaaatgggtctagaatttgggggcaccacttgtaagaatctcctaaaactgtaccttgcatgtgacttgataccctcacaaatcagccttcagtagtcagccttctaaagttattcgtccaactctgtaaagatgcgtggtccgtgggtacctgtaacaaaaacccgataactggaaatcatctaagtgtccatgagcaaagactgttaataaattaccacacgacggaatgtcatgcagcaggcaccaagaaggcagagtcatatgaacactgccatggacggatgtcagggacacactgttaggtgcccaaacaacaataattccattttggcaacaataaaatagtaataatgtacaatatgcacagagaaaattctggaatagagttttctatttaacccactattactgttctctggtctggggttttctctgtgggactttcactttcttttttaaatttttttgagacagtcttgctcttgtcacccaggctgcagtgcaatggcacaatctaggctcgctgcaacctccgtctcccgggttcaagcagttctcctgcctcatcctctcgagtagctgggactacaggcgccggccccacacccgcctaatttttgtatttttagtagagacggggtttcaccatgttggccaggctggcctcgaactcttgacctcgtgatacgcctgcctcagcctcccaaagtgctgggattacaggtgtgagccaccatgcctggctgggactttgactttctaagacacactttcctgtcatgttgggtttttttgttttcttttgttttagggacaagcaggccgggtgcagtggctcacgcctctaatcccagcactttgggagggaggctgaggcgggtggatcacctgaggtcaggagttcatgaccagcctgaccaacatggcaaaaccttgtctctactaaaaatacaaaaattagccaggcgtagtggtgggcgcctgtaatcccagctacttgggaggctgaggcaggagaatcgcttgaccctgggaggtggaggttgtgatgagccgagatcaagccaccgcactccagcctaggtgacagagcaacactttgtatcaaaaaagaaaaaaaaagaacaagcatgtagagatttttttaaagcaattaaaattaaccatatagctgcctcagcttgcccctcaaaaaaaatagagaaaagggaaaaaatcacctcggaactcctttattgatacaggtaccgttagtatggtggtagatggcttactagtttttttttctaactttttaagctacttttaatccagatgggtccacattttgggagtcttttgtctatttctttcgaaccaggtctccatgttgtcctgtggactccatgaccatcctcttgcacttctggaatattctgtcccatcaacttgtcaccgtttgcttattgttaaatatttaggtggtttcccctttgttctagttataaatactaccacaatgcacagttttggtacgtgcaccttttcctgtattttggattatttcatgtggattgcgtcccggcagcaaggctgcagcggctcgtggcctgtgctgggtggctgggattgaagagtgttcctgagtgtggaggatcctttgctggaggacttaaagtccccatgctgctggctgtctgtgttggagtctgggacttgctggagaagggtcagtggcgcaagagcgagaccacaaacacctgtctcttagaggctgcgttcccatttgctaggaggaaaaagagcctggagcaggagccgtgtgaaccaggagagggtgggctccccgagacacgggggacgtgaccattagcattctccctcaccccagccagacagacgtgacccagagggacagagggacttgcttgtggtcacggatgtgttggtgctgggccctcgggcgacagacccattcttttgccccagggctggaggtggatctgggcaagagtgaggcggccacctctcctctgtccccagcatgtcaggcataatgccagctcctccttgcctctatccccagtttatagatgagaaaattgaggcttgggacaaatgacaggtccagatttcaactccaggccgtctgcttccaaattcagcttcttttccccacaacttttgtgacctgaatgctggagacctaaagaactgtttacccttggctctgggaccctgcttcctagttccagcccagkctttggggcaccagccttggaggctgaagggaccctcagccagggttcagctggcttcaacccctgtggcaggagtgggggtgggataaagagataatataacaactgacatttattcagcacttacagtatgctagacgctgctctaagcgtggtatgtgtactgtcagacttaacgcttgcaaaagccctacaaaggagatactctttctgcccccatttgacagatggggagactgaggtactcgtataactcagtcaggtgaagaaatttacccaagtaacactgccctgaaatgagccactggggctcaagccctgggcctaagcactgcagtgtgctgccacagtggagaggatggggatcttcctcttgcctgatcttctccccgcaggcactcagccttttctctggtccccataacggccctcccatccggggtacaacccctgggaccctgcctttaccttcagcagycccatctatgccctgctctgtcttcctcctgccttcatccttaggtgaaatctcagactgtcagacccctagtagaacttagaatatgtcctatccacccccgctcttccccacccactagccatagggaaacagagtcccagaatggtggggggacttgatgtgggtcacccagcaggtcagaggcagccctgaccagccagttccacaaatggatgtttgtggtgttagaaacaaaatgcttgttcctcagtgccgcaaagaaatagcacttgaacataaatttaatcttctcagcaaggcaatttttacttctacagaagggtgcgattcaagaatggagtaatggcgagagcacatctgaacaagggaggggaaggggttcttactcctgacgcaggtagcccctactgctacgtcgttcccctacgggctagtgttggaccgcacagtctaagctaattccagttagctattttagagagagcaggggtatgagccagagtggcggggtgagtagtttggmgggaaggatggttaggaacaggtaactaaaggtgacttaggtcaaagcaggtgaccaggggtttgtgaggtcaaagcacatgaccaggatgagtcaggatggagcaggtgaccaggggaacagatgtgaactactgattaaaactggtggaaaaggttgtttactgaaaccatgaggaagttaaactttaaaatggaggacaaagaactgaacatactgacatactgattctttgaagagaaatctagaactcactgtatccagtggaagtggatgtttgctctgagccctggactaactgattgggacatggaatgctgtggactctccttgtcctggaaaaactcactgtctgctgggagtgcagacacactgacaaatcaaaacagcacacctgggcatgtatggtctggttctccaaggacacccaaggacggatgcacctaagaaaggagggactggcttcagtgagattttcaggacagggttttgaaggatgaatagaagttygctaggggctgggcatggtggctcatgcctgtaatcccaaygttttgggaggctaaggtgggaggatcacttgcggccaggcrttcaagaccagcctgggcaacatagcaagactctttctccacaaatatttttaaaatttagttgggcataatgactcatacctgtagctgctcgggaggctgaggcagaggattgcttgaggccaggaggtggaggttgcagtgagctatgattgcaccactgcactccagcctgggcaacagagcaagaccccgactctccaaaattaaaaaaaaaaggccaggtggtcaaacaaaggatgagcgttggtctgggaaagggcatggcagaggcaggagcgaggtgtgtttaggggaagagcccacatatccccactgactgggcataaataattgtgatrgtagtcaccagttcctgagcaacccccacttagcaggagccggcctagcgctgtgcaggtgtaatttactggcctgcttgccgactccatgggaagctgttatgatgaccctcatccccatgttacagatgagaacactgaggatggaaaggcagctggcaggtggaagaatcaggacctgaacctttggcatctgtcaaatcgctgtgcttttcacctctactgtaggctgcagtgcaggaacttgaccctgcaggcatygtagaaccaggggggagcccggggccaaggcatgctgagacctcctggtggctgggggcagtggctgggctggatgctgggaaacctgtgaggctgtaattgggcctgaaaagggtaaagagtggcccgggggtactgaacaagacggggcaggcattgcagcaagaargacccttgttgaaacgtatcttccttgggaggctgagatgggtggattgcttgagcccaggagtttgagaccagcctgcgcaatacggcgaaaccccgtctctacaaaaaatacaaaaattagctgagtgtggtggtccacttgtagttactcaggaggctgaggcatgagaatcgcttgaacctgggacggggaggttatagtgagccgagatcgagacactgtactctggcctgggtgacagagtgagactctatctcagaaaaaaaaagggggggtggcagcgggaagaaaagtatctgtcctagtatgatgaaataatattcacagcttctgtgtctggggcacctacttagtaccaggcactcaacaggggttaccccatcaaactgacacactcagcctgtgaatgcctgctgcttgctggagccagactgtctgggtttaaatccaggccgtgacacttagtagctgggtcacctcgggcagctggtcttcagtttctttaaccgccctggtcttcagtttcctggagtgtgcatgggtgtaatagcgccgcccacctcacaaggctgctgtgaggatcaaatgagttcactcgtgtaaagctgcctaggctcccagtaagcatgatgggagcatctgcagtgattattggtggtctgcaaatggggaaactgaggctcagagaggttaggcttctgctcaaggtgaccagcattttaagaggcagagctgggatttgatccaggccatctggctccagagctgtttttcttgatcatcctccaaggtgctgaaggtagccctctggaaatctgggaggtgctgtgtgcacatgggtggcgagggtggagaggggacagtggtgggaggtggcttctgggtctctcacttggggttccagtcacccaggcccccagcggctcctcctctgacccagtcccgggaggccctggcgtttcccttggtgccaggggattgttttcaacttggtctgggcccgcctcaggctccgggagacaggcccaggcgtcacactccctcctgtctccccattctcgtctgcggggtgggggcggccaggattcgaaaaggccccaaaataaatggacctcttatctgatctccccgccaggcctgttatctgatcattacataatggccaggcttgtggcctctcccgctggctgacggcatggaggaggcggccccaggcggccccagcaatccgggaggaactggggttcctggaagtctggggagggggcagggaaagtcccaaagggaaggagggaggcgctgcgataatctgcaggccagacactgggtcatgttgggagacgcgggtccgaggcccggcctggtcaaccatgtgctgtgagactttgacctgtcccgtccctccagacctcagtctccccatctgagtaggaggggcttaagctaggtaacagccaaggaacctgcgctcaccgatgaggaaaggagagggtggggagaacatgggggctggtgggtcagagggactggagacaggagatggcaccagcccttgattttgttggggtgagggagatcccagtgacctctccatcccagaggaccgtcacctggaggccaccccatcccgccacttcaccccaccccttagaacagtcaattctacagtgactgaagtcagtcaaataattgtaattaagagaaagctgccggccmggcatgctggctcactcatggtggctcacacctgtaatcctagcactttgggaggctgaggcgggaggactgcttgagctcaggagtttgagaccagcctgagcaacatagtgagacccagtctctactgaaaatttaaaaaattagccaggcgtggtggcgcmcaactgtagtcccaactactcgggaggctgaggcaggaggatcgcttgaacccagcagctcaaggctgcagtgagctgttatcacaccactgcactccagcccaggagacagagggcaaccttgtctgaaaaataaacaaatagaaatttaagaaagaattgccatgtgcccagtctcatggagtcctcccagccacctctgtggatcatgtgggctctgttgtcattttatagaccaggtattgaagccccaagaggtgaaatcattcaccagagccacatagctggtaagcattgggcctgagaggcaaaccaggtcagcctggctccagggagcttgcttttaaccaaaatgccactatgtccaggcactccagagtccctgggacatgtaggatagggtcagagagacgacatatraggcctgggcccccgtggcagccagaagtcctcatccagatcttctccttcccaagacagagctgggaatggcgttgccatggcaaggggtgaccatctcacttcctttgctgacttctggggcccagagcccaacgtgctgtgggaaggtgaggaaggaggccggtgaggctccagacagcccagggttcagmagaagcctccctgccccctcctctgagccggccttggctggacatgaagccagtctctccgcgcccatctttgatctccaagaaaacaggaagtgagcgcgacaagatggagacacaaacttccaaacagtctccccttctgtcctccttccctcctccggagcccccttcccccggcacattcctcaggacgaggtgtaggagcctcatttccttttccgaccctgctgggtcagggtgaaattccattcctttccctcaggacctgtgtttccgggctctgcggtctgctctggcagcctccaaacctgggccgccttctcggctcgccctgtcccttggggctagggaactctcaaccccttcagmccattcctcccaccaccttgaggcaagagaggggaagctttgtctcctgagctcagctcctgccttacctggagggagacttgggttcacacctaggccctgccatgaagttagggttgccagatacatcaaatgaaaatcagccgggtgtggtggctcatgcctgtaatcccaacactttgggaggccgaggtgggaggatctcttgagtccaggagttcaataccagcttgagcaacatggtgaaacctcatctctataaaaatgcaaaaattagctggatgtggtggtgcatgcctatagttccagctactcaggaggccgaggtgggaggatcacttgagcctgggaggttgaggctgaggctgaggctgcagtgagctatgattttgccactgcactccagcctgagcaacagagcagagtctgtctcaaaaaaataaaaaataggccaggcgcagtggctcatgcctgtaatcctagcactttgggaggccaaggcaggcggatcacctgaggttgggagttcaagacgagcctgaccaacatggagaagccccatctttactaaaaatacaaaaaattagccaggcatggtggtgcatgcctgtaatcctagctgctcgggaggctgaggcaggagaatcacttgaacccaggaggcagaggttgcagtaagtcgagatcacactgttgcactccagcctgggcaacaagagcaaaactccgtctcaaaaaaataaaataaaataaataataaaaaataatttttaaaaataaataaaaaataaaaatataggaggctggccgggcacggtggctcacgcctgtaatcccagcactttgggaggccgaagtgggcagatcacctgaggccgggagttcgagaccaacctgagcaacatggagaaaccccatcgctactaaaaatacaaaattagctgggtgtggtggtgcatgcctataatcccagctacttgggaggctgaggcaggagaatcatttgaacccaggaggcggaggttgcggtgagccaagatcacaccattgcactccagcctgggcaagaagagcaaaactccatctcaaaaaaaaaaaaaaaaawawawawaatatatatatatatatatadatgtggatgtgtgggtgtatatatgtatatctatatatgtatatatatgtatgtatatatgtagatctatgtatatgtrtgtgtatgtatatatacacacacacatatatacatggggcccagtgaaatccgaatttcagataaacaatgaaaatttagtataagtacgttccatgcaatatttgcaatatactaatacttaaaaaaatgcactcattgtttatctgaaatttaaatttagctgggtgtccttctattcatcgaccctatacgtagyagcgctgtgaccttgggcaggagacgtttcctctcctagccttggttttttttaatccatggaacgaatataatgatatccacctcataaggtggctgtgatgatgcaggaaagccgttagctcatgtcaagtccctaggagacgtttggaaagtaggagtcattgtcatcaccttattctcacctggcctctttccggatgtttctccaacaggtcttgcagaaacagtccattgtgaccttcagcctgtgggccccgagaggggcgaggtgacatataccactagccaggtctcgaaggdcygcgtggctcaggcccccaatgccatccttgaagtccatgtcctcttcctrgagttcccaacggtgagtgtcccatggcagggtcggktgggggctcagaggaagctccaaggcagatggggtgaggggtgccttccttgtggctgtccctggggcagtggctgagtcctcgttaggccccctgccaagagagtgatgtgggcatctcacagggcccataagaggtggcatttctaggggcagggtctggatcagggcagtcttttgggtgccaccagaagactcaggtgggaagagctgagtagagaagagccagatgggtgggggggaccaggtgagtgttgcttatgcacctccaatgatggagacctcacagaatctcagaagaatgcagctcctctctagggagcttggactttgaaaagtgcttcttgggccagccacagtggctcacgcctgtaattccagcactttaggaggccgaggcgggtagatcacgaggtcaggagatcgagaccattctggccaacatggtgaaaccccatctctactaaaaatacaaaaattagytgggcgtggtggtgagcgcctgtaatcccagctacttgggaggctgaggcaggagaattgcttgaaccagtgagttggaggttgcagtgagcttgagattgtgccactgcactctggcctggtgacagagtgagactctgtctcaaaaaaataaaaaatwaaaaaataaaaataaaataaaaatacaaaaattagctaggcatagtggcgcatgcctgtaatcccagctgtacttgggaggctgaggcaggagaatcgcttgaacccaggaggtggaggttgcagtgagccaacattgcaccactgcactccagcctgggtgacagagtgagaccctgtctcaaaaaaaaaaaaaaaagaaaagaaaaagagaagtgcttttcagttgagcccagatctttctccctggaatgtcccctgctgaatatctgtgaccctcagagatccaaaggctgctgccggcctggagacgattctccccaggagacccccactcccagcccaccatcagtttgtctgatacgtctgtcctgaataataacaacacctttgttaagcgctatgtgctagagactgtgctagggccgactctatgccaggaattaagcatctcacatgtattaagcctcccaaggctcatctgccagggtctgttattatccccacttcttggagaaggaaactgaggctggctgagagcgatggagtgacgtgcccagggccagagttcacaccagatccctggggatgccagagccagcctgccacttggttccccacgtggatctcagtgttcaggtggcttctggcctgttggactggagattacacctggttgatgtggcctttggtcccgatactgacttcgccgtgtcagctccgggtaaacttatggccaatctgcccccaaaactgttaagttgccttgcgtttgtgcagtgataagaaagtgctcagaccaccaatatcgggggaccctgctccccaccgccctgccctctacgaggactgtgggctttgataatttccaaatcatagatagtgccaaacacactttgtgtggtttccataggcattgtcatttttttttttcaaatttggtaatgatattcaaaatacgactgcctctgttagttcgcattgtttgttttaatgttcaggtccctgtgcctcctctgggtgactgggatcccccaaccctaattgctcaatactgggccagggtgagaggagggcccctaggcaggtgtctaggtctatgggagataggtgtgtagatagccagccaggatccaggggactggtgcattctcacggggcacagggccagggcactccagctgctacgggattaggcatggcttgttacggccacaccatcctgaacacatccgacctcatctgatcttggaagctaaggagacttgggcctggaggaagaaacatcatggatgtccaggagctcaccaaggaaggaggtggtgtggaagagcacagaatagagtgaatgcggaggcagagggaacaggctctggggtcatcaggtggcaggagctagaggttccccagcaggacaggggagatggcaaaggcctgtcgccatattaagaagtttgatctttatcccgtgggcaataacagttcttggagggattttaggggcatggcagggggccactgtaactcatgccatattccaaggatccttgagttcatgacaacaaaatctccctgttagcctctgcctcttctagagaactcgctccagggagcttccaacttttaattcaaggagccaggctgcaggctccagggctttgagggatgttcatttgaggaggtggtagagacatctggggtccaggaaacccagggttcagtcctggatctgtccctggccagcacctcgcatagcatctggtgtgcagagggtggtccttctccccacttgctggtagacacacctttctcggactcaggagctcacctgagaacacagagtagcagaacctggcccaggggcctggcttacaccaaatcactctgtttgtttgttttttgttgtttttgtttgtttgttttttgcctcagactcctgtagctgggattacaggcgtctgccaccatgcccagctaatttttgtatttttagtagagacagggtttcaccatgttggagaggctagttttgaactcctgacctcaaataatccgcccacctcggcctcccaaagtgctgggattacaggcatgagccactgcgtctggccccaagtaactcttgaacgtgtgagtgaatgcacgcatgcgtgcacaaatgtgtgcgccgctgtatgaccttgatgcaggggttgagaacacaggttctggagccaggcagccctccagctgaactgtggctccgcctctgagagccacatcgccttgggccacctccgagctttgattttcccaygggaaacctggacccattagcagcacctacctcacaggtgtgttgtaagaatccagcaggacggtgcaagcaaaacaccaagcgcaggacctgcctggagtgacggctcagcgtatggtggctacggttattgttattattatttctctctgggttccatttctcctctgtgaacatccccattttgccagggttgttaccgtttacagaatgtcttcgtatcagttgaataatttgaacctcaatggttattgctacaagatcaatggggcaggtcaggcgcrgtggctcacacctgtaatcccagcactttgcgaggctgaggcaggcagatcacttgaggtcaggagttcgagactagcctggccaacatggcgaaaccgcatctctactaaaaatacaaaaattagccaggcgtggtggcaggtgcctgtaatcccagctattagagaggctgaggcaagagaatcgtttgaacccgggaggtggagattgcagtgagccgagttcgcaccactgcactccagcctgagcgacagagcaagaccctgtctcaaaaacaaaacaacaacaaaaaaaagattaatggggcagggctgtgaattcattttcagcagggcaagctgaggtccagcctcatggagctgggccttcctcctcctgctgcttcttgtctccctgctctgagggttgagcccatgatgctgccagcccctactgctgtgaccactgaggaccctgtggtttccctgggaggcaccttcctccccaggcatcccctaagagtggggtctagagctcayagtccccattgcgcagccctcaccaggtgccactctgtgcccagcctgtgttgatgatgcagacagaaggtagagccagggaggcagaggtggcatcagcagccctggtatgagtggtgggatcagcaaatggggcttcagggggccgcaggtgatggggtgatgagcactgaaggtagaggagggaggggcgttagggaaaaggcccctggtgtctagcccaagagcagggtagagggcattccaggcagaagccagtgcacagcaaaggcctagcggcatggggctggacgtggtagtgggggtggtggcttttagcagccagccggatccctcctgacctatggccggcttcttcgatctctggcacagagaagtggctttcccgtccatccctcagaatcctcagatttcctgtgggtgggtggtagatgggcggtggcagccgagagccttggggaagtgccgctcagtgcgtgtgctgggcaggtctgcagacagccccgctgggcaggggctggatctcgctgggtccctgaagggcaggccggagcctggattccgggagggggcccagggtcacatcctgaccctcggagacaggaaaccagcctggtgtctcagcaattcccgtcaggctgactgggccgatctgctatcctcctaacaaatgcacaggctgccaggccagggcagagctgggtcagcactgattcacccactcctgggcaaacttggggcagctgagaccccacccacccctgaacagacacagcctgtcaggccccagcactgactcactcttgaccagaggggcaggcaacaccactcaggcagagagagagagccgggagggaccttagctcccccagactgtcctgggaggcagtgggaggccatggaaggcagtacagccctcagacttgggcaaaggggacccctgcctgggcttgggggaagcagtctccctctggccctctgccaatggcagccctctcccagggtggggactctgtggggccaaagggatgtacccccctgaaacctgcacccctcccttctagatgatgctctgggtacccaggaccccaaaatcccaaatggctctgagcctcctctcagggctgcagggatctttcctgttccatcctccaggggagcactgcatggctatgtgagctcccccagacctgaaggatggttgagttggctacttggggaggcaggcatggtggagtttgggtatccgggctgagctgtccacatgtggacacatgagcacccttgctggctgtcagaaccacagtgatgagaaggagaaagcactggggccagaggctgccatttgtattcttgtctcaggccttgcaaatattagaggcaggcttgctgaaggggcaggattgggggttggggagggtcagacaggctgagcagggattgtgcctgccctcttactgctgaatctttggtgttaagctcgaagtcagcccaggaatcaatatctgttggatggatggatggatggatggatggatggatggatggatdcattcatgcatggatgagaggatggatggataagggcgggagggagagagaataaaagaaaggaaggaaaaactgtacattcttataagcatttggtgattggctattcccaagtgggctgatgatgttccttgctgtttatgtctggtcgttcggaggtgttggtttgttctctgccaagctcttgaggacagagttatgccttttctgtcctttgagaacacagaagccccaggctgggcccagtgccagcctctcagacaggcaaatgagttggagaggtgaggacacgtgggctgaccaccagaaaggctggaggtaccaggggccccctcagctgaggaagaagcatatctctccagggcattctgaaaacccactctgtggccatctggctggagaccaggactcctagatgtaaaatgctgggacccccagaaggcagcctgggatctaggggccacacaattctagaacatcactgagctcaactcctccctgcacagatggggaggctgaggctcagagataggatgccacagcgaggcatggctgagagatttgtagttctcaccagctgcagcccacctctaactggacccatgcttcccagcccctaaactgtggatggctctccttggatgactgtgtgcaaggggagaatcagagggattaaaaagccaaccaggccaggcgtggtgtctcacgcctgtaatctcagcactttgggaggccgaagtgggtggatcatttgggtcaggagttcgagaccagcctggccgacatgggcgaaaccccgtctctactaaaaatacaaaaattagctgagcatggtggtgggtgcctgtagtcccagctactcaggaggctgaaccagcagaattacttgaacccaggaggcggagattgcagtgagccgagatcgtgccactgtactccagcctgagtgacagagcaagactgtgtctcaaaaaaaaagccaaactactcccacatgtttagctgggcactggacaacctactttgcaggcagaattgcactgaaacctcataagtcaatgaagtgggaataccattttccaaatcaggaaactgaggcccagagaggcatagtgactgtccaaggtcayaggctaatgactgagcccccatctgaattcaggttggtctggctttgatcctttcccctgccaccctgcctgtaggaccatctgagttttctggggtggacagagggacggctggctccaatctgaccgcctccagtcaggccctgggagggtgggggctgcaggcagccctgaggctccactcctagaagaattgctggaagcgactttctataagtggctactagcactcagggcctcctcaccgaaatccccccttcctgccaccaactgctgggcaacaatggcatctgtgggacattggtacaaaaatagaaacgcggtctcccgcccacccactcagggagggggctgggtaggcgcaggctggccgggctgggggtgaggggctggccagactgcggaattcccagggtcccatgaggaaggctgggagcttggggttgggggcaaggctggcgccatcgttttttgcctctggggcccccggccgggagagaagggggaagtcggtgtgcgtgtgagtggccgtggcggtgagtcagggccgtggggagggaaatgtttgctgtagaaaccctgactgggtttttctggtaaccagctgtttttcagcttggccctgcagctcagagaacctgagcacccagctttccagcccccctgagtttcccaactactcacttgcccccacctcctacctgccctcaagcctgcagggaaggacttggtgacaactgagtggtagctttggttcgtgagctctgggatgagagctgagtgtcccaagaaacattcygaagttccagcctcctcgtcacccctcacagacagcatgaccaggctgtgacctgcacttcccttttttttcacttcctttatccatagcccaacctggtactggttcccaaccctgtcctacccccatttcacagatgaggaaactgaggcatagaggaacagggacagtggcggagcagcagtaggactggatggccatggggctccttcatccccactcagggcttggccaccagactgcactctggcttctgcagcatgcttggcctgtgggtgtcaccatgggatggcggatggatgtcctcatgcaccacaggctgtgctgtgtcctggccatgatctgactatccagagggcccatctcttcatcgtgtgggccttgcaattctttcctccaggttgggacaagcagatggggccgcacagcaatggactgtagggcaatctgggagagaggtgcagttgagagggaggacatggtccagggaatgcaggccccgctctggcaccacgcccagcctagaaagcgtaatatttttaaaaactgccaggcatggtggctcacgcctgtaatcccagcactttgggaggccgaggtgggtggattgtttgagtctaggagttcaacaccagcctgggcaacatagtgaaaccccatctctacaaaaaatataaaaattagccaggcatactggtgtatgcctgtagtcccagctacttgggaggctaaggcgggaggatcacttgagcctgaggggcggaagttgcagtgagcaatcacgccactgtactccagcctgggcaacagagggagaccctgtcttaaaagaaaaaaattatatatatatatattttattcaaaactgatgaaacaatatattttgaaaaccaaaagttatraacccactagaaaacattaatcaaaacatgaacttatacaaacataaatttgaaacatatcttatcccataaattagcataaaataattatttaaaaataaccaacctaactgggcgcagtggctcacacctataatcccagcactttgggaggctgaggcaggcagatcacaggtcaagagattaagaccattgtggccaaaaaggtgaaaccccatctccactaaaaatacaaaaattaggctgggcgtggtggcacacgcttataatcccagcactttgggaggctgaggcgtagggatcatgaggtcaggagttcgagaccagcctggccaagatggtgaaaccccatctctactaaaaatacaaaaactagccaggcgcagtggcaggtgcctgtaatcccagttactcaggagtctgaggcaggagaattgcttgaacccaggaggtggaggttgcggtgagcagagatcgctgtactttagcctgggcaacagagcaagactccatctcaaaaaaagaaaaaattacaaaaattagttgggcatggtggcgcacacctgtagtcccagctgctcgggaggctgaggcaggagaatcgcttgaacccgggaggtggaggttgcggtgagcagagatcgctgcactctagcctaggcgacagagcaagactccatctcaaaaatatatatatacaaaaattagctgggcatggtggcgcacgcctgtagtcccagctacttgggaggctgaggcaggacaattgcttgaacccaggaggcggaggtggcagtgagccgagatcatgccattgcactccagcctggcaacagggcaagactccatctcaaaaaacaataataaatagaaaaaaactaaatggcacactaaaatgaaaaaaaaaattgtgtttacaactaattgatcacaaccagttacagattgctttgttccttctccacactcactgcttcacttgaggagcctaaaaaaaggaaacaaaatatttgtgacacattgaaaatgaaatactattatttgttctttttgtgttttaaagaggaaacttaaaagcaaagagtaattatggtatcattattgagtaacagaaatatttctgggcagatttttccagtggctgaaacactgtctctggctttgtgacgtcagttggggaaatggcaagatgattaaaagttaaatctcaaaactttccactggtgtcttcatcttgaaatagccttcccctttttcataactttgaaaagagcttttggatcatcttttagactggcagcttttgtatgagagcactgggagtctgtgtttcagcaaattacatttgtctttgtcctcctgagttggtggcagggcttctgaggcatttacctgtcttttttttttttttttttttttttgaggcggagtttcactcttgctgcccaggctagagctcaatggcgcgatcttggctcaccacaacctccgcctcctggggttcaagcgattctcctgcctcagcctcccgagtagctgggattacaggcatgcgccaccacacctggctaatttagtatttttagtagagacggggtttctccacgttggtcaggttggtcttgaactcccaacctcaggtgatcggctcacctcagcctcccaaagtgctgggattacaggcgtaagccaccacgcctggtctacctgtcttagtctcagcactcacctgttcacatgccactagttcagaaagtctttgaggtcattctttcaatagacactggcttgtagattgctgtgttctttttcttcttgggaataaggttagaaaaatgtgctagggaaggatgtgctacacaaaaatgtgtggaaaaatgtgagagcggccgggtgcagtggctcacgcctataatcctagcactttgggaggccaaggcgggtggatcacctgaggtcaggagtttgagcccatcctggccaacatggcgaaaccccatctttactaaaaatacaaaaattagctgggcatggtggcatgcacctgtagtcccagctacttgggaggctaaggcaggagaatcacttgaacccaggaggtggaggttgcagtgagccgagatcgcgccattgcattccagcctggcaacagagcaagactccatctcaaaaaataataataaatagaaaaaaactaaatggcacactaaaatgaaaaaaacaattgtgtttacaagtaattgatcacaactagttacagattgctttgttccttctccactctcattgcttcacttgacgagcctaaaaaaaagaaacagtgagctaggatcgcaccattggggtttcaccatgttgatgaggctggtctcgcactccagcctgggcaggaagagtgaaactccatctcagaaaaaaaaaaaaagtgaaaagaaaagaaaaatgtgagagcacaggcctacctgggcacgaatcccagcccctggctgacttcctgtgtcatcaaaggcaaatgacttcacctctcagggtcttggttccctcatctgtaagtgaaaataagaatagtggccgggtgcagtggctcatgcctgtaattccagcactttgggaggccgaggcgggcagatcatttgaggtcaagagtttgagaccagtctggccaacatgctgaaaccccatctctactaaaaatacaaaaattagccaggcatggtggcaatcgcctgtagtcccagctactcaggatgctgaggcaggagaattgcttgacccaggaggcagaggttgcagtgagccgaggttgtgccactgcaatccagcctgggcaacagagcaagactctgtctcaaaaaaaaaaaaaaaaaaaaaaaagaatggtagctcatgtctgtaattccagcactttgggaagccgaggtgggaggattgcttgagcctaggaggttgaggctgcagtgagccatgattgcaccactgcactctagcctggaaaagagagtaagaccctgtctcaaaaaacaaacaaagaaaagccagcctggccaacatagtgaaaccccatctctattaaaaatataaaaaattaatctggtgtggtggcacacgcctgtagtcctagctactcaggaggctgaggcaggagaattgcttgaacccaggaggcagaggttgtagtgagctgagattgtgccactgggttccagcctgggtgacagagcaagaccctgtctcaaaagaaagaaaaaaaaaaaaaaaaggccaggcagggtggttcacacctgtaatcccagcactttgggaggccgaggcaggtggatcacaaggtcagagttcgagaccagcctgaccaacatggtgaaaccccgtctctactaaaaatacaaaacttagccaggcatggtagtgggcgcctatagtcccagctactcgggaggctgaggcaggagaatgaattgaacctggtacgcgaaggttgcagtgagccaagatcgccccattgcactccagcttgggcgacagagcgagactccgcctcaaagaaaaaaaaagaaaaaaaaaaaaagccaacctggccaacatggtgaaactccatctctagtaaaaatacaaaaaattagccatgcgtcgtggtgggcacctgcagttccagctactcgggaggctgaggcaggagaattgcttgaacctgggaggcagaggttgcagtgagccgagatcacatcactgcactccagtctggacaacagagggagactctgtctctaaaaaaaaaaaaaaaaaatggtatttacgtcttaaggttgttgaaaggattaaatgagttaatgtgtaaagcacttagaacactgctgggatttaataggccctatttacgtggtaggtaggtattgctgttgttataaaaacattctaaatgtatacatcattgaacaattaaaaattttaatgcagtgggtacgtctcaagacataaatgatttcaacttcacattcttatatcaaaataatggcattataccaaaacaaccccccaggattttagtactttaaaacggtaagacaagcaggaatattgcaaactgggagagcaattgtgactgtctcatgtgggctggaagcagagctgtcactcagggactgcaggaaaggtggtggggacgatggggcaggggatcgctgcctccatgcacaggacactccctaaggcccagtacacaacaggttctcatttgatccttgatggatgaagttcaggctcatcccttttttttgtttgttttttgtttttttttttgagacggagcgtcattcttgttgcccaggctggagtgcaatagcgcaatctcagctcactgcaacctctacctcctgggttcaagagattctcctgcctcagcctcccaagtagttggaattacaggcatccaccaccaccccacctggctaattttttgtatttttagtaaagacggggtttcaccatgttggacagactagtctcgaactcctgacctcaggtgatccacctgcctcagcctcccagagtgctgggattacaggtgtgaaccaccatgcccggccttttttttttttttttttttagatggagtctcactctgttgcccaggctagaatgcagtggtgccatctcagctcaatgccacctctgcccccagggttcaagcaattcttgtgtctcagcctccccagtggctgagattataggcacccaccaccacgcctggctaatttttgtatttttagtacagatggggtttcaccatgttggtcaggctggtctccaactcctgacctcaggtgatccgcccacctcagcctcccaaagtattgggattacagacgtgagccaccgtgcccagcctaattttttttctctcttcagatttgccgggcttacctccttcatttgtttattgtgaattccctgaggatggccagagggacaggcactaccctgggcactgggaggtgagggtggacagagcaggcagggagagtggagtggaagcatccaaatcatcactgcctgtctgggtggcacaacctatacaaatctgactggactgtgtgtgtctctcctctgtgtcccccagggcccgtcacagctggagctgactctccaggcatccaagcaaaatggcacctggcccygagaggtgcttctggtcctcagtgtaaacagcagtgtcttcctgcatctccaggccctgggaatcccactgcacttggcctacgtgagtgtgttccctccaaccccaggctgaggctctggccatgggaggtccctactgtccatctctgtgggtcagggtctcccaccccagcggcccagccctgcttctccctttcatcttgacattattcaccagggtcctgcctggtgaagccaatggtctctaccagagagaacccagagggcaccaggactacagtaaagagtctagaccaagaggtgggagtcaggttgatgtgcagccctggccaactctgatcctctgcataggctcagtttgcctctctgtccagtgggacaactgaactcaatattttatatgataatcttttcattgtctttgaaaaagttacacgacatatatttgaaaatatttaaagacagaggaaaagggccaggagaaaacctaacgtgttaacagtggttatggctgggaagtgggattaggagagacatttagttggttcttcacactttgttgagtttgcaagagttgctctaaatggatttggcctattttggagaaaaaagtatttttaaaaaactcaagttttcaggtcagctgtggatttgggaaaaacaattaaaaacaaacaaccaaaagcctcaacttttaaaagtgttagctatatccaccagagagaggaggtcagggagctgggacccactgccagaggtcagggctggaggaggcagggtggcttgccagcactgcctcctccatgaggaatgtctgggaggtggcccccagatgtgagcagctgttgtttacaacagagaaagcagagggtaggaaggggagagcccgggggagagcaaagatagcaaaggggagagaggcatagaaagaaacatgcccactgcgggagggaggcaggcttgagcgaagttgggcgtgggggacaggggagaagcttccggactggtgacagggacagcacagagacagtcagacatgaccaagccagcatgccaaagtcctaggagggagggggccaaatccaaccaccagggccaagaggatttgactccttgcagcccatccctcggccgcccagaaggggaatcgaggtcccagagggggcgtggcctttaccatggatcctcccccttcccgatctgagtccgtgcagcycagggtgaggcaggaacatgaaacgcgcccgccagccggaaggtcgcagtagccgccggctctggcctcggccgcgccgccttcctcctggggccgcgctgcttcccgagcgggctccctggggccggtggccagaggggacaaagaggccaaggcgcggcctcggtggccgacccagtgccaggcgaccaacagacgtcgtgccctgctgtatccccattttacaggggctgactcaaggatcagatccctttcccaacccagctgtaaagccagtgtcccagccctttcccattccgcgggctgggttcctcacccaagatgcccatcactttgcccccttgttgaatccctacagagaaggtatctacttccttctagatgggccattctagggtgtcttgtctactgttgccatctggcagtcctcaatatctagcttgggccaggcgacctggcttatgtctgtaatcccaacactttggtaagccgaggcaggagggtctcctttttttttttttttttttttttttgagatggagtttcactcttgttgcccaggctggagtgcaatggccccatctcgcctcactgcaaccttcgccttctgggttcaagtaattctcctgcctcagcctcccgagtagctgggattacaggcacctgccaccacccccacctcattttttgtatttttagtagagacagtgtttcataccgtgttggctaggctggtctcgaactcctgacctcaggggatccacccgcctcggcctcccaaagtgctggtttacaggcgtgagccactgtgcctggccaggagggtctcttgaggccaggagttggagaccagcctgggcaacatagtgagaccctcgtctctaaaaaattataataaaaaatatttttaaatccaacccgaagcccttttgcccttctgctgctgctgtttcattcagctcaatgcccttggctttgragactgtacactaagagctcagtcagtggccccaacagcttcctctgaatccttcagctttccagagtcactcttccaggaagtcttccctgtctgctttcctcctcacccccaacccccatttcttctgaggcaatggcagggtaggcagtgagatgctgaagccacccagactccccatccctgtccaaccaggagatctgtctggctcctttgtttcttattaaataaaattctgtcttctattgtttcaaatgacttgatgcatgtctagtttctgaatggtaatatcccctagggcagggaccactgatatctgtctttaattcattaattcattcatccatccctttcttctttcttycctttctccctgtcttcccataggcggggagcacccatcacatgctgggtgtcagggtgacgctggcatgtcaggatcctgtgatgggcccagggcccagcacaaagtcagacaaatctctctcagtgcgtactacgtgtcaagcactgtgcaaggatgggcaaggtagacgttgccccctgtagaccctcacagtgtagggagatccagagcctcagggtatagggagagacagccgcaggatggcgtagatgtgggttgaatgagaacagctctggaggggtgggtgatgtttggacaggtggatgaacaaggtggtgtgttcatctggccccccaggtatgcaagggagaaggggctgatctgactgctagggggctccgggctgactgcagatccaccagccagcattctcagctccggcctctttctctcagccaatgggctgactccacaaattacttcctgacctcctacatgggatagagagggcacagggccaggaacagcgtgctgagcctccacatgtctccccagaattccagcctggwcaccttccaagagcccccgggggtcaacaccacagagctgccatccttccccaagacccagatccttgagtgsgcagctgagaggggccccatcacctctgctgmtgagctgaatgacccccagagcatcctcctcygactgggccaaggtcagtttccccagcaacctctctgggctcatgatactgctcaggaggaatctgagctcctctggcccacacctcaaacttgggcaccaagagtgcaggaggggacacgctgtgccacagttcacatgccacaagccagtgctgccttgggacagtgatggctcctccaccaaatatcagattgaagcatgtggaatatgccaggttctgacctaaaaccccagcattttcatacgatctattgtgcatctactatgtgccaaagccctatcatgctaggcacttggggacacactcaggccctgccttcctggagctgatactgtgatgagggaggtgacaataaacatgtacatgtacacagataaatctataatttcgggtcttgctgggtggtttcggggctgcagcctaacatgtgtcatgggctcatcccttatgttaacacacggaggcccggggacttgcacagggtcacttggcaggtgagtggtggaagggaagttcgaacctaggtcctctgacgcctctccccctctgcagcaccgtcctgcctgccccaccactatctttggctgtgggtgagggcggggctctgttaggtgcagggctgctgagggaagggactgaggtgcgcgtgtctctgcagcccaggggtcactgtccttctgcatgctggaagccagccaggacatgggccgcacgctcgagtrgcggccgcgtactccagccttggtccggggctgccacttggaaggcgtggccggccacaaggaggcgcacatcctgagggtcctgccgggccactcggccgggtatggctctcgccccgcccctgacactagtccccaccccgagagaccacccccctgacccccccccgccccctctccggtcccttataaagccccaccccagtcccagccccagccccgccgcagccctgtgagagcacagtcgctttctcctactctaggctacgccccctatgggccccttccctttgggcacaagcctggccccagtcccatccctatcccataaacccacacctggccaggtaagagtgcagccgccgcccacccgacgccaggcctcgctccccgcctggcctgtccgcttcagtgttccatccgcgtctgtctccccgcaggccccggacggtgacggtgaaggtggaactgagctgcgcacccggggatctcgatgccgtcctcatcctgcagggtcccccctacgtgtcctggctcatcgacgccaaccacaacatgcagatctgggtgagttgtgcgcagctcccgggacacaaaacccaaactcccaacctctggatcagggaagtttcctggaaaggtgaacccccgagctgagctgaaggacaaatcacctatgcccatacgtgagggaaggggccaggcagaagacgcagcaggagtggggacacagcaggaccgaggmctggcataaccctggctggcctgctgtggcacagactgtgtccatggccccctgttctgcctctctccccaccattagaccactggagaatastccttcaagatctttccagagaaaaacattcgtggcttcaagctcccagacasacctcaaggcctcctgggggaggcccggatgcycaatgccagcattgtggcatccttcgtggagctaccgctggccagcattgtctcacttcatgcctccagctgcggtgagcacccttcccctgcccctcccttcccttcccctcccttggatcagtggccacwctgttggtgaagcacctctgtgtgagcttgggcaaggtacatcagcctctctgagcctcatttttctcatctgcacatgggaacaatgggagtagcwaatcatagaagagcctgagaatcgcttgaacctgggagatggaggttgcagtgagccaagatcgtgccactgcactccagcccgggtaacagagcaaaactccgtctcaaaaaaaaaaaaaaaaaaaaaaaaagcctggtgcgggcacacagtgatcacacagtgaccagccgcctggcctgcctctgctaccccacaggtggtaggctgcagacctcacccgcaccgatccagacyactcctcccaaggacacttgwagcccggagytgctcatgtccttgatccagacaaagtrtgccgacsacgccatgaccctggtactaaagaaagagcttgttgcggtaagggaactcctgcccctctggctcaggatgacatggacatctggttcctcccctagcccaagactcttggggtcctagcccaggcaggggggcaagtcacgtccctctgcaagccttagttttcccacttgtataatggaattgataatggtacctaccacgtggtgagaattaaaggcagtctgacaggccaatcacgtggcacagtaagatgtggtacatagtaagtgcttagtaaataatgccagcactaggtagttgtcattattaatcctaaatgctccctgagctggctggtcacttagcagaatacctacacaggccaggcatggtggttcacgcctgtaatctcagcactttgggaggccaagatgggtggatcacttgaggtcaggagtttgagaccagcctggccaacatggtgaaaccctgtctttactaaaatacaaaaattagccagaggtgatgggacacacctgtagtcgcagctacttgggaggctgaggaacaagaatcgcttgaacccaggaggcagaggctgcagtgagccgagatcacaccactaaacttcagcctgggcaacagagtgagactctgtctcagaaaaaaaaaaaaaaaaaaaaaaaagccggtgcctgtaatcccagcactttgggaggccgaggcgggtggatcacaaggtcaggagatcgagaccatcctggctaacacagtgaaaccctgtccctactaaaaatacaaaaaattaaccgggtgtggtggcaggcgcctgtagtcccagctaatcgggaggctgaggcaggagaatggtgtgaacccgggaggcagagcttgcagtgagctgagatcgcaccactgtactccagcttgggtgacagagagagactccatctcaaagaaaaaaaaaaaagcctatacaatatgatcactgcctggttgacaaacaaatatatttgttataaaaataacacatggtgaatacaaaatattagccaggcatggtggtaggcgcctgtagtcccagctacttgggaggctgaggcaggagaatggcctgaacccgggaggcggagcttgcagtgagccaagatcatgccactgcactccagcctgggcaacagagcaagactcgtctcaaaataaaatgaaagaacacatgctggccaggcacagtggctcacacctgtaaccctagcactttggaggccgaggcaggcagattgccggagctcaagagtttgagaccagcctgggcaacacggtgaaaccctgtctctactaaaatagaaaaaattagccggacgtggtggtgcacgcctgtagtcccagctactcaggaggctgaggcaggagaatcgcttgaacccggtagagggagattgcagtgagctgagattgtgccactgcactccagcctgggcgacagagcgagactccatttcaaacaaacaaacaaaaaacatgctttaaaaaatatgtgaaaattagaaaatcttaaccttctgacacaaagacaatggctgccaacattttggtgtgcttctttctagagcgttttctctgtgtatttcttatattgatgtaatcataagagatgtgttcatttgtctcttactatttcacttaatgtatttttagagctttgacagctgtacctaatatcatgtttaataagcacatattattccatcatattgacatgctataattaactcctcttcccttgttacacatttaggttgttcccaattctgtagtattataaatatgcaaaaaatgtcattgtgcatgaaacatttctttatataggattattttctcaggatagatttccacattagtggaattactgggtcaaaatgaatgaagtttcaatacatgttgccaacccactttcccaaagatgatttgaattttcaccactgatttacgagaacacctcaacctcttcgctgtctccagactataattcaaaaaaagagaaacctttgccagtgtgggaagaggcacatggcgttccattcttgttttagttgtaattctctggttagtagtgagtgtgggcatggttccacgtgagtgatgagaacctcagtctccttatcattgaggcttggtatttttcttgatgatttttataagttttaataaagaaaaaaaggttgcccctttggccaccacttcccttgatttgctgtaattctttcaattttggctacagtggtttttcttttcttttctttttttttctttgagacagtcttgctctgtcacccaggctggagttcagtggtacaatctcggctcactgcaacctccacctcccgggttcaagtgattctcctgcctcagcctcctgagtagttgggaatacaggcgtgcaccaccacgcctggcttttttttttttttttttttttaagacagtctcacactattgcccgggctggagtacaatggcacaatctcggctcactgaaacctctgcctcccgggttcaagcaattctcctgcctcagcctcccgagtagctgggattacaggtgcccaccaccactcttggcttattttttgtatttttttttttttagcagagacggggtttcactatgttggtcaggctggtctcgaactcctgaccttgtgatccgcccacctcggcctcccaaagtgctgggattacaggtgtgaaatcaggcgcctggtccgcagcctagctacttttttgtatttttagtagagacagggtttcaccatattggccaggctggtctcgaacttccgacctcaggtcatctgcctacctcagcctcccaaagtgcggggattacaggcgtgagccactgcaactggccttctttttcttgttttagagacgaggtctcgctctgtcaccaaggctggagtgcaatgatgtgatctcggctcactgcagcctcctcctctcaggttcaagcgattcttgtgcctcagccttcccagtagctgggactatgggtgtctgccaccacacctggctaatttttataattttagtagagtcgggtttcactatgttggctaggcaggtctcgaacttctggcctcctgtgatctgcctgcctctgcctaccaaagtgctgggattacaggcgtgagccaccacgcccagcctgtgctagacttttatatgaccggcagtgcaataagtttgcttacaccagcatcaccacaaacactaggcaatagaaatttttcagcttcgttataattttatgggaccagggaccaccatcatatacacagtccatcaccgaccacaacattgtcccatggtgcatgacagtatttactatctggctctttataggaacacttcgcccacgccaggcctgagactggattatgcttgcagggtttgcatgcccytggggctgtgagtgatgattatatgtggaacttgaaggaatatatatatatatattttttttttttgagacggagtctcgctctgttgcccaggctggagtgcaatggtgcgatctcggctcactgcaaactccgcctcccgggctcacgccattttcctgcctcagcctcccgagtagctgggactacgggagcccgccaccacgcccggctaatttttttgtatttttagtagagacggggtttcatcatgttagccaggatggtctcgatctcctgacctcatgatccacctgcctcagcctcccaaagtgctgggattacaggcgtgagccaccgtacccggcctgaaggaatatttttaatagttctgtatttattttgatagatataagaaaatttggccaggcgcggtggctcacgcctgtaatccctgcaatgggaggccgaggcaggtggatcacctgaggtcaggagtttgagaccagcctggccaacatggtgaaaccctatctctactaaaaatacaaaaaagtagccgggcatggtggcacgtgcctgtaatcccagcaactcaggaggccaaggcaggagaatcgcttgaacccaggaggtggaggttgtagtgagccaagatcgagccactgcacctgggcaaaaagagtgagactccatctcaaaaaaaagaacttttaagtggtgtaggatgatgacatctaacaaaaatgaagagggagcagggcaggggaatggctgtgacttgggacccctgggttgtggtcagtccttggtgctggggtgtggcaggccacagagaccccagtgcctcctgatggtgcccctctcttccgacccagcatttgaagtgcaccatcacgggcctgaccttctgggaccccagctgtgaggcagaggacaggggtgacaagtttgtcttgcgcartgcttactccagctgtggcatgcaggtgtcagcaagtatgatcagcaatgaggtaagagctggggccaaaaaggtatcaggaccagcctggttggtgccccctcaggtgccctccctgatcccccagggtggaggtgtgtttgggagagcaggctgcaggggctcagaacacaagacaagcttggccattggttggcttagtctccccatctgcaaaaatgggcgtattgggtgggataccctctggggtcctttctggctctgaccagctccctggctttatccccgcaggcggtggtcaatatcctgtcgagctcatcaccacagcgggtgagatggacagtcacgtgctaacccacctggcccaggggctgctgctgggccggggcctcttcctggcctgggagggagcaggcctcgggaaactcctggcaagccatgtgtgtctggaatgcctcggtctccccttctgtatgaccggagcaggactgctgagggtgacgctctcggtctctcaagtcagagggcttagcacatactggctgtgtggccttgggcaagtcactttagttttctgggcccaaaggtggcctaagaaaggactctgcgccacagggtgcttctgggcagccaatgaggtgctgtgtggaagctcttcacacagcctggcagctggtgcctccttgataaatattagtttaaaaaaaaaaaaaagggccgggcgcagtggctcacgcctgtaatcgcagcactttgggaggccgaggcgggcagatcacgaggtgaagagattgagaccatcctggctaacatggtgaaaccccgtatctactaaaaatacaaaaaattagccgggcgtggtggcgggcacctgtaatcccagctacttgggaggctgaggtaggagaatggcatgaacccgggaggcggmgcttgcagtgagctgagatcgcaccactgcactccagcctgggcgacagagcgagactccgtctcaaaaaaaaaaaaaaagagagtcaggcaactccacagggccatgatgcctgttcctccccacacccctcgccctcctggctggcgccgccagattgaccaagtctccctcccgtcctcccccagaaaaaggtgcactgcctcaacatggacagcctctctttccagctgggcctctacctcagcccrcacttcctccaggcctccaacaccatcgagccggggcagyagagctttgtgcaggtacctggcatgcctgtcacccctcgggcctcccagctcctggaacttcctctccgcctttcttcccaccatgactccagaggagatgagactcccagagtcaggagggagacagcctgggtgcacgggagagggagagacagagaaggcattgctcagggacactgacaaggatgtggccctgtcctcctcctctgccccagacaggtccatgtctttctttccactgtgaggactcaggggtgggaactcttaattctagccgatatttgaaggcagcaggtggggtggggtgaagagcagctgcccatgccgcgtggccctacctacccatgcaggtcagagtgtccccatccgtctccgagttcctgctccagttagacagctgccacctggacttggggcctgagggaggcaccgtggaactcatccagggccgggcggccaagggcaactgtgtgagcctgctgtccccaagccccgagggtgacccgcgcttcagcttcctcctccacttctacacagtacccatacccaaaaccggcaccctcagctgcacggtagccctgcgtcccaagaccgggtctcaagaccaggtgagtggggcctgggccggccccagcttcaagtgggagcttccaggtctgtggtttgcaggaagggacatggcagcccacagggatgtggggccagctggtgaggggcggagccttaatcaggcatgtggcctggcagtctggctgccagcagcactttctgccacccgagagctttctggtgggactgctgtgtctggggcactggcagactatgcagctgccactgtccatctatccatccatccatcctttcacttacccgtccgtccatccatccatccaccctcccacccaggaatctarccacccgcacatccatgtagtatggtcaccagtgtaatctcaaagaacaggagacctgagggaagagaggcggacaaaggacacacactcctggctttctgtatttgccagtcacaacacttcaccatctggtgacccccactctcaggcaatctatcctggacgcccccagagtcacccccaggcccttgcacagacaggcctccaggattacaaacttctctggtcataggaagctagggaagccttcaactcccctaagtgggcctctccctccagccasagtgagcctgggactctgggctgacctggctcatagctccaaagtgttcacaagggtgagggatgcatagtgcttccacagtgctcctgggcatcaaggcctccaggaactcacaggaaacatttcagcagcagccagggatcgtccrctaggcaccctcccacagcacagatcttccaggactcacccagaggcatccagctacgaagcrgtggagatgggattcaaagccaaggctctagggtgggctggggtcacggagccagggagtaaacctggaagccgcctcccaaaggtgccacatactgctctctctttctcctccaggaagtccataggactgtcttcatgcgcttgaacatcatcagccctgacctgtctggtgagctccctccaggtctctcgggtttgttctagtggctgaggtcacagtagggcacagcgggcagccctgagaaacggcctgggcacatagcacatggcaagggggaccccagagaaagcggcccagaaggggcaggaggagggcttcccagagccatagcagcctagagcaggggccagagctgcactttgcagatggagagcccttgcccgggaccgccctgtggggtgggagtctaggcctctgcccccactcacggctccactccatccccacagttattggctgaccttgctgggaggatggagtctcctgggtgagacagaggccctttgagggtgggtgctggccttgccttccttgaggcctctccctgcaggacgccccctctagcctctccatcagttccccccaggcccaggcccacaccaggcagaagagtcccgacactggtggcagaggcaggggtgagggatgggggcacctacctctttgccaccccatccaggccaggatggagcctccactcccagcccaggaccaagaaggcagggctgataaccccatgacacagaatcggatgtcagaggctcaaggaaagactgcttggcccatagccacacaggagtcaggaatgtggagggaatgaggcttggagcaatccaagagcagagctgcagggcactcggagctgctctggcccattctctacctgctaaaggcctcagagaggggcagggttgacccaaggtcatgcagcaggtggggcaggctctgtactcccgagcctcagtttcctcacgttaccccatccatcctccctgaaaacgccatctccatcagccttgaggggcagaggcatgacccaaaaggcctggctgggccctctaggtggacagtcctagcaaccatggctcaatgccaggcctggctgtgatgagcccgtttgctgcaagaggagactgaggttcagagaagtcgagggtccatggctgagcagagctggcaccaaagcccacaygggccagcacaacagggtaggggatggggcaggggcagagtggcagtgctgatggcgtcggccctctctaggttgcacaagcaaaggcctcgtcctgcccgccgtgctgggcatcacctttggtgccttcctcatcggggccctgctcactgctgcactctggtacatctactcgcacacgcgtgagtaccccaggcccccacagtgagcatgccgggcccctccatccacccgggggagcccagtgaagcctctgagggattgaggggccctggccaggaccctgacctccgcccctgcccccgctcccgctcccaggttcccccagcaagcgggagcccgtggtggcggtggctgccccggcctcctcggagagcagcagcaccaaccacagcatcgggagcacccagagcaccccctgctccaycagcagcatggcatagccccggccccccgcgctcgcccagcaggagagactgagcagccgccagctgggagcactggtgtgaactcaccctgggagccagtcctccactcgacccagaatggagcctgctctccgcgcctacccttcccgcctccctctcagaggcctgctgccagtgcagccactggcttggaacaccttggggtccctccaccccacagaaccttcaacccagtgggtctgggatatggctgcccaggagacagaccacttgccacgctgttgtaaaaacccaagtccctgtcatttgaacctggatccagcactggtgaactgagctgggcaggaagggagaacttgaaacagattcaggccagcccagccaggccaacagcacctccccgctgggaagagaagagggcccagcccagagccacctggatctatccctgcggcctccacacctgaacttgcctaactaactggcaggggagacaggagcctagcggagcccagcctgggagcccagagggtggcaagaacagtgggcgttgggagcctagctcctgccacatggagccccctctgccggtcgggcagccagcagagggggagtagccaagctgcttgtcctgggcctgcccctgtgtattcacyaccaataaatcagaccatgaaaccagtgatgggttgggctgggagaagggcagtgacattcaaagccagggtggggtgagggcacaggacagggctgcttttgtagttggcccccactgggctggcctggtggcaggggtggcatcctgaacagtagcagcatccagggcacagcaggttttcattcagccagttcccctctgccattcacccactcgacagcacaccccagggtctaggctgcaagaaagcaaacaccaggaggccccatccacactctcactctggggttccgaacacaggccctcgactgctctaagttcaaatcctggacctgccaccttgttggcctgtgactgtaggcaggtcccatggcttttttttttttgagatggagtcttgctctgtcgcccaggctggagtacagtggcactatctatctatctcagctcactgcaacctctgcctcccaggttcaagcaattgtcctgcctcagcctcccgagtagctgggactacaggcatgcgccaccacgtccagctaacaatttttgtatttttagcagagacggggtttcaccatgttggccagatggtctcgacctcttgacctcatgatccgcccgcctcagcctcccaaagtgctgggattacaggcgtgagccaccgtgcccggcctccatggcttcttgaaaccagccacagttccctcgtctgtcaaatgggtataattctccatcacaaggtctctgcaagggggtctgcagaaagcactgcctggcatatggtgaacaggcttcagtctggtcttcttctcatctcacagacaggccacctgaggcgcacagggagggagggacttgttccaggccacacagccaggctccctctacacagtgcaggtccctgaccaccagcagcccctccctccgtctctgctgagggagcagggggtcaagggtcagtcgaaggctttgccatttctttaaaaaacaaaggctttaattcactccagccaccctctgtcccgcagtgtcccaggcagaggccctctcccttcccagaaggcactgggaggaggaaatctaccacccagcacatggcaagacccagggcctggccaggcagcgcacacaataagctgggcctgagccaggaggcaggcggggtgttgggggagacaggctgaacggccaggccactgcaacagtgagagacccggggagcccctctgctatctcagccaagaggaaggagagaccaaggcacagagccttaaaaaagacatcctctcccggcctcccatcccaaagccctggcccctaggccagtctagacagaaccaggaaagccaaaaacaaaaggcacctagtatgtaagttcatggggagaacgcaggcaggtgtgggaagctcccacctccaaccccgggccttggctactgggacagtgcgggctccagcagcttcaggacaccacccaccaggtgcaggctgccagtgactagcacatggatggcagcagcctcacggagtatgctggccccactgtgagccacagggtgggtgaggaggccctttgggggactaggtggctggaagatggggtctcggccttggctgatccattgcaaggcatgtgaaatgcagctgaagacgagggagctggcactgcaggtgtggggtgggtggggcgccagaagcagggatgcggacccaccgggctctgggctgggggcactccagaggtccgggctggcctgctcttcgtccaggtggttccagtgctgctggtgttccaggcagcggagcaggacctggtccagtgtcactgtgaagttctgttggtctgtggggcacagagaaaggcctatcagcgaaggggagagggagtaagggacaggggtggagaaaggggcgggtgcaccgtgagcacctgcttcgcaccaagccttttacgtcatcaggccagcagtctcggctagtggccttctccatgcacacagtgaagaaactgaggctcaggcaggttcagtgacttcaccaaggtcacgagaggcagagccagacagtctgactccaaagcttttgcccactaggcaccccttccccactctggcctcattgtctccatctataaaatgtacatccagctggggaccatcaccaggtgagcatagttatttctggggatgctggttaaaaacgcagattccaggctgggtgcagtggctcacacttgtaatcccagcactttgggaggccgaggcgggcggatcacctgaggtcaagagttcaagatcagcctggccaacatggtgaaaccccgtctctgaaaaaaaaaacacacacacaaaaattagctggacaaaaattagccaggtgtggtggcacacgcctataatcccagctatacttggaaggctgaggcaagagtatcacttgaacccgggaggtggagattgcagtgagctgagatcaagccattgcactccagcctgggcgacagagcaagactccatcttataaacaaacaaaaaacaaaaattagccgggtgtagtggcgtgcacctgtagtcccggctactcacgaggctgaggcaggagaatcatttgaacctgggaggcagaagttgcaatgagccgagatggcaccactgcactccagcctgggcagcctgagtgacagaacgagactgtctcaagaaaaaaaaaaaaaaaatgcagattccagaactctccccaaccagactgatgtgaggactggagattttttatttttagagagggtccagggtcttgctctgtcacccaggctggagtgcagtgatgcaatcacgacttcatgactcactgcagcctccaccttccaggctcaagcgatccttccacttcagcctcctgagtagctaggaccacgggtgtacaccaccacacctggctaattcttctatttttttttatagagatgaggtctggcttttaactcctgagctcaaacgatcctcctgccaaagtgctgggattataggtgtgagccaccaagtccagcctgggatctgtaatttttacactatttcaaactttttttaacatgatacatggtaaaaaacacattttacactgcaactcagtactcacatacttatacatatgcctggaacagactaatcttcaccaaacaggacctacccttactctgtgcaacgtacactggtattttctattctactctatttcatataaaataaaaaatgctggctgggcgtggtggctcacaactgtaatcccagcactttgggaggctgaggtgggtggatcatttgaggccaggagtttgacaccagcctggccaacatggagaaaccctgtctctactaaaaatataaaacttagctgggcatgttggcacacgcctgtaatcccagctattccagaggctgagacatgagaatcatttgaacctaggaggcagaggttgcagtgagctgagattgtgccactatattccagcctgggggacagagtgagactctgtctcaaaaattaattttttttttttttttgagacagtctcgctctgtcgcccagacctagagtgcagtggcgcgatctcggctcactgccagctccgcctcccgagttcacgccattctcctgcctcagcctcctgagtagctgagactacaggcacccaccactacgcctggctaattttttgtattttttttttgtagagacggggtttcaccatgttagccaggatggtctcaatctcctgacctcgtgatctgcctgccttggcctcccaaagtgctgggattacaggcgtgagccaccgtggccagccaaaaattttttaaaataaaattaaataaagtatactttggtgtataaaagagtataagtacactaaagtgttcttacacagtaaaacaaatttatttcctaccccaaacctccagtttggaagcccccactgtctacctcagggacccctgctcatccccaggggccatgcctgtcacctctcacctgcgttgcctgtggatgacacctctgtcaggttagggcagaagacggcatagtcaaactggcagggctagaaggccaagggaaagacttggtgtcagacccccgaaaggatgtccaccaacttccatatggccccctgcgcccacatctctggagatgcagcctccctgacaactagaatgatgctgtataaacctagccaaggtacttcagcaccctgcccccatctgcctcagtataccctgcctggcctgtggcctgagcagcgaagccccaacctactgtacagacaggggaacagtggccacagggcaaggggacttgctgaaggtcactcagatagtgagggggccccaaatccaggctggaaaaaggctgtgggtaaatgggagaggttctggatacagcctcagcctcctggtctgtgaaatgggagatgatacctaggggccacttcagccctgacagcttgggcagcctcagtttccccaagcagagaaaggcccaatgactccttcaaccaaacctgagaagcgggtgcccctagcagcaaccccattttacggagaggcaaactgaggctcggggaaatgccgcttctcgtccagggtgatatgctagtgcctaaaggggcatgacaagcgagtccagagtctacacctttagccacgatctggccctcctcttaagcctggacttgagtctagacacgcgggaatatgagtaatgacctatgactggcctccccacggccctgcagcacctggcagaaccagcacaggcaccttgtcacatctaatcctcaatacaactcaagggggaggggattggcaccccccagggtcacaccgccagacccagggcttcaggactgcctgccgcccacccccaagttggcccctcacctgcagcagcttcagcagggccgccgggtcccggtccccggtagcattgaagagcaagactcgaacctcggggccactgcgacagaggtgaggagctgggtcaaagggcgccgcccgttctccctgcggtaccaatcccgtccccgcccacgaccccgcccctccccatgggcccgcccccgcccttccccacgaccccgccccgcccttccccaagatcccgcccctcctcgtgggccagccccggccccacccccagccccgcccctcacccgctcggcctctcgcggccctgcagcgcctggcggaaccagcgcacgcaggcctgcgcgctgctggcggtgtgcgcaccgtccaggtaccaggtgaggggcccgcgccgcagcacctgcgtccggcccggccactccgtgttccgaagccctgggggagggcagcaaggcagtcctccaggccctctcccacccccgtcctcaattccgcacacacactcctgagcccgttctcccctgcaggctgcgcccgccctcaacactcaggaccccggcagcccaggaactttttactagcaccagtcaatggcttgggcttttcggctgtctcatctggtggaatctttcaggcaaccctgaaagggcctgctattcccgtttgacagcctgagagcccttagctggggccgggatgtgatgcgaggtcggtttgtctccaggaccttgtcacttgcccttgataacaggcgtggcacacagcgggcccaccatttgctgaaggggcttaacagcatgagcacctgctgggtgctgaaagctttgggggaggcaagaagcagatgactggatcaccatcctccagaacctcagggtctgatgatgatgatagtgacagtgacagcagctaccactggctggcactttatcccacattggccaggctctgcactcagcaccttagtgatgtcacctcagcgaatccccaccacagcccgtggcagtggctcctatcatcatctactttggcagatgagaagacaggctcagaaagagttcatgagctcaaggtcagggaggtttgctgacatcagag

SEQ ID NO: 96851 - DNA, 19643 bp, Homo sapiens
tgcactccagcctggcgaaagagggagaccctatctcaaaaaaaaaaaaaaaaaagcagaggcagacactggacagactgacaaccaagtgtcctaactccctggctggtgtcccctagcggaagatagaaagtaggtccgcggcttctgtcccaggatggggttgcagtgtgacttgggttagctgccaaggctatgctgcttcctggccaggcctgctcccgacttgctgtgtgatctcgcacaagacactttgcctctctgggccacagtttcctcatctgttaaatagagccacagcagctccccctccatggggttgttgggagggtgagagaagcaaacactggtccaagccagcacaccgtgggcctccgcgagccctggctgtggttgctgagagatggacacagataaggggcagattggcacaggacagggaatcctgacagggacaggcaggcacaaggcacaagacctgggaatctcagccacagagatgctgtgttgctgcggcagaggcgcctcgtcagtgctggggcctgtctgctcttggcccgggcgccagggcagtttctggcacccctaggagaatgaatagggctcagtgtggtggctccgctgagctcagagccccctttgtgctgcctggagtggccgttaggagtgcgaccgaggacctgccggtgggtggctgtcctgcaggagctcttcagcttgcactggagggcaggtcagcccagcccatggtcccctgtcctgaacacccccgagtgctttcctgcctccaggccttcgctcaggctggcctcacaccactgggaatgcagctctgccctccccgcctcaggcttttacctcctttggatccctacaggttggcttgaggctacagtgccccagaatccctgaacttttttctttttcttttcttttttttttttttttgagacagagtcttaaaaaaacttacgacagagacttaaaaaaaaaaaacaaaacttgtcacccagggtagagttcagtggcgcaatcttagtactgcaacctccgcctcctgagtttaagcaattctcctgcctcagcctcctgactagctgagattacaggcgtgccccaccacgcccggctaatttatttatttattttttagtagagacggggtttcactatgttgctcaggctggtctcgaactcctgacctcaggtgatcctccagcctcagcctcccaaagtgctgggattacaggcgtaagccaccacgcccagccccctgctctcacttctgtcccctatccttgcccctcttcctcagtctgtgactcaagcagggatagtgttggggggcctatggagaggagggagaagacaggctcacagacagggcagagttggagaccttaaacttcatcgtcaaaggcatcaggcccacgcaatcctgggttcaatccccacctccatgaccttgggcaagtcatgtcacctctctgagcctcttttttttttccccatcagtaaaataggataaatataacatcccttacatgatctcatggcagcaaaataaaatatttataccaagagtatcattttgatttaatccccttgtgtctttatttgcatgttccgaacagacctgaagccttctgagagaggccggggccttacccatccacactagcccccttccatatgaggactggatcatgggtgctcaacagatgcttctccctcagttgacctgacattggggacagtgtgggatgatggcaaatgaccctgggctttgagagtaaagaaacctggctttaaatcccagcttcatagcttcctggctgtgtagcctggggcaggccacaccaatctgggcctcaatttcccctttcgtaacttgggtctaataataacaacctcctaatagggctgctggagagtttcagggagacaatgcaagtcaaccccaggccaggcactgagtcagttcctggctagtgtgggcagaacttctgtgattaattgattgattggagacagagtttcgctcttgttgcccaggctgggtgcagtctccagatctcagctcaccgcaacctgctcagactctgcaatcactcccggactcaagtgagtcttctgcctcaggcctcctgagtagctgggattacaggcgccaccacgtctggttaattttctgtatttttattagagacggggtttcatcatgttggccaggttggtctcgaactcctgacctcaggtgatccacctgcctcagcctcccaaagtgcagggattacaggcatgagtcaccgcacccggccaattattattattattactattactattattattattattgagatggagtctcattcttgcccagactggagtgcagtggcacaatcctggctcactgcaacctccacctcccaggttccagtgattctcctgactcagcctcccaagtagctgggattacagatgcacgccatcacacccagctaattttcctacttttagtagagacggggtttcgccatgttggccagactggtctcgaactcctgacctcaggtgattcacctgcctcctcctccaaaagtggggattacaggtatgagccactgcaaacaggcaacttttgtgattttagagggttgtgggtatcacaggctgttctccgtcctgtacccctgctatccagttgacccactgtctcttcagatgcaccaaaagccaagagcagcccattccatgaacccatcttctccttccctcctatgcttcccgtctgtctctgctcagaggaaaacagggggtccaggctggggtcagacagctgtccagcgcctccctttcctgtgctgccctcaccttctctgttaaatggcagcaggaccagcggctctcttggggcagacatctaccaaggactggccacatgcccagccttgccagcttagccgacccctgggaagcaggaaacgtttccagtcaatgagaaatcactcatttcttcttatttctgcctgggttttgccagcttggtgatctggggccccggacctgggcagcctgggtagctttctgacaggcttccggcctttcctgcctctcttgcctgcctgcatcccacagtggggactgaggccctgaggccccaaggggaagtggcgggcggatgctggggttcagacgagggatggcggggtgtaggtgacaactccaccggaacttctgctagggcctttgcccacaggatgtgacttagggagggctcatgggaaacggcaggccctggcttgagatgtagtcggataatggaggccacacaagcccaccgcagatccccgcccaccgcactactgctcagaccccagcaatgccgtggctccacccctaggccagatgggcagggccccgagatggggaagtgctggggtttgtgccagactgacctggttcaaataccagtatggtcactgaccagctgtttgacccaggccaagtgatgtcacctcgggatcctgatgtgtacaatggaggtgacaacagtacccatgtggttgagtggcaaccgagataattcccataaagtgccaagtgtagggcttggaccatttattttccgtcaataagttgtcattactaaaatttttatggtctcactccttatcctccccacctccaatttagggaacagcctcctgcttctaatagtgtaagccatgaagccgaccctacgtcactaactgcctaaacccctctcttgcttcacgttactctcaggagagggctccttcctcctcagcctgaccttccagcccctccctggtagtgcccttccccagaacaagacctcttgtgacatcaaggtcaccaaagccattcctgcctcctcctaggaggctttgaggctaagcagtgtggggtgagagctgggagccaccccgagggcttttttttgagacggaatctctctctgtcaccaggctggagtgcagtggcaagacctcggctcactgcaacctccacctcctgggttcaagcaattctcctgcctcagcctcccaagtagctgggactacaggcgcccaataccacgcctggctaatttttgtctttttagtagagacggggtttcaacatattggccaggctggctccaactcctgaccttgtgatccgcctgccttggtctcccaaagtgctgggattacaggcgtgagccaccgcgcccactccaatggcttcttgcaggaagagagggtaacgagagtctgggggagtgtaggatcaggggagcaccgccctgaacgcagaaaggcttggggagacagtagagagatttgcatggccacagcttgaggggtggggtgtgaactggaaagagcctccaatgtcacattcaggttcttcggggacagagaggccagactggggggctaggtctcaggatccacccgcagagggctggagaggagggggcagattgaagcggggcagaggaggcagaaaagacggctttgctggaggctgtccttgggcagagctggagggggaatctgggggccgctggagccaggaagatgcgagggaagggatgggcgcgatgggggagggagatggggggggtgaacggtgagctcgcgcctgcataaggacagcaggcctccccactgctatcctcctggcccaacagcgaatagcgtgagtcaagagaatcccctcactcagacacccaggttcgggtcccaactttgtcgccgtgtgaccttgggcaaatgacctcacctctgagcctcaacgtcttcttctgcaaaatgggttagtgatcctgactatggggctgttgattcaggattcggcgggaacgcccagcacttcctgagtacacaagagtgctgagaaaatggtagctgttttttgcgattactgactcggggcccgaccagctctggcacgactcagcggaggtgggagtcctgcgggtcccatccctgcctcccggagagccagaccccagcgatagaaggcccgggcgttgcttgctcgtcgccgctagtgccgccgcgccccctggcggccgtcggttgccatgtcaacggagggtggcggggaccgggggaggcggaggcgggggccgttctctcctcccagggccggaggacgctccctccgcgcctcccgccttcgcctctgtgggggcactccgagccggggaggaaggggctttccgctgcagccgacatgtgggggtaaactgaggcacgcggcagggcgcccgcagccaggtgccgagcgcggggccccacctccgaaggcggaggaggggccgcgggcggtgacgcgccgagggcggccggcggacagcgagcgggcgggcggtggcggcggcggcaggtgcggccgcggagggtgggagggaggagggccggggccgggcgaaggaggaggggagggcgaggccgggcacctccccctttataacgcgccccctcctgggctctcgggccgtctcctagtcggctcttcccgtctcgccccctcgcccggccgccccgggcccgggtccggccagggagctcccaggccgcggctcgggggctgaccccccgcccgccgccccgcgcagcccggcggaggcggcgccgtcggaggaggaggagcagggcactgcggctggccccggatcgggcgccagagcggcagcagcttcggcagcagcggcggcccgggcccatgcagcgggacgcgccaccccgagccccagctccggcgccccggctccccgcgcccccgatcggggccgccgctagtagtggcggcggcggaggcgggggcagcggcggcggcggcggaggcgcctctgcagctccggctccccctggcctctcgggaactacaagtcccagggggcctggcggtgggcggcgggcggaagaggcggggtcggcgccgcgaggccggaagtggccgtggaggcggaagtggcgcggccgcggaggggcctggagtgcggcggcggcgggacccggagcaggagcggcggcagcagcgactgggggcggcggcggcgcgttggaggcggccatggcaaagcagtacgactcggtggagtgccctttttgtgatgaagtttccaaatacgagaagctcgccaagatcggccaaggcaccttcgggtaaggctgggcccctcggggccgggagccctgggcctgcacccctagggccgacgtcgggatgcccgggccccccccgagttggtagagaagtcgtctgtccccgggcttgcctgctggtctctaggccgcgccgcaccccgccccggcctgacggagccggctggtggggaggagcctgaggcccgtggtgggggcggggaggggctgcagagaggcgcccgtgaggggagcgggatctctccaagggacgcccaagtgaggagaagggactgagggaaggaagcagaggctccgaacgagacaggctgccgggtggcggggtagccgcgtgcmctgggtacctagcccagccccgcccgggaatctctttgctgctgcccctcctcctgtagtgggggaggggcgggccctgcggaaatggcctgatgagttctcgggtctccctttccgcctgcagggaggtgttcaaggccaggcaccgcaagaccggccagaaggtggctctgaagaaggtgctgatggaaaacgagaaggagggggtgagtacggatcgggcgtgcgggccggccggctaactgcccgggaccccgggtcggttttccaccctgctgcttctgggagtctcaggttgagatttaatttttttgtagtagttcagaaatttccagggaatgtggcttccaccctaaaactaaatgtttcattcttaggcagttatgggtgaggccaggagggggagttgatgcatgcatcgtgtgcactttatttcacgaagttaggaagcctttaaacacctttttttagtgttaaatttcgcttaatgtaaaagaaagattatatatgcatgctttttgaaaggtgtctgatactcaattatttaatgtatttaaaaggagcggtcccttctccaccccatcttagctctagtacaacttcccataaaccttcttttgcgtaatgtgcattagcaaggacatttttaaatcatcatgtttgttgccaacgaaacagccatagagctgaaatttgaagactgaaaccgccgagcrtttagtggctaatagcaaagtattgctgtttcagtttgttgtctcaaaccatcatcttgaagtgtgcatgctactaatatccattttatagacaaggcttctgagacagctggtttcagagcccatgatcttgctctgtctcccaacttggctgtcagtacagaccccagggctgggctctgtactgcgctyactcttgaccactttcccctctttctcacccagttccccattacagcmttgcgggagatcaagatccttcagcttctaaaacacgagaatgtggtcaacttgattgagatttgtcgaaccaaaggtaagttatttggttcttacgagaagatgacacttgtagcctaaggttttgtttgtaaacttggaactaggcacacctaaactgcctcttcttaactcagatggacccatggtgactgctttttctggtcctctttcatcgtagctggtgcttcctyggggcctgccctggcccagaagaggcactcagaaaatatttgaccggtgaaggaaggaacagacagatgctctggagggcatgggtgccygtgggttggagcaggaagaaagaagctggttgtgggaaagtgtgttgggtgtggttttcttgastttttcttctttctattcctgcctcagcttccccctataaccgctgcaagggtagtatatacctggtgttcgacttctgcgagcatgaccttgctgggctgttgagcaatgttttggtcaagttcacgctgtctgagatcaagagggtgatgcagatgctgcttaacggcctctactacatccacagaaacaaggtgggggccagagctgggaggaggacccaggcttgggctggtcttggctcccactcccgggtggatgtcactaaaggacccactcttgcccttcytgcagatcctgcatagggacatgaaggctgctaatgtgcttatcactcgtgatggggtcctgaagctggcagactttgggctggcccgggccttcagcctggccaagaacagccagcccaaccgctacaccaaccgtgtggtgacactctggtaccggcccccggagctgttgctcggtgaggactcccgagcgggccaaggggggtgagggccaggcatctacctggccccttccccccaactgccagggcttcttgagctgccggccctggggcattgagcctcaggaggccctcgggctcaaggggccctcctggtgcgctcttcttcccaggggagcgggactacggcccccccattgacctgtggggtgctgggtgcatcatggcagagatgtggacccgcagccccatcatgcagggyaacacggagcagcaccaactcgccctcatcagtcagctctgcggctccatcacccctgaggtacggggccccggtccccacggggtgcagagatcgaggtcccccggcagaggaggagtggggagtagaatggaaggagygctcctctctggaagggaggctggtttggtgacagggcctgtcttggggtggggagtgtgtgggagaaaaaaacacctgacacaggctgtgcgccagtctcrgttccatcagctgttctgtggccttgggcagaacatctgagtcagcgctgggtttctcttctgtgaaccagaaatgtgacgtgtatcagggttggagcccatattccaggtgatgtgggtggaaggacctggcacgtggtatgtgccaatccatagcgggcactgcttctgggaggggtcgagtagcagtctgggagcctccgagtggagcaggtattttagtccttttaggcctttatgaagggataagccacgcacctcctgaccggactscatattctctcaacgccccctccctcccaggtgtggccaaacgtggacaactatgagctgtacgaaaagctggagctggtcaagggccagaagcggaaggtgaaggacaggctgaaggcctatgtgcgtgacccatacgcactggacctcatcgacaagctgctggtgctggaccctgcccagcgcatcgacagcgatgacgccctcaaccacgacttcttctggtccgaccccatgccctccgacctcaagggcatgctctccacccacctgacgtccatgttygagtacttggcaccaccgcgccggaagggcagccagatcacccagcagtccaccaaccagagtcgcaatcccgccaccaccaaccagacggagtttgagcgcgtcttctgagggccgrcgcttgccactagggctcttgtgttttttttcttctgctatgtgacttgcatcgtggagacagggcatttgagtttatatctctcatgcatattttatttaatccccaccctgggctctgggagcagcccgctgagtggactggagtggagcattggctgagagaccaggagggcactggagctgtcttgtccttgctggttttctggatggttcccaragggtttccatggggtaggaggatgggctcgcccaccagtgactttttytaagagctcccggcgtggtggaaraggggacaggtccctcacccacccacaatcctattctcgggctgagaaccctgcgtgrggacagggctcgcctcaggaatgggctgtttttggcctaaccctcagaaacactggggctggcacaaactcttggtttcttcaacaggagaattttactgtgtttcttttggttccattgtttggagacattcctgggcacagtttggtccgttagaattaaaagttgaattttttttttttttwaatttttttttttcctccaggacttgtgtgttttgttctgcgcacacaccgccaactgttcccccacagtcagcagcaggttgggcctgaccattgggacttgattgtcaagtcactggaggtcttgacttttttatctcagttcatgttctcttccataattggaaaggacctttgtctgtttttcctcttgggtgccttccagaacgcatctcatgtccctggtgagggaattggtgagggcctgctgtgagctgctgtggctgcgatggtcacccagctgggcaaatcactggagtgacaatttgacctgtcacctgagaaggatggtccctcagactgctgggtagagggcctggggcaggctggagagagaaagtgggcagagggtgaagggatcacaggggtcttggaaggtggcagtagtttggacgggggtggggagtatgtgggagaaaaaaacagactgaaggtagaatccttgggaacctttgaggagcggcacattctggcaggcacgttttctgtgagcctgaagttaggaagagacrttctggaggtcaatttcctacatcctcttacaggcggagaccttgaagtggggccaggaaggaaggttggcaaaacctttgaccagaactgtccttcatttacagaaactgacccagaccacaacacaaaaggccagtaaaagtaagaaaaaaaaattttttttttttttttggagacggagtctcactctgytgcccaggctgaagtgcagtggtgagatctcggctcactgcgacttctgcctcccgggttcaagtgattctcctgtctcagcctcctgagtagctgggattaccacccaccaccacacccagctaattgtatgtttagtaaagatggggtttcgcagtcttggccaggctagtctcgaactcctgacctcgggtgatccacccacctcagcctcccaaagtgctgggattacaggtgtgagccactgtgtccagccaaggaaaaaattcttgattggtgtatttgttttcctgagacttctataactaattgctacaagcatgctagyttaaattaacagatttattctgttggttcccaaagtcattggtggcagggttggttccttctggaggatctgagggagagagaatccttcccgtgactcctggtggctgctggcagtccttgcatcccttaggcttgtagagtcgtcactccggtctctgcctgtgttcacatggcattcttcactctgtctcttttttttttgagatggagtttcactcttgttgaccaagctggagtgcaatggcatgatcttggctcactgcaacctccgcttcctgggttcaagtgattcacctgcctcagcctccctagtaggtgagattacaggcgcctgccaccacgcctggctaatttttgtatttttagtagagacggggtttcaccatgttggccaggctggtctcgagctcctgacctcaggtgatccacctgcctcggcctcccaaagtgctgggattacaggcatgagccaccacgcccggcctatgtgtctgtcttgtatggacaccagtctggatttaggggccaccctaacccagtttgacctcatcttaaccgattacatctgcaaagaccctctttccaaataaggtcacattctgaggtttggagaggacatgaattcggggggcacacttcaacccagtataagtagtcaaataaatccaaattggccaggcgcagcggctcacacctataatcccagcacttcgggaggccaaggcgggcggatcacgaggtcaggagtcggaggttgcagtgagccaagattgagccactactccagcctgggtgacaacagcaagactctgtctcawaaaaaaaaaaaaaaaaattagctgggcatggtggtgcacgcctgtagtcccaggtacatgcctgtagtcccagctgctcaggaggctgaggcaggagaatcacttgaactagggaggcggaggttgcagtgagctgagatcgtgccactgcactccagcctggtgacagygagactcccgtctcaaaaaaaaaaaaaaaaaaatccaggctgggtgtggtggctcaggcctgtaatcccaacactgggaggccaaggtgggtggatcacctgaggacaggagttcgagaccagcctggccaatatggtgaaactccatctctactaaaaaaaattagccgggtatggtggcgcatgcctgtaatcccagctacttgagaggcagaggtgggagaatcgcttgaacccaggaggcaagagattgcagtaagctgagatgacaccactgcatgccagcctgggcgacagagcgagacttatcaaaaaaaaaaaaaaaatcgaaattaaagctgttgtgtgctgtcctgacagcagtcactaggaattgagtgtggataaactcacagggctggcctaattgtattttctttgaaggataaaaagcttctctaaaaggttcatattctttgactcagcaattccacttacaggaattttttaagagcaattacacaatgatagtctttatctcattgaacactcactgcaatttcgatggtctcattcgttcattgagcatatwtattaggtgtgtcttccaagggtcatcccattcgggacttaatacagctggaaacagtggtggcccgcccccaccccagtggagctcaccttccagtaggtctaaactggtttgattgagttccatggaaaacaacaaagtggggtaaggggaaaagtagtggggagctgagggggtcagcatgacatggaagcagaaatcaagagacaaggctttgtggggtgygggtgtgggtccaagtgccaagggccagggagctttgtagagtgtgtggttatgtttctcrgtgtttcctcatagttggttaactaatacatttgttcatgcaattaagccatcttttcattttctaacatttttaaaaatacatatattttttagagatgggggtctcgctttgttgcctaggctggtctccagctcctcagctcaagggatcctcctgccttggcctcccaaagtgctgggattataggtgtgagccaccaggcccagccaattaagctgcattttaaaacaaccaagacagaccttaaaccttggagctgctgacccaagctcatcctcacccctcttccccagagtctaccccagggaggaacagggactggccagtcaggtgagggttctctagctttggcctcaagctctggtgtgacatgggtgctgttttcacctgtggagggaggtatgtcgcctggaataaaggctcgccagagggcagggycttgtggggmttttaccatgttctcagcacctagatagtgcctggcacacatgagtctctgggatacagtggagtgagtgcagtgaacagatggctgaggaggctgtgtagatgggaaaggccttcgccagctcgcggggatgagctcaggccgggggactgagttctgtgtcctggctttgtttgttttttaagagcctggagtcacatcctgccctttttttttttttaaaggaaaaatggtggttttattcatttgtacttaaaccagccaaagtagtactgatgtgattatgattcagcaaatacaagatctctttccacaaatattagcataacaatcaaaatagggactatagtaaaacagccaaaaagggctgagggaatcaagtatgttacagtttaactccacctcagtataatttttattttattatttttttttaagacagagtctggctctgtcgcccaggctggattgcagtggcgtgatctcggctcactacaacctcctcctcctggggtcaagtgattttcctgcctcagcctcccgaatagttgggattacaggtgcctgccacccactcctggctacctggcttctttttgcccaagtgatttggtgaaacaaagcctcttcctccagcggacttggactcttaagtcaggggtgtcgtgtgtccacgctgtactttgtatacgcctctccctggccaggatctcaccctggcagggcaagggcaaaacgggccctaactgtaaggtgggtgggctgggataaggaggcctggaagaggccagataaagccagccccaaggtctggaagcctcccaagcatagccccctcccctcccacccacctgcctgtctgcgtgcttacctttaacctccacccagttgttacttaactcgcggtaaggttctgaccagtcccatgctccactccagaaacccgccagggaggctaagtccctgggctgaccctaggatgagggcaggaacctatcaggtaaaacctttctccctgcacactggaaaggccagaacttctgcccccagtcctgtcaggggaggggaggccttggcgtctcccaaatcacgttttctgggtcaacaagcctcacagctctagttaaatcctgggcagagctggcttggcagagatgcccacacctgtgcgtcacttcgtgccctacccagaaggggagcaggaaaccaagggatgaaaggtgctgggtccctggctgcctccttgcccatggctgagaagttctggtgggaaggaaccatggagggcccatctggatatccttcctcagctaaaactgcctccttccaggtaggagaacccggtgaccaggcaggtggcctttcctgtctaagcctcagtttcttgggggcgatgctgccagcccctcacagggctcagcgcagcacccagcatgcttggagggtgagaacaaattgaaaaaaaatcccacatttttttcctctgaaaattttggtaagacggccaggtgcggtggctcatgcctgtaatcccagctcttggggatgccaaggctggtggattatgaggtcaggagttcgagaccagcctggctaagatgacgaagccccgtctctactaaaaatacaaaaattagccgggcgtgatggtgggcacctgtagtcccagttaattgggaggctgaggcaggagaatcacttgaacccgggaggcagaggttgcggtgagccggtatcacaccactgcactccagcctgggcaacagagcgagactccgtctcaaaaaaaaaaaaaaaaagaaaaacaaccgggcatgatggcacatgtctgtaatcccaaccactctagaggctgaggcaggagaatctcttgaacccgggatgtggaggttgcagtgagccgagatcaggtccctgcactccagcctgggcaacagagtgagactctgtctcaaaaacaaacaaaaaaaaaagtcaggcacggtggctcacacttgtaatcccagcactttgggaggccaaggtggatgtatcacgaggtcaggagatcgagaccatcctggctaacacggtaaaacccggtctctactaaaaatacaaaaaaatagccgggcgtggtggcaggcacctgtagtcccagctactcggaggctgaggcaggagaatggcatgaacccgggaggcggagcttgcagtgagctgagatcacgccactgcaccccagcctgggctacagagcaagactccgtctcaaaaaaaaaaaaaaaaaaaaaaaaaaaaaaaatcctcatcctcctaaagaggagactaggggtcagacaggatcacagagggaagtgtcttgcccatggtcacacagcagttcgacagcagagagggccagggtgaccagacaggtggtggtaaggtgcaaggaccaacattaaagtcagtaatctgggtttgaatcggctttgccacgtccatgtgcctgctgtattcctgggtgagttgattaacctctctgagcttccatttttccacctgtaaaatagggatcatctgtaattcacacaattttcatgagattccaggtgccaaacacagggataagtgcttaataaatgtttatttgttttgagacagcgtcttactctgtcactctgttgcccaggctgtagcgcagtggcgccatcttggctcactgcaacctccgcctccctggttcaagggattctcctgcttcagcctcccaagtagtgggactaccggagtgtgtcaccaggcccaactaatttttgtaattttagtagagatgcggtttcactgttgtggccaggctggtctgaaactcctggcctcaagcgactgacccaccgtggcttcccaaagtgctgggattacaggtgtgagccactgctcccagccgagtgcttacttaataaatgttaacaagaaaaacccaccccaaaaaaggaaagaggacaaacacaaggcaagggtgtttcagcagaggcaaacatcgcgagcaaaagcttgcaggtgggagaggccaaggccagttgctgaagtccttgccagctggcagggactgtgccctgtaagtgggggatgagtccagaggcaggcagggaccaggccacagtgaacttgtgggttttattaatcccaagtgtatgacggggcaggagagagtgtagtatcccaggcagatctgagttcagaaagacctgacccactctgtctgtctctctctcagccttagcctgccactctacagtggttaccatctgacctgatcagggtttgtaaatctgtatattcctttgtgaatttctttatttgctgccctctcacccccaggactgggtgctctgtgagcagtaccttgtcttctgttctccacagtgaccccagcatctagtccagggtctggcagagataatttcttccaatgaataagtgaatgaatgacatcgtttccctgtgggaaggtggggattgaggcagagttcctcagtctgctcctaccccagcccctccttctgtccacacgcacctgcagatctgcccgcatgagtgggcactggcccacttactggttcccctgccccctttgttttctattgttcttcctggagagagagaacgcagtgccttcgtggtcaccaaaaggccaacggcgattccctctccagctgcatgatgaagatccctttgatttttccgtttacagtttcttctagttccttctataaatatttgtggcttttcaagtaaaaagccacaaaggaggtgagtgggctgtaaaggaaacaaaacagctttttttttttttttttgagatggagtctcactctgtcggccaggctgaagtgcagtggcgcgatctgggctcactgcaacctctgcctcccgggtttaagtgattctcctgcctcagcctccctagtagctgggattacaagcacggaccaccatgcctggctaatttttgtatttttagtagagatggggtttcaccatgttggtcaggctggtcttgaactcctcacctcatgatccacctgcctcaacctcccaaagagctgggattgcaggtgtgagccactgcgcccagccagcttttttttctttttttgagatagagtcttgctgtccctcacgttggagtgcagtggtgcgatcttggctcactgcagcctccacctcccaggttcaaacgattcttctgcctcagcctcccaagtaactgggattacaggcaggtgccatcacacctggctaacttgtatttttagtagagacagggtttcaccatgttgacagattttgaacctgaggtgatccacccgcctcagcctcccaaagtactgtgattacaggcaagagccactgtgcccggccacaaacggctgttaaacacaaaaaaagtgttcagcctccttcacgataaatgtaaatgataactactcagagaatccatttttccaccttacgattggcaaggatcaaagctggctgtgttgctgaagatgtgaggaaatgctggctcatgcactgctgaagtcggggaaacttgtacccctctgggggacaatgtggccatgtgtataaaaatgtcagctgggcgcagtggctcatgcctgtaatcccagcactttgggaggccgaggaaggtggatcacctgaggtcaggggttcaagaccagactggccaacatggcgaaaccccgtctctactaaaaatacaaaaattagccgggtgtgatggcacacacctgtagtcccagctacttgggaggctgaggcaggagaattgcttgaacctgggaggtggaggttgcagtgagccgagatggcaccactgcactttggcctgggtgacagagtgagactctgtctcagaaaaaaaaaaaaaatgtcaagtgcaggtcacctttgacccagcaattgcacttggaatttatccatgaaataacccacacaaggaagaaatgatgaaggtaaaatgttacccactgtagcttgggtaaaatattatccattgcttgtgatagcaaaatattggaaacaacccaaatgtccatcaataggcaactggctgaatacacagtagtacttccacaccatggagtactacacagcttcaaaacaaattagccaacggagtggcccttatgtaccgacacagcccagaatagggccctggttaaaaagggacatggagaaagtacaaggcaggcttgccttacagtctgctgctatatgtgggtataaaagggaaatcaatatatatttgtatttgcttgtaaatgcataacatatctctggaaaggtgataagaaactgataacattgactgctttgagagagaaggattaggatgctggaatctgggctcccagagagggaggctttttgctgtacacagttttgaccctttaactatttgttgttttttgtttgttttgagaagagtcttgctctttcacccaggctggagtgcagtggcacaatcttggctcactgcaatcttcgcctcccaggttcaagtgattcctgtgcctcagcctccgaagtagctgggattacaggtgcgcatcaccaagcttggctaatttttgtatttttagtaaagacggggtttcatcatgttgcccaggctggtctcaaactcctgacctcaagtgatccacccgccttggcctcccaaagtgctaggattataggcgtgagccaccacgcccagccagtctttgaactatttgaatgatatattatccaaaaaataccagaatttaaaaagaaaacataagaaaaagtgttttttccagcaatgtggacaggctttccaccttacaccacaggagggactccggctctgggatctcattcttggaggaatggcttagagcacctatgccacctcctacagatgagtccactgaggccaccaatagtagatctggaaaaaatacttgccctacagaggacagaaactgagggataatatcagtactacacaaagtgcctttttttcttttttttaactttttaaacatttgatttatttatttaaaaagatgggggtctcgctatgtcacccaggctggagtacagtggtgctatcatagctcactgcagcatcgaactcctgggctcagattatcctccttggccgggcgcagtagctcacgcctgtaatcccagcactttgggaggctgaggcgggtgggtcacctgaggtcaggagtttga

SEQ ID NO: 96852 - DNA, 52420 bp, Homo sapiens
aaagctagacattgagacattgagtaggtgtccccaagtgggcaggagggtaagcccaggacctgtgggcatcagggctgcaggggcccaagggaggcagtcagggacgggctgagcggttgcttccagagggtcctgaatgccaggctaagaaccttggattttatccggagaatgatggggaaaggcttttgtttataatattcttataattatatattgttaaattataaaacaaattcatcttacaaaaatcaaacaatatccaagaatattcttttttttttttttttttttttgagacagaatcttgctctgttgtccaggctggagtgcagtggcatgatctacactcaccgcaacctccgcctcctgggttccagcaattctcctcctccagcctcccaagtagctgggattacaggcacctgccaccatgtccggttaacttttgtagtttgtttgttttttgagatggagtctcgctctgtcgcccaggctggagtgcagtggcgcgatcttgactcactgcaatctctgcctcccagattcaagcctttctcctgcctcagcctcccaggcacctgggattacaagcgccccccaccacaccctgctaatttttgtatttttagtagagatggggtttcaccatcttggccaaactggttttgaactgctgacctcaagtgatctacccactttggcctccgaaagtgctgggattataggcgtgagccactgggcccagcccctattttcttttcttttttttttttcagtagagacggggtttcactatgttggtcaggctgctcgaactcctgacctcaagtgatccacctgccttggcctcccaaagtgctgggattagtggtgtgagctaccatgcccagctccctttctaaacatacagattttttcttttttttaaaaaaaaaaaaaaaaaaagaggagggatctcactatgttgcctaggctgatctcaaactcctgggctcaagccatccagccatcctcctgcctcagcgtcccaaagtgctgggattacaggctgagtcaccacgcccagcctatatatagaaatatatatatatatatatatatacacacacacatatgtgtgtgtgtgtgtgtgtgtgtgtgtatatatatatataatttaaatatttgtttagagacggggtcttgctgtgctcaccagaagagcctggaccttttgggctcaggctatccacccacctcagcctcccgagtagctggaaccacaggtgcacaccaccacacccagctaatttttaatttttttgtagagatgggggggtctcgccatgttgcccaggctggtcttgaactcctgggctcaagtgatccaccacctcggcctcccaaagtgctgggattacaggtgtgagctaccatgcattcctttgaccaccatttttggagcatcagttacgtggcaggcccagtactggacatggggactctataggagaggcatctgaccctgtgaagctcacgatctaaagagagacagagctaaggaaatggcatcacaaggtttgtccagggccagataaggataaggattctctaaggccctcccactttctccaggtgtgattgtattctggagcctgcagtcacatggaattccttcattcctctccactccttccccacacctaagccagtgcttagactccctaaactcccgactccaagaaccatgggacacattcaatcaaaatcaaaataactgggaatattcaaaaggctgtacatccttcctgggctcttgagctttgaccacgaccttccataactattattgctcagcaagtgctgtcagtgcttcctctgaaatggattccctttctcttgccatcgctctgtgtccaccctggttaccctggtcaatctcccactgggatggctgcaattgcctcctcactgtctgcctgcttctgttcttgccccctgccaatcaatccattctcagtagccagaaggagtgtttaaaaatgttaatttgggccgaggcaggcagatcacctgaggtcgggagtttgagaccagcctgaccaacatggagaaaccacgtctctactaaaaatacaaaattagccgggcgtggtggcacatgcctataatcccagctacttgggagactgaggcaggagaatcgcttgaacctgggaggtggaggttgtggtgagccaagatcaagccattacactccagcctgggcaacaagagcaaaactctgtctcaaaaaaaaaaaaaaaaaaaaaaagttaatttggccaggcgcatggtgcatgcctgcaatcccagcactttgggaggccaagccgggtggatcacctgaggtcaggagtttgagtcccgtctgaccaacatggtgaaacccgtctctattaaatacaaaaaattagccgggcatggtggcgcatgcctgtaatctcagctacttgtgaggctgaggcaggagaatcgcttgaacccgggaggcagaggttgcagtgagccgagatcgcgccattgcactccagcctgtgcaacaagagcaaaactcagtctcaaaacacacacacacacacacacacacacaaaatgttaatttgcatcttgtcacccttctgcctgctcacatgctccagtgctgtcccgtggggcttagaataaactctaaacacctgctagaggttgcagtgagctgagatcatgccactgcactacagcctgggtaacagagtgagaccgggactcaaaacaaaacaaaacaaaacaaaaaacacctcctaggcccacaagggcccatgtgcacaggctcgtctgccccaccgctctctgtcccctgtactcactctattctagtcacacggagtcctccaaacatgtcagctcatgcctctgtccccagagcttcctgtacctgggtccgccttattacttaggtcttggctaagatgacacctcataaaagccttccttgaccaccctatctgtatcaggacttccaacccaatcattctctgacctttccctgggtttccttctccagacgacttgccttgtggtctggcaaacaattatcttgtttggtactaggttccttatgcgtctggtcatggcctcggggaggtaggataggccatgcttgggaatttgggaggctggggaagtgtggagctgcctattcctttcacaggcacagcctcttgaagtcctcaccacattccggaaagatggaaatcctgattcccattttacaggtgaagaagcgtggctgagatgggaaagtttacggtattcttcaagattcctttctacatatgcaaaggtgcacccaaagcttgtgtggccccggttgtcaatggcaaagtagccggattttgaactcagttctgttgcaagtggtcccagccataccacaccgaaccccttaccaattcagagacctgaaccaaggccacaccgccaccatgcagcagagccaggatcctaactcaggcttgtctcacccaaatctagcatgctgtcctggcaccatactctcccccttccccaggcaccatcagggaaatgagggaagggaaatttcctgggttcccaggccacaggccgcagagagataaatacccaaccccagctaaacctggcagtcaggcccaccctgcttcctgttgggtggcccaaggttactcagggtcatagctgaggagccagccagtcactgggatgtccttggctggctctccactctgaagtctcctcctggggtcaggtagccacaggctctgcccttgtggagcaggcccagccaagatagtgaggagagcacaccccacactgtgtgcagcacagttcagcactctgagcctgtgcttcaggggaaagaccccaggcaagtgttttaaatcctctaggccttaacttccccgtttgccaaaggggacacacagtcacattggaagctgctgttaacacttttctttaatctggttaactctctgatctaaattatgggacaaactggagagaaatatggatcgccacccatcttacagctgggaagaaggaagaaaccagagtccttggtcaccacatgtccagacctaactcatccctaagtccagtcaaacctgtctctcagatgcctcagacctatcctcttgctttctccacaatgctgaggttgcactgtcatcatctcttgcctgcatcaccaaacaaactcctcatccacctgtttcccagcttgtccccttcacactgcccacagccagagcaagcttcttaggacaaaaagcaaatctgggccttgcctcgtggctcacgcctgtaatcccagcactctgagaggccgaggtgggcggatcacctgaggtcaggagtttgagaccagcctggcgaacacggtgaaacccggtctgtactacaaatacaaaattagccgggcgtggcggcgcgcacctgtaatcccagctacttaggaggctgaggcaggagaatcgcttgaacccaggaggcggaggttgcagtgagtggaaattgcaccactgcactccagcctgggcaaaaagagcgaaactccgtctcaaaaaaaaaataaataaataaaaaataaagcaaatctgaccaggacactctccatctcaacgcgtgtccgtggcttcctccttacggtcttacaagactctgggagatctggcctttccagccccatctcttgcccctctctccaactgccacagtacagccagatgtagttgcctgaaactttctgcgggcaccacgatctccagccaccaggtctctggcagctccctatgcctggaccctgcgtgactcagggcacgcatcctgtggatggcttggctccctttgttcgagactttctgagtctgcgccccaacccatgtcaggtgcctcttatcccctgttacaactcttacccatagatttgtcgctgcctgtgtccctgtctgcttctccacctggtggtcttgagctgggagcatttgggaagggcaagcccaccaggttctccactaggtcccagcctggcttagtggagactgcccctaaacatttggggactggatgaatgaaccacaatatgccgaggggcctgggaggtacgaggctttcgagtgggttctgcccccagaacagctaactagtcagtgagaccagtcacgctgggcaagaaactaaaggacaacagaaagcttagataacagcttggaatgttacaagctgggtcacaaggctgcgtgatggactgagccagagccacctcctcggcgaagccttccagacgcttctctgctcattgctgaggggcactagagattcagggcgagcaagcgacctgccaggggctctctctgggcgccagctttctgagaaaggagactcgctaccttccgggcctgcttcagggttctacgagctcaagtctggcgggaccctggaaggccgctgcagccacaaactgtttctccttgtcattgtttcttcttttcttctgctcgcgctctccctgccccgccagccctgcgacctcccactgccttcccagggcccctctcccttccctcagccccgccccgccctaggaggcgggcccggccgcgcggtgcaccaatccgagagccccgagccgcctctgcctcccgcgagtcccaccccacgccaccgcccaccaatcgcgctgcgcgcccgcctagccgggccgcgcaatcgcgggagggctgagccgccggcgccccgcccctgccgtgctcggcggcggctaggcgggcggccgcgcggggcccaggcattctccaagcggcgcctcgcagcatcgggctctggctgcagcgtcggggccgcagggggcggcgctgctgctcgaagggtgccgggcgaggcgggcgccaccggccgggccgaagggcgcctcagctccgccggggcccgcggcgcgggtcccaggatcgaggaggaggcggcgcctccgctgcccggggccggcccggtgcctgccctgaggaggcccgaggccggacgttcccggcccgcagcgaccccgacgcgcctcctggagaggcccccgagctcctggcagccccctgggggtgccccaccttccccggcttcacctgcgctggccgcccggcacccaggtgcgggggcgtgagcggcgagggcacctcccccggccgccagcggggcgggggcggggccgccctccgccctcagccttaccggccagccagcccgcccgccgccctcagtctcaccggtccgcccggccgcgcggcgtgagctccccggacatcgcgtctcgggatgctgcaagccagcgcggccgctcgcgcgcagccccgcacctccgcccctgcctctgcctcctgggccatgccctgctgtttacatgccggtgaggtccccggccgctccgaacccctccgagccccggctccccgagggtgaagcccgccggcccgcgaactggactggtggatctctcagacctggggccccggactccgatctccgccgtctccgccaccatcagggcgggatccggctctggtgttttgaggagggggtgtggtgtagggaaaggaatcccgtccctctccaccttttttcgccttcggggcttcagactcagggaactcgctcatggctttcttgatgaagaagaagaaattcaaattccaaactactttcaccctggaggagctgactgcggttcccttcgtgaacggggtcctcttctgcaaggtccggctgctggatggaggggattttgtcagcttgtcgtcaaggtaggagctggggcggtcgcgcctgcagcagcgggggtgatgagcgagacctagacacttggcaagtgtggaagggccccttggggccggtgtgaggaggatccgggggattctgtgtgcctggggcaggttgcacaaggcaggactgggcctgaggcagttggcagggtgccaggcagccgccagccaaatacctgggggtctagtctttcagccttctcttggggccctgcgtgccgcctgcagtaggtccattctgcagacttgcatgtacagcctatcagggatttgtaccctgagcgattgtgcaggggaggggtgttcaggccaccttgcacccgaactggccactggggctgtcatatgattcaagagtcyaggccagccacgggttccccggcacccccaggcgcctgggaaggcccgatcgcaggcactccctagtctggctggagggaggtggctggattttggcctacccagccccctccgagtgactatcctcctctggctggagctgggctgctttgcattgcaaatacccttgtcgaggaggctgctgccctctctgaaagaggctccgttgagtttggttttgtgttgttcgtccccatcctggcaggtccagctgcccagcttgttgctgaatgcaactgagttcccaggctgtcccttgccaattgggcccagctggggtcacatcatcctggcctgtctccgaagagccttggacttctacagatgggagtgtgactcttgactctgttactttctgggcctcctcttctggaaagtgagcctaatacaggtggagaagctgcagcagcgagaacttagggcaggctggatgctgtggcttactcctgtaatcccagcactttgggaggcctacgtggaagacttgcttgaggccaggagttcaagaccagcgtggacgacttagattcctgtctctatttttttttcttttttggggggacgcgatttaactctgttgcccaggctggagtgcagtgacacaagcatggctcactgcaacctctacctcccgggttcaatcaattctcatatctcagtctcctgaatagctgggattacaggtgccaaccaccacacccagctaattttttttaaattttaattttgtttattttttagatggagtctcactctgttgcctaggctggaatgcagtggcgtgatcttgggtcactgcaacctccacctcctgggttcaagcgatcctcctgcctcagcgtcctcagtagctgagattacaggcgcacgctaccacgataatttttttgtatttttagtagaaatggggttttaccatgttggcgaggctggtctcgaactcctgactgcaaatgatccaccccgccccccgccccctggccttctagagtgctgggattacaagtgtgagccactgcacccggcctctctctttttaaaaaataaaaatgaaataaaatagtatgcgggcagggcctggccgagtgcctgggacacgctgcttccctacctggtctgccctttgctccctgggcctccttgtgggccctgttagccagagctgcctccctgttctgagagcccatgtgtgcgtgttataggcggagaaactgaggcccagaaagaggaagtcagtggcttgccagggacctcgaaggagtctgttattaactgaacttcgctggtttgggggcctgctggctgaatccagaggtcaaacactctgctgggaggaggggaagggaggggaactgcacagccaggctcagatttaggaatctccggtgtggacagggtggggtgctttttctgagcactggctccctgttctgttgggagctgcttatctgaggaatttggacaagggctgccccttgtggtgggggtggctggcctccttggttgcctgggaagcctgtgatcctgaggccacccacacagcagtctgaggtttcagagagaaggctgtgctcacagctagggcctggagttggctactcactggctgagtgacattgggcaagttacctaagctctctgattgcaagaaccagctaccattggtgctgggctccctgttttactagcacctctcacttaacccctggactgtgtcatggagcaggagtggaggtgggggccccataggattattatccccatgttagagaggtggaaacaggctctgagaggaaatgatttgcctgagttgattcagtggagcctgcattcaacccttttgtgcctctgaacttcagtttccttttctgtaaaatggggatgtcatacccacctctagagtacagataatctgtgtgttatgtctcgcccaggcacactgccgcagcagttatcgcttctgttggtagaggggcccaggctggggcccagccctttccgggtctttggtgggcggtggggtggggaccagatccagtcagcagggggcctgtgtgtgagctgggagtggggacagggtcttggatcccattgaggaatataaattttgagccccaggctgaggacttgcctggcctccaggccctggagccactgtctccctacstgttggcctttccattgcccaaacctgcttccccattagggaaagtgtgggaagttccaggtcttagtccacagggtctggatttcacctctgttttcccttcttcctcctggcaaggggccttaaattgcctgaatccagctaagcccaaagcatttcccagccctgtcctgcatgcaacctgaatggggctgaggagggaggaactgacactgagctctcgcaaagctgggcagttagtggccaccaggcacctgtttgctgttgggtaggtgtggctggagacagcagacagtgacattggaacctgaggccagtttagagctgctttggtgtttgctgtgtttttgcccagtagacgggggttcctgggttcctgggttcctaccccctccacccgtaccccacccaccctggactgcagcctgggaaccccgcttcacagtctgcccctctagacagcaaaggccccattgtttccaggttggagtagggtctgggggaactggacctggttagatcctggacccagatcaatagcatatttcccccacccccaggaacccccgagatggcccagagacctggtggtggcagcatgggtggtgtcagtgaagcaggcccaaggccccacccctacagcacctgccgtcctggctggagtatttccctgtgtgctgggtgccttggcaacagctgggtacaccgctcgcctgacccaatttgagcaggtagagcaggtggtgcatcaggctgttgctcagcctcatcttcctgaggcctccttgagagcagcgatcctcacgctgctgtgctctgagctcctgcactctgtgccaggcagggtgctgactgttttgcaactggtatttccatgaatcctctcagccatccagagaggcaccaaagccagagaggtgagtgccagaggtcacccaggtggtaaatggcaattcggaaattaacacttttatcgttctataaagcgcccttgattgtacgcattctgtatgctaggggcttgcctagcccctcaaatagatgattatttgaggccctgcagtcacctaccccatgggctgatggcattaccccacttacaggtgaggaagctggggtcaggacaactgaagtgactgggtctgtgctactcagcttgaaattgcagagatgggatttgaatttgggcaggtccagctctaaggccctgtcttgccttgatggcagtgggccggaagcagctgcagacccgtgtgacagccccagacctttgagaaaggctccattccatggattgggtagttcaggaaagtccagagctgagcagttaggaggcaccatggtaggtttcgtgaggtccaaggaaaagtgtccccaggacctttcagggggtggggctgaagtcactgctgtggatttggggccaggcctgggctggcactggggcatggtgagcatttgtattctcccaggcatatgtatccacataggggggcctgggaggctttcccaggggtcccgggagggaggaagaggtcctagccaagtctggtgagtcggggagctgccatcctgtccaaggcagcccttgggcaggaagaatctcaaacacccaagagatctctgcttgcagctggcaccagtcctgtgtctgcctcatgcacgtggctggtggtgccaggggagaggagtacaagggaggcactgacttacctcatagcaagtattttctggaggagatgggcagagagcattttctcagccaacagatggggaaactgaggcctgcggcagagaagtgacttgctacggccacttacaggaggagctgatggcgtagctgagtggacttgggcctggctctgacctctgtcccctgtgtcttagtaactctctgtatgaaggaggcaggctgggccagaacggggagggggtccttctggggtcctcttgtgctctgtacttgggtgccagactgtccaagaaacagacagcctgtgacttggaggcccctcttctggcctttcttctttggtaggcttgaatcctcagtgggcttttgatttgggcagtctttggtgggcgcgtggccgcccaccacaaagatgctgcctgccttccatggcacggctgggatggtggccccggaggcacaggtggggttcttttagtatgaagaaggccttggccaggtcagtgccgcgctgggggccccacgccaggcccagtccctggggaggccagcctggccgggtctttcctcacactccacacacttgtggccagagcctccacccccctggtccctcacccgcccttctaggaaaaggctgtggaatgctggttgaatccacctccgggggaggcctgctcacaggcacagtgtggagctccaggagggcaggatggagatggacacagaattctgtcccttggrgctgagtggagcaggggccgtggaggttcgatgggattcttagattggcagggcacccactttccttcacagagcaggagctctggaggctgagcacactggagagggagaggaggctggtgggcacgtgtgcctgttccactttccctgaacacacgctttgtcttgggcttctggaggtgatcatgattagacagccctgtttccatggagctgccagctaggtgggggcagtgagcttggtgggcatcgtgaaagcttcagagcaaggcagatctagggcatatccttctgcatcccactggatcccggcaggcagctggggaggcatttccgtccaggtgtctgtccatttatttgacagatgtggatcgagcacttaactcaggctgggcatggtccttgtcctcatgtggcacatcactgagttagggagagcttcctggaagaagtgacccttcctgggagccttgaaggcagaggggaattggacaggaaagagatcgggataagcctttggcatagaagcccctggccaacaggcacttgttcccagggtcaggcgaggagctggggtatggggagggtggaggaggggatggagtaagttagggtaatgggtggccgagctggtgtgttcctggcctcaggagtacctacccaggggcagtggagccacgtggcctggttgccaggtggagaaggttcaggggcctgacctgcacccagggaaggacaatgggagttggctggcaggtactgctggcctggcggtagcaggcagaggagcaggcagattggagagagggctggcaggcagagtgggcaagtgggcttcctcaaccgcagggctggcatcatgcctagtacttagtaagtgccgggagatggatgggggcacagtggccaaatgtagccagggtttgtcgacccctgcagtgcgccagtcatttgtgattgcatgaaaatcagatttcccatttgttttaagttggaagatctggcagcagtgctgtgtggcggcgtttggctcaaggggctttacagctgcctcttgacgtgggctgcccacttgagttcccctgaccccgcagcatgccttggatgtctgatgtgtgctgccttaggccagcctggtcccctgggtgccgtagaaggccttccaggtgcaggtcgggggcacaaggaggcagagtggcctgtggagagaagccctgctggcagaagtgggcagggctgggtggcctcagaggccagcccgggcagcgaggctgtggtaccaggccatctgctggttccgcgaggtcagactatactgctggtggctgcggggaagcctgaagctgccgtgactgtgcctggccttggtgtctgctccttggacctagcctttgctgccagctggctgcactgttggcaggtgccaccctggcagcccctgctgcctacctgccagcctggcagcagccctgacccgagatgatctggcttcgtggagccaggctatttcctgaggcctgttccttgcttcaagctccgtcctgggagctgctctggccagaggctcttagcagcaaccacattatgtgcctgagggccctgcttgtccaggggtggcaggggggccctgagtccctttgaaccctgcttgttcagtacctgggagtcctgacttgcatttgggaggccctacttgcaccttgggatggctgctggcatgtctgctaaggggtcaggagccgactgactctgtgtctggcatctggtgactgctatgcagtgaccctgcagtcactcgcttgctgctggggacaggcagtaatatcttaagcacaaccagtttagatgtatcctcatcttaccagggagccccaggaaggtttaagcaggggagagacaccagatttgcttagaaagagacccagaactaatgtagggtggggagggggtgttgctctgtattatccacctccctggcaagtgctttggattatggggactccagatatgccctgggacctgtcagccacccactatgaggtcagactgctgtccgtggctcagtaaggcccaaagctgccaacctatggctggcttctgtgtctgcatagggctgtggtggcaaaccctgggtctttgccctgagcctcttttggcacccagggcttggaagagctctcacatgcaggcctgaagctgcccgcacccccaccctgcccggtcctctgtcctgccagccagctgatttgggtggctgggaggaagagctctgacagaggcctttctgcctgcttgttctgccttgttgcctccctgcctccaggcctgcaggagacatttccatcctgcttctgctacttgctgcctgtgtgaccttgggcaagggacttggcctccaagcctcagtgaccgcccctgtgaagcagggctgcyggtgcctgcctcctggtgctctcagaggacatggtgagataatgtctgtcagacgcccagcgcggctcctggcatacagtgcacacgctgcatgtgcttacagtctgtcctcctgtgtccaggcagagttatggcagggtcagtgcccctgcatggccgctggcactcctgtgtgggccaggactgatgaggtgctgctgggagaggacactttgcactcggggcagggtgggggtgagtgaggagcacaccgggtgtctgagctcagggtccccagtggggtctgcgtgttttcttgtcccttgttggcttgaacttgccccacagggagatgcttggctgtgagccagggtgagttggagcgtccctgcttggtggacccaggctgggctgaggggcttttggtgagggaagaggccctctgcacagccggctctgggacctgctctggcaggcagaagacagcctccacggaggcagagggcactggctgtcaggctgctggtgggctggagtgtgggtgagagagacagcggccgctcagtacatgggaggccccgccactcccggcatcaggctggcctcgtcggcttccactgctcctcgcccttctggtttctgtgcctttgttccctgtagttgcctcttcctcaagttcccttcccccacttctctgctcgctgaatttcttctcagcctaagagtcacctcctccaggaagcctccctggcctcttttggccttgtacactctgtgggccctcatctcaaggcactgcagtctctgtccacatctctagctcattccgcagactgtgggcccttcgtgggcaggagtagtccttgcatcattgcatcttggtcttggggcttcctgctgtgggttggcactgtcctggtgccggggcttttctcccctggctctgaaccagtgtgagtgctggtgtgggacctcactgtggctgctgccagctgctggacccgcccccccgccccgcattccctcttcaggcccgaggtgtcagtctgtgtcaggagcagccctcacttgcatatgggacagctgggtgcctccacgggctcagaggctgcaattgagaggcagctggggacatcaatggtttgggtggggtgggctcctctgcatggggcagggatgctcatagcaagcagaatggaaaggaggagggggctggggcctgactccaagcacggcaattggaccttggcagttgcttgatttccctgtgactgtggctaaaggccttgtcctctcagcctcagcttcctcctccatcaaacagggctgctcaggagggctccctacccagcacagggccaggcacctggcaactaaaaacagactaaccctgcccagagaggaggtggccggctggtgctcagggagggcggaagtctgggtgctaaacactcttacctctcaccacttcctctctgagcagactctgcaggtgtggggcagcatacctgtggctccctgctccccctaggctccccccagacaaattcttgggctccttctggtgtggggctcaggctgggccctggagatgtggcccccacccctgcagggccctccagtgaggggaggtgcgcaaatccaatcagtgctatggccacaggccctaaggaggtgatgctgggctcggttctggggcatgagtaggattagcaggtggcgggtgggagaagagcagcctgcggcagaggcacggcaagggcagaggcacggcaagggcgagcgtgctgagcgggaaagaggggctggctggcctgggagggagcttgaagtcaggaggagtcaaggggaggggtttggactgtacctggaggggtgggagccacagaagstgtgaatccgagtcacatttgtagtttagaaccaccaagggcagccatggggttgattgcttgggactgcaggttgcagaagggcaggtgactgtcagctgagaagggcaggtttcaacctctgtcatcagggaattactcaaaacaaaacccgaggcatactgtgcagtgctgaggatgaacaagctgctgccactcacagcaggaagcagtctgacaaacaacgttgagcaaagaaagccggagacaaaagagtgtatgatgcggccaggygcagtggctcactcctgtaatcccagcactttgggaggccgaggcaggaggatcatttgaggtcaagagttcaagaccagcctgaccaacaaggtgaaaccycgtctctactaaaaatacaaaaaaattagccgggcatggtggcgcatgcctgtaatcccagctactcaggaggctgaggaggcaggagaatcacttgaactcgggaggcagaggctgcagcgtgcggagatcgcgccactgcactccagcgtaggcgacagcgcaagattctgtctcaaaaaaaaaaaagtgtatgatgccatttatacagagttcaaaaacctttctgatgcaagtcagggcagtgctgtctttgctgaggggagtcatgtctggaaggaccttctgggggcctgtaatattctgctgcttgggggctggtttcatgggtatgttctctctgagwatctgtgagttctgcacgtctctgtgccagaaacaagactcgagatgccccacacttttggktggtgctgggtggatgcctgagtcctctagacaaaaatgaggcacctttttgggtgcccggaagcctggaggagatccctgggtgttttccttggtctttctggtaaggcagcctgaaccgttctgacctgataagcatcagtcttgtttatgaggcagtaactcatcctggcagctgcaaacagagatgtaactcttctctggctggagattttccttctgcctcttgcaaactccagcagggcctgctgggctgtggggcttggctgttcatggggagggcaggctcctgaggctgccagagaactagatctccccgagctttgctttcctcatctgtgaaatgggataatgaggtcctccttgatgcttgggtgaaatgggttaatgcctattatgtgcccatcgtagtctctggcatggagtacgggctcagtaaaggctggcagcattggtattcatccagggcmgttattgtaagggccctaggggtgagagcagaaaggaaaggtccatattcctccctctgtccctgtaattgtttctcttctctcttcctgtggttcacctatccagcaaacatttgtgattagaaccaggccattgccttggccaagacaaccgtccctgcctgggcccagagccaggagagactgttaggcacattcgtctctcagaggagtgctgagcacagtggggtgggggagaattgccactccgcctgctctgccctgaaccctgtctttgccgacgggcatttgactgtgctctccccaaatcccaggagaaggcctgaccttggggtgtagcagcccctaagggttttttatgttggccacacccatcttggatacaggcaagaccaaggccaggctcttgggatgtgtcccccgtgtctagcacaggcctgacgtgtagtaagtgctcagtacatatgtgtggagtccgtgaatgacagaggcaaagattggtccaggattggtctgtgagtcttcagggaatcacatgtctggggaggaggtggagaccagtgagtcagggcctcacactccagcctgatgcttagcccatggtggttggaatcttggggaactgatgaagacagctaggaaaacaggtctgagtctgtgcagggctgggaggaaaagtgactttggcggagcgattcacaattatctcctggtcacctcagaagtccagggaaccttagggcatactgtatggatcagtaggaacagctgggtggcagagccagcaatggcagtgacccctggccccttacactctgcagagaatatggccctacccttccatgaaggtggcacaagaaggcttaggggagcccttacgggagcaggggtatgaagggcgctcatttagtcattagttagttactgacctaccgtgtgcccagcaccatccttgcgacaggggaagcagcagtgagcaaaacagaggcccttcctccaggacctccacactctgggagacaggaacctaagacccaggcctagaagaggaaacttgcagtgtgtagggggtgcccttgggatgggctgggatggagggtaaggatagagaggacagaggcagccccatgacttgagtctagtcattcgaggggccaggccctggggatgggaatccgttcctcctctctctccccttcctccttgggtgaatcaaccaccacccaggcatgagtcagccaggagtggctcaggcatgcctaggccacctgctggtccccctccctggatgtcccaaccagggtgtcccagccaggtttaagatctaaggaagccaggcgtggtggctcacacctgtaatcccagctacttaggaggctgaggcaggaggatcatttgagcccaggaaacatagtgagaccccttacctcaaaaaaaaaaaaaaaaaaaaagacctggggaaatatcctgatctatggtcctggggtggagaagaaggtaggggactgtgtgaccagcttttcctgctggaccatctgcctcagaggggaactccaggtgcctgtcagtagttacttctggaggtctagtccctgcccccattcagcatgggtgtccactgtgccaggtcctgtagcaactctgtgagacagggacagaactgcgactgaggcccagaaaagtcaagtgtccggtgggtaccagagcctggctttgagccccagtctctgcttcccaatgccttgtgggcaggcctgctgggagactggtgggtgcaggaagggaagtcccccgagcagagccagccccgaagctctgtgtttgctgtgggcatggatcctggggaggggaagctgctaccacagcccagtgtgacacccattgtgtcttcttgctttgaactgctggggtcttgggyccaaccctggcatgggagcccagcttgcagctctggggtcagacagccctggctttaggtcacagccctctcccggccagtagaccttgggcaggtgacttccctgctctggggcctcaatttccttggctgcgatggggtaatgggctgacagcacccatctcctagggctgggtgtggattcttggggtcagggagagtgcttggctcggtgcctgacatgcagcaagtgttcaggagatggagggctcatctttggaagttctgcagagcttgcctgctggggggccttttcccacttctccctcctaacttgggacttcctaacatggtccccaacaccagcaggtcttgacggatttggctcagagccacaccccattggccccacactttgacccagtgaccatccctcccttggcataaacctggtctcaaagcctcttccctgggattgagactcaaggtgaagggtcagcccacacagcatggggtccagggtcgctagcgtgacagatgcccatgccacaatctctggagaatggctgtactgccttggcagatttcccaggggttctgcaagatcaggaagtgggggtgggttcctgaaggggggcctgggagtacagaccaccccttacctcccatgtgacctgcagcgactgcctggactccccaagtgtctgtttcctgatctgtgaagtagaagcaggaagatgatgcttgagaattacttggcacacaggagggtgcctgggaaacagccaggctgggccatgctgggtgccaggggcatctttgcccaggtgcatgagattcttggttaaagccagtagtttactttgggtcccttcaatggcctgctcgcctcttgggctgtaagagcaagagagagtgatcatttgcatctggagaatggcgttaacagggcgtttgcctgggcagtagctcaaggcatctgcacaacctgactctgggtacagaggacagagcagggcagccacttgcctgtgcttgtaaaatagggatgcccacacctgcctgcatgggcttttttttttttttttcggagatggggttttgctatgttgcccaggctggtcttgaactcccgggctcaagcagtcctccagtcccagtctcttgagtagctgagattacaggtacgcaccaccatgcccagcttgtgtggggtttcccttgaagatcagtctcaaggttgctgcttgaccggtgagcagcaggattcagacctagatgtgtctgactctgggatcctttcacctaaccctgacgctttcccagcaagcctggatgacctggcttccctccaccctgtgcccatgccctgccccttttccatcttggagtttctgaagccccagtgggctgtccactctgtgcttctttgggtcacttatgatgccagcctccctcccggcccacccgccaatcccaggccactgctaataggggtgtctttggcaggggaacaaagagcgttttggggctgccaggtggctgctctgagtgctccagtgttggccagagtggcttggcttccagaaacttcttgctgcctccttgcaggaggaggtcctggccatgctaggactgtgagctgctccccctgaacccctggcaggagccagacgctgctgtgctgccacgctggctcttyagcccctggacggacgccttggctggtccccagggcaggctcctcccaggcggctgtattctcttctcttcggggaagcacaaggcagatgttgtcgatttaaattgtttccttattagactctcgctctctggcctgggctgggtttcatcagccgggaactctgattgcatcactttgccgctcaytcctccaggaaccaggccaagggctgggagagcaggcagggtgggagtgagcgtggctgagggaggggcagacggatggcaggcaagggactyaagtgatggacttaagtgatggggccctgttctgggggaccagcactgtcaggaacccaggagcacagctggaacctggagttccacacgcctgtcagagcgctactgtctcttagctgggtgcccagctccctgcatcagaatcacctgrgagctcgtttaaaatgcccttttaagacctgcagcagtgrctctcaaccagggttgatttggcgatctctggagacattttcggttgtcacacctggggctgtgctactggcagggtgctgctgaacatcccacagtgcgcaggacagcccctcacaaaaagaaaccctgtcctgcggagtctgtggttctggaagggctcactgggaatcttcgtttgtcatgagccagtggaatgttttttggtttttggtttttttttttttttttttttttgagacagtcttgctctgtcacccaggctggagtgcgatggcgcgatcttggctcactgcaacctccgcctcccgggttcaagagattctcctgcctcagcctcacaagtagctgggattacaggtgcccgccaccacatctggctaatttttgtatttttagtagaggtggggtttcatgtttcaccgtgttgtccaggctggtcccgaactcctgacctcaggtgatccacccgcctcagcctcccaaagtgctgggattacaggtgtgagccaccgcgcctggctgccagggatatttttatctgagaacccctgtcctgctggacctcacccctctctttgcttgtgagtttgagcacctgcccccgcagggcttcgtgctgggcacccagtggaggtgagatgtgtgtctctgagtactggaactgggaaggcgaagtgttgagagtggacgtgggtcaggctggagccctgtcacagaggttggactgccccagtgatacccggattcctttttcctgactttctgctcctgtgagggttgccagccaggcatgcacttttgctccaactctgaggagagcccctgatgggcccatttgacccctgtctgtaggaatcctgtgagcctggcagcytgaggccaggaggtggctcccacagccctacggcacctggccccacgtcaccctggtgatggagacctggggttgtcaaggctctgggatcttcttgttgcacctactgggcagtaatgctggatcaggctggggccaggtgctggggatgtggcagcgaactgacctcgggaccacagaggcagaattctctgcatcctccctctgttgagcagtggagagaggtgctgtgggaccacagagtcaccccaacagccccatgtgatgggtaagtcgtccttttacagatgaggaagttgaggctcaccaagatggggctccccgagtcacttggtggcctctcctcgtcaccagcctcatccaccccccggctttccagggaggctcttcctgggagccacctccctccttctgggtcttccctgtgctgttcccactgcctgggacctccttccccccaggtcttcacccagctgactgcctgaggtcccggctctgatgtcactatccagggaggcttctcggcctcctgcccccagcctgctctgttcaccgcccttgtagctccttctccttcctgggagactggcggtgactgcagtcattcctgtgtaatggccgtctccccctctcaaccagggactcctccaggaggttgctcgcattgtgtcccgcaccccgagccggcaccacagtcagtcctcgtggatgcattgtggaggtcccggtccgatttgggatacaggtctgtgtgtctccccacaccacctggcgtgcttcctgggatgggtcagagggtggtcaggtcactgggcagccttcccagggctgggagagctcctggagagttctgctgggccaaggacaccagcctggtggggtgttctgctgtttccagacagcccagaaatagccaaattccactgctgggatggccacagtggctgtggtgggtgcagggcttgtcccgccttgctgagatttacatgtctaattgtatatcttaaagctaaaaatgaaacccagtctctgtaattacctgttcctggcagcggggagcgggggaagcacgccctgcaaccccaggcycgggagggccgttcatcactgtctcttcccaggcgggcggccagccctgccagcaggtcccatgtactgcatggggtgactccacttggtaacttgggaggacccaggccttgaaccaggtggctgagggttcagatcccttttgcttataagcagccttcctaacccatacccttttctcattttcaatttaaatttcaattatggaaacaactyttggacagaaacgaagaaagagtctctgataacccttccaccccacctttggtcagacctgctctgagctccctgcctgccttctggccattatcccttcataccagtgtgaataagctgcttggccagggagcctgaagtccaggattctgggttaaaacaatctccttctccggaccttgcttctatcattttaaaatttcagttctgtagcccagacctgggccacattagggtaagtaggtggtggtgggcagtaaggagggtccgtggtcctatttcttttttcttttttaatcaaggtggggtcttgttatgttgcccaggctggtctccaacccctgtcctcaagtgagtctcctgtcttagcctcccagagtgctgggattacaggcatgagtcaccatgcctggcctgttttcttaataaacatcttatttataatttttcttcataggtgctcattttagtttttttacactttcctctttctgagacaggcagctggttgtgcctctggtcactggagacatgtgttgggtactggcatgcacagcacccagcagcccaggcctgccctcttagcactcacaggccatggaggtcacagccagccctggtggcactcagctctgaggaccctgggccctccctccagggtctcatagtgctggggtggggtcgttctgcagagttgcatttccaccctgggccacaatgcagtccccaggactgccggggattgggtttcctttggtcaggtgtgctttaagaaatgctcacaatggatactttctgttcaagacaaaggaaaaaaggggcaccatgcccatcttcatcctttcttttcttccctactcaccccaatctccagacactccagtggccagaggtggccttcatttgcaatttgatgtgggcatctcctgttttctgtgtgcttgtgggcatttacatatgtcactttaaaaaattaaataaaaatggggtcatgtagatccccttctgcatgttcccttcctgcaggtctgatggggccatcccaccctgctggggagcacagcttgccctccctcccctccttctcttctggcgttgcctgctgggtgccatcggagcagtcctcattacttcccacttttgcccaacttctgctgctgtgaccagtcgcatacacgtggacaccgtggggactgcccctccatacagctcctctgtaagcttaggaccaaggctgcctctccagtctccctggcccatgcctgccccggcatcctccgccccagctacactggcccccagctcctcctcaaacgcgacagacattcccaccccggggcctttgcacttgctgttcctcgtgcccggattgctcttcccccagatatctgtggccactcgcttcagtctttgcttagatgtcaccttcccatgaagaccttctctggccctcattctctggtgcccccattgttggggcactgtctgcctccttccttggttcctttttctctgttgcaccccaggctagctggtatgcatttgcctggttttgtctgtcttccacccactgccagagtataagccccttgaaggcagggatttctgtcttctctgtttattgcttgtgttcccagagccttcagcagtgcctggcacctggtgggggcttcataaaaggtttctgaatggatcaaggctctgagatgtcctcagtcctgacctggccagctcccaacctggggctcatggctgcctgcctggcatcctcattcccacctcccatcacaagcatcccttaccccaccctgcctgagcctgtgttcatctcccaccatgatccctgccccatgcatgggacttcatgccacctgcctgggggtgcccagctgcttcccaccagaggggccccggggctgagggggaggcagtgtgggccctgaggcagctgcatagctgtgtcccagctgtgacacagggtctggacgcagatggggctggggtcgagactagctctgctgtgacttcagatgagttacgcagcatttctgagcctcactttccccatctgtaaagtgggctgtggtagcagtcacctttcagtgttgaagagttctgggccgcacacagtaggccctcaggaggtggccgctgctgctgtgtttttttttacccttgctgtgacctctggccgtgggccagggcgaggctgcttgcctcttcccgtgggagtggtggcttccaataggtgattgttcagagccctgtagaaacaggagggaggcccagtgctgaccctgtgagctcttcctgtggaggggggaatgtgcctgttacctgagctaggagggttccaggtggctttttctggcttggccctggaactgcaaatgggccttaggcttcctggctggcgttcccacagcaaactctcaaaaggaaagggagaaagcccacaattcactgtgagcttttgttcccagacactaatcccaattccactgggtgtttcaacatgcccagagcaccgagctgcctccccaggcctccagcagctgcttccaaccctaggtgaagtgtggggagccatggccactccccagccttccccctttcaagcttgggcctcctctggctgcctgggaagtgtctctgctctctttgcccttccattctcctcctctgtggctgttctcagcctctgcctaagccacagtccacgggggcaagacagagccgctgtcagaatcagatgcagtcttctcacacccttgaggtctagcaggacctgcccctgctccttcacccatctcatcccctctgatctccccccagctcctcttcagccactgtcctctgcactagttttctacctgccaagtgtgtttctgcctcagggcctctgcacttgctgctccctcacctggagggctcttcccctgtctttgctcagtccccacttcagtccaagccgtgctcagatgtcactgccctaagggccatccctaaccccccacctgaagcagccacacctcatcgctacctgcactccccacacaccttccctgtggtgttctccatttttctatttatctgacctaccatgtatttaacagctttattgagatataattcacataccacacaatacacccatttaaagtgtacagttaagtggtttttagtatattcacagttgcacaaccatcatcacaacaaattttagaacattttcatcaccccagaaagaaatcccaaacccattagcagttactccttttcccctcaagtcccctgtattagtctgttctcacactgccataaagaaataccgaagactgggtaatttacaaaggaaagaagtttaattgactcacagtcccayatgggtgccgaggcctcaggaaacttaaaatcatggcagaaggcgaaggggaagcgaggaccttcttcacatggcagcaggagacagaagcagcagcaaaggggaaagagccccttataaaaccatcagatctcatgagaactcactcactcatgttaacagcatcggggaaaccacccccatgatccaatcacctccccccaggcccttcccttgacatgtggggatcacaatttgagatgagatttgggtgaggacacagagccagaccrtatcatcctccatccctggcagccaccaatctagttcctgtcactatggatttgcctattctggacatttcatataaatgagataatcaactctatagttctttctggctggctgctttgatttagcttcatgttttcaaggttattccccagttagaagtgtatcatttctctttattgctgaatgatacaccattgtatgcatagaacacattttatttgtccatttaccagttgatggacatttgggttgctttcactttttggttatgaataattctgtgatgtacatttgtgtacaagtttttgtgtggacacatttcatttctctgggatatatacctaggggtgaaattgctgggtcatatcataactctgtgtttcaccttttggggaattgccatactgttttccaaaggggctgcaccattttacattcctaccagcagtgtatgagggttccactttctccacatcttcgcctttgattctagccatcctagtgggtgtgaagtagtatctcattttagttttgattttcatttccctaatagctaatgatgttgagcatcttcctgtgtgcttgttgaccacttgtgtatgttctttggagaaatgtctatttggatcctttgcccatttttaattggatttttgtctttttattgagttgtgggtgctctttatatattctggataccagtccctcatatatctgatttgcaagtattttttcttattttgtggtttgtcttttcacttttttgatgatgtcctttggagtgcaaaaggttttttgtttgtttgttttgttttttcttttttttttaagatagggtttcactgtgtcacccaggctggggtgcagtggtgtaatcacagctcactgtaacctcaaactcctaggctcaggtcatcctcttgcctcagcctcccaagtagctgggactacaggcatgcaccaccactcctggctaattttaaaattttctgtagagatggggtcttgttgtgttgcccaggttggtctcaaacttctggcctcaagtgatcctcccaccttggcctccgaaagtgctgggattacaggtgtgagccactgtgccccactaaaagtttttaattttgatgacattcaatatatctatatttttcttttatcacatgtacttctggtattatatccaggaaatagttgcctaatccaaggtcatgaagatttacccatatgcttttttccaacattttatagtttagctcttacacttagatctttgatccattttcagttaatttttgtatatagcatgagatagccctgtgcaccacccccctcacacacgcacttcattctcctgcatgttgatatccagtgtcccagaaacatttgttgaaaagactattctttttcccactgaattattttggcactgttgtcaaaaatcaattgaccataaaagtgaaggttggtttcttttttctgaaacagtctccctctgtcgcccaggctggagttgcagtagtgccgtcttggctcactgcaacctccgcctcctgggttcaagtgagtcttgtgcctcagcctcccaagtagctgggatcacaggcacatgccatcatgcctagctaatttttgtatttttagtagagatggggttttgccatgttggccaggctggtctctaaggtttatttctaaacctttgtaaactggataatctcagttgtattccatttgtgtctgtcctaatgctaggaccaccttttcttgattattataactttgtagatattttgaaatcaaaagcgtgaatttttaaatgatgttttactttttaaagattatgttgactattctggtcccttggatttccatgtaaagtttaggatcagcttgtcaaagttctgccaagaagccagcgtggggctttgatagggattgtgatgaattttagaactatttgggagtatcatcttaacaacatgtcttccgatccatgaacatgggatgtctttccatttatttagatatttaatgtctttcagcaatgttttgtagtttccggagtatgtattttgtactttattaaatttattcctatgtatttttttctttttgatgctattgtacgtggaattgctttcttcttttcactgtgtttgccaatatatagaaagaattgatttttgtatattgatcttgtatcctgcaacttttctgaactcatgcatttttattttttatttttgttctttgtttgttttgagacaaggtctcactctgttgcccaggctggagtacagtggtttgatcttggctcactgcaacttctgcctcctgggttgaagagattctcccatctaaacctcctgagtagctggaactatagctacctgacctcaagtgatccatgcccgcctcggcctcccaaagtgctaggattacatacatgagccaccacacctgtaatcatgtatgaggccaggcattgtggcccatgcctgtaatccagcactttgggatgccatggcagatggatcacttgaggccaggagttcgagaccagcctggccaaaatggcaaaacctcatctttactaaaaacacaaaaattagccaggtgttgtggtacatgcctgtaatcccagctacttaggagtctgaggcacgagaatcacttgaacccagcaggtggaggttgcagtgagccgagatcgtgccactgcactccagcctgggccatagagtgagactctgtctcaaataataataataataataatggccgggtgtggtggctcacgcctgtaatcccagcactttgggaggccaaggggggcagatcacctgaggtcaggagttcaagaccagcccggccaacacagtgaaaccccgtctctaccaaaaatagaaaaattagtcgagcttggtggtgggcacctgtaatcccagctactcaggaggctgaggcaggagaattgcttgaacccgggaggcagaggttgcagtgagctgagtttatgcccttgcactccagcctgggcaacgagagcgaaactccatctcaaaaaaataaataaataaaacaaaatagttttttagtggattccttaagtgttttctgtataaaagatcaagtcatctgttaatatagttttagttcttcctttccactactaggtatttttcttatttatttggtcttcttctttctcctcccaccagaatgtaagctggttactgctgtggttcgagtgcctagaacagggcctggcacacactggtgctcagttgtttgatgatgaatgaatgaataagtggagccagcatgactaggctcaagtgatgcccccagcctagggcccccactcctgtggcacctgcctatagggattagatctgtcccttcctcccgtcttcagccctgacctttctgcttgtccccagtcttggttgcagagggttgttggagctcaccctcctaacaagctaggtgcattctggtgacatcacagagccttcaccgggccaggcactttgcaggattcatttcactcagtgctcccacaacagcagccacgacaggggcggtgtgccccagtgagtgtgcagggtgtggcccaggtctgcctgccctcttgacccttgtcactgccttggcaggagcacagggtaagccttggtcacatcctcaaagccttgtggagcctggagggggctcctcatagaaagtgaggcttaggggctttcattggctaaggaaacgggactccctcattcatgctgtttcctctcyttggaactgtctcctccacctggctactccccaggctcattctatcctgagcttgaatgtcaccttccctgattcatctgttcccccgccctctcctggtgacaatgagtcatcactgggtaaatacagtctgcagtggctcatcccagcacctgcttggcactcagagacctgggcggtgccttggggcagagcagggtactacaggccccacaacaccacaggttctcctcgccaggctttcccgggctcctgagccaaagtggcgactgagagccctgactctgaagtcatacagtcctgggtttaaatcctgctttgccaatcactggggatatgagctcgagtggcgggtagggtggccttcttttggagcttcagtgccctcagcagtagaaggggtggcatagagcccaccttgcaagactgccatgcaaagcaaacctggcgatgctcaggggaggcttggctgcggccctctccgaccctctgccctgaggcctcgatctggcagttaacccactctcctcgggtcacttccttagctgtccccttggcggttgtgcttaggtgggatgagctggagataacgtctctcacactgtctcctcccttccctggccaccccttcctgagcacgggctctgccaggcaggctgtatggagatggggagctgctcggggatgcagagctcggttctgccacgtgccgctgccacccccagatcctgccaaggcccccgcagcagttgggaggggcttggatgagctgctgccactggctcccactcactcccagggcacaaagcatctctccagtagaggggtgctgaatttttcagcatggtcatgctctccaactcaggaggaaccggggggctagaagaccagagccctctgcttagtgttggtgaagctgaagcccccaggtcgctgtctccgcacccagagtccaactgcttgggttaatccccattctgctcttacctgtggtgggcctcaggtgagggtcttagcctccgggcccccagtttctttgactggggattgagctgatgatgtggctgctccatacagaggttggaaaggtttggcatgaccacctttctctggcacttggagcaggctccagggcctgctggctcttgtgaagttctttgaacagtgcctggcacatgggaatcactgtgtgggtatcagctgttgttactattgccattgttgttattagtgatgaagaaggcagctctggagtcaggaggaaccaggcttcaggcccagctcagctatctactggctgggaggtgtggggcagcttgcctagcctcggtctcttcatctttgaaatgggctgagyagtccagcctaagactattgtgagggtcatgaggcggttggcagagcctggctttggaggaggtaatggcagtgcagggaactgcccaaggtctcagagcaaggtggcgggagcagcactgggtacagagggaggctctgcaggttgccaggcttcctggggagggacagctgccctagctcacctcacccctgccttgtgtttgtctcatttttattacgttttcactgttgtttttacaacaactacacgagtacattcttgtggtgaaaacacagctattttgtgacacagagtgaaagtggagcttcccaccgcctcagtcccaatggggagtgccatgtccctggtaccacatggagtcccctggcgcggatgtgtgtgcctgtgctcacctgtcgcctctggcccacagggaggaggtacaggagaactgtgtgcggtggcgaaagaggttcaccttcgtgtgtaagatgagtgctaacccggccaccggcctgctggacccctgtgtcttccgtgtgtctgtgcgcaaggtgaggccaagggcgcatgtggggctgctgggctgggctataggcccctcccctcatgagtccgcacccccagctgaaaatggggtgagttgctctgcccgttgccctcctcccctcagatctggggggattgtgggagatgcawgaggtccctgggattcygcagtcaacttgctgcttgtgtctccctccctgtgcaggagctgaaaggcgggaaggcttattccaaggtaagaggggctgtgtgaaggggcagtgggatggaatggggggtggcatgggacaggcacaagggaagcctccagccccttttctgccacaagcaagaggcactcagccctacctgagatgtgttattttttagaaatatctttattgatggtctttgcactcaatataaaggcagcatatggttgttgcaatataaatggtacagaagtccacagagcaaaagggccagtttctgtcccctttcctctctccaggcctctttctgggaccccattattggatagattaagacctttccagaccttgtaagaagaaaaaaaggaaatataccatacaaagagagcagcaaataaaatgtatgcgtgtggtttaaagaaatgcaaaatgagcaccctctgtgtgtactgaagtgcatgcaaacaatatgattttttttttcctctggagacagagtcttgctctgttgcccaggctggagtgcaatggcacaatcttcgctcactgcaaccttctcctcctaggttcaaacaattctcctccctcagcctcccgagtacggctgggcatggtggctcacgcctataatcctggcactttgggagactgaggcaagcgaattgcctgagctcaggagttcaagaccagctttggcaatacgacaaaaccccgtctctactacagatacaaaaaaaattaaccaggtgtggtggtgcatgcctgtaatcccagctactcgggaggctggggcacaagaattgcttgcacccgggagggtggaggttacagagagccgagattgcgccactgcactccagcctgggtgacagagcgagactctgcctccagataaataaataaataaacagatttgcagcttggttttttacttaatccattctgggcatctttttgtgttatcacagatttccacgtgctttctaatggcagcagtgtcccgtggcatggctggcgatggttgactcagccagccctgctgctggacatgtgcattgttaccagggtttcactgtacccacagacagttcagccctacatagtattaagagcttttctactgggcaaagagggagaagacagctctggctttgaataagcctgctctgccttccatccctcttctccatggtggactcttggcctcccctcctcagctcctgaggcttagcccagtggcaggagggtgggcttcatcagccgggaggggaaatgccttygcctcacctctcacccgagggaggygctatacagggcgtggcccttcccactgaccagagctcaggaactcagccggctgggcagtgcactctgccctggcccggggcgctgacgtccctctccagaagcagaggacagtatggctagaaccaggctgtggagggtgctgtcacagtggaaatttctctgattcacacgggtgaggacagctgtgcagccaggaaaggaattaccagcaaacacctgggagcatctcacctccactggcaaacatttaccaggcacccagcacrtggcaggcactgccaggccccttcccttctgttctgtaattgaactcccactgcaggctttactcccattatacagaggaggaaactgaggccctgagaagtggctggacgtggtgctgatcaggcctagtttcagtcctgtctctgttgggttagctgtttggccctgggcaagcttcttcccctccctgaacttagttttcttttcttttcttttttttttttttttttgagatggagtctcgctgtcgcccaggctggagtgcagtggcgcgatctcggctcactacaagctccgcctcccgggttcacgccattctcctgcctcagcctcctgagtagctgggactacaggtgcccgccacctcgcccggctaattttttttgtatttttagtagagacggggtttcaccgtgttcgccaggatggtctcgatctcctgacctcgtgatccgcctgccttggcctcccaaagtgctgggattacaggcgtgccaccgcgcccggcctctgtgaacttagttttctcatctataaaatggggatcactctgagtccatggcggggctaggatctgaatccaattccctgattctggagtgtgtgccctgaaccctgcagtagagacttgcaggcagcagttacttgacactcatccctgattggttcggttgggttcaaacattggttcaaacatttcattatctrtctcttctgagcctgttgtatctggagcagagctgggcaggaggtggtaagcagaggctctggggcctcctagaccctttgcagagggaaccggagatgtcttccaagtccccaagtctggcaccacctcgtctcaatctcactttcccctccaggtctagcagacttggcctccatccacagggccttcttagcgcatgccctcttcgcacttactcccacttccctccccatccctcgatcctctgtccagaggtcccaagggcctgttcagaccctgaactctgcccagcagcccctcactctgkcctctaccagggcgccttccctggggctcctgctcatcctgcagtgcccctcccctcccaacccctgtgggggtgtcccatcactttccccagcacccacttcccacaggccttccctcctcccctgcctgctgacccggcagctcccgacagcacggccttgtttcccagggaacaatgcatctgtgtcacggacaacaatgtcctttcatgtcaggcgcactggccccggtgcacgccgggacgtggcacaaagggtgctttgtgcagctcagggatgtgagttcctggctttgccatgttggtgctgccgacccggggcctctgtccttgggtcccagttatgcaacagtcagtcgaggctgtggggctggcccaggggctttatctgtctccctctccaacttttgccaagttacccttctgggcttccgccagccaggagcccacactccctcagccctcccacacgctcctctcacctcctagctgggcttcgctgacttgaacctggccgagtttgcgggctcgggctccacggtgcgctgctgcctgctcgagggatatgacacgaagaacactcgccaggacaactccatccttaaggtaccagggatcctgccacctctgccaccctgaccacgggatggggacaaaccaggctgctcatcagaatcctctggaggagggttgttaaaaatacaggccttacctgaataggtagacatcgggaaggggcgagccctggaatcaggaaaccactatcagagggaggcctggctccgctgttggcctcagtttccccatcaagttcagggagggggccctgacagtctccagggtttggcaagcacctgcagtgggttcacgtcatgctgattgcatgccctctcttctcttgtggtcccctgacagcagccccacgagctgtggtatctttgattagtcccagcttcaaatgggagggagttaaggcacagacgttaagtcatttgcctgaagtcacagacagagctggcacctgaccaccagccagttgacttcttggcccagctcctaactcttccccaagtgacacgtggtagcctggcccccagtggattatcagtgaaaatgatggctgctgagggccccgggggcaggtttccagtggacagggcagccccacccccaggcagctgcctcgttggccttttgggaacagaaatgtctgggtgtccgtcaccagcacacctctcttcctctgtttccacacctttcacctggccgggaaaacaggctgtcctaacagcgcctctgcaaggggacccagggagagcctatggtatctggagcagagctgggcaggaggtggtgagcaggggctctggggcctcctagaccctttgcagagggaaccggagatgccagaaagggtccaggctgattgtcttgggagctggagcctttcagcctcagtcaggctgaaaagcacaggcacagtagccctgtgcacctcaggccagatcaagggagcctgggggccaggtagccttgggttcaagggaagctcccccacatcctgtctgcaaggtcttgggagtcacttcccctctctgagtcttggttccctcatcaacagccttgggctagctaggatgctttcatggccgagtgaataagccatagaaagcctcaacctagtggtcaccctttcttttttttttttttttttttttgagacagagtctcgctgtcacccaggctggagtgcagtggcacaatctcagctcactgcaagctccacctcccaggttcatgccattctcttgcctcagcctcccgagtagctgggactacaggtgcccgccaccacgcccggctaatttttgtatttttagtagagatggggtttcaccgtgttagccaggatggtctcgagcccctgacctcgtgatctgcccgccttggcctcccaaagtgctgggattacaggcgtgagccacggcacccggccgaaagcctcaacggagtggtcaccctttcataagtggtgacgtcaggatctgtgctcctcttttccacttgctcatctctgcctgtcactccatctcagcctagattttagggcccaaatcttgccacatttgggctgttgttagtttgcaatggcttcatgctttttcatcagactttcaccaaaccctgcccaccacctgctgtgccaggccccatgagccctcttccctctcctgcctgctgggttgagctctgtggtccttacacagggccggggtgagtgtgtggcttcaccatggagaagctcattgtctaggcctgtagctgatggcagtccrctcactctgccaggcgcagggctgagcccaggcctcaccttgctatgccctcccctctggtctgccaggcaggccttggttccatctctgtcctccacacagggaaactgggctcagagaggttagtggctttgccagagcccccaagccaggagggggcagagagacaggattggaatccragcccttctgaggccagagccgaaaggctgcagggggccctgygcctgggcaggctgtgggtggycagggcatagctgattgctcccctcgccacaggtcaccattggtatgttcctgctctctggagatccctgcttcaagacgtgagtgctggcacaggcctagggagcggatgggagcccagtcccgggcactaggggtggaggaacagggactctgggtgtcctctgttttcatctggtcctgaagcagggcaccctagtcacacctgtctgtcttcccaaggccaccatcgactgccaagtccatctccatcccaggccaggattcctccctgcagctgacgtgtaagggtggtgggaccagcagtgggggcagcagcaccaactccctgactgggtcccggccccccaaggctcggcccactattctcagctcaggtacagttcctcatctgtccgcccctcccctgctagcggcccgaggggtttacctccatgtcatgcccaggtccccagggagacgctgactgaggggagagtgatggtgggagggtgtttgcatgctcctgctgggctgatgagacctgatcaccttgtgcgtgctggctgtggtgctgggccctgagatcacagctgtgccttggactgagactgatgtggcctccccatcctcaaggccctgcagtctagcagaagaaacaggcctcaatcaagccatagataaatgcatgtctacctgcaaacaggataaaagctggggaagacaggcccagaaggtgggatccatctggggccagggaaggcttccctgaggatgtagtatctgagctgcattcagggggtgaggcacagtatacctggcagagggacgtgctgggagctcttgctctcccacatactctatgactttgactggccagtttgcgtctctctgtctcagtgttctttggaaaatgggattggtaatagcaattacatcccaggtcactttggggattaactgtccacatgtgggcacctgcccagcacatggtaagcacttagtgggcactctgttttttgtttatgtttttttagacagagtcttgctctgtcgctaggctggagtgcagtggcgcaatctcacctcactgcaacctctgcctcccaggttcaagcatttctcctgcctcagcctcccgagtagctgggactacaggcgagcgccaccatgcccagatatacctttttttttttttttttttgtatttttagtagagactggatttcaccatatcagccaggatggttgccaggatggtctcagtctcctgacctcgtgatctgtctgccttggcttcccaaagtgctgggattacaggcgtgagccaccgcgcccggctgggcactctgtttttattaaattatcactggtactaatgttatgaaaaatgtgaacgagccccaacccccagaggagatggtgtggcaattaggaggagggggtgttgccaggacaggaggctctggcctgcccccaagtgtttgctgggccccctcaaccctaagcagggcccccagaggtatgagccttggactgcctccaggctgattagtgaacaaggtgtcacgtgacaaccctgatttgtcccacagaatcagttagagcacaggcctcatgtggcccagcagatgcttgccgagtgattctgcctctgggaactgagagcagtgagagaccctctgacctcaagggcccagcttccctccactcccttttccactgcagacccagctagctgaggcccagaacagaaagctgggggcttcccagcacaattactctctccagcccctggatggggttccccagaagagagatgtgtctggggactaggccaccccagcgcaggtggtgccttcgtgtgaagtagaagaggcccctcccccaggcagggtgagacttgagtgcccacttgcctctggagctggcctccccccatatgcagagaacctgttggggacttgaaaagccacatagttatggatgggcacacaggccagcctggggtgtcacaggccagcctggggtgtgttgggcgggaaggcaggtggatactcagagccctgggtaggtcccacctagtcccttttgcctcctgctggggagtgccaggaaagtctgttttgaagttgggcttatgggtgacttgggacaggactgtgggcctgtccctttgggccagaccgctcgccctcaccatgtcccttccactccaactccgctgacccaggccccttccagcctcggggcctctgccgatgctgttctctgtgcctggaaagcccttgccctcttgaggccttagctggctccctccagcaatgtgtcctggaggtctgccattaaggccgtctccttggagaagcctcccctgtccccagactgggccagacccccagtaagcactgctccctgctgtgcacctctcactgcggttgtgggtagtggaggcagtttttgttcagcgttcttcttcctcgctgacctgtggtgggcaccccacccaagtgtgccctctgtggaatgaagggacctgggttcggagggtgacctatggctcaggctggttgctgctcctctgaacctgtttttcagtctgttaaatggcgccctgccatgggaggctctgtgagggcacgttgtgaagggcgacagtgagcagcactgggtgacccctgtcacctcaccccctgccccttcctgccttccagggctgccagaggaacccgaccagaacctgtccagccctgaggaggtgttccactctggccactcccgcaactccagctatgccagccagcagtccaagatctccggtgagtggctgcctggccctgcccccgtggcctcctccttcctcgggatcccccattgtgatgctcccctgcrtcgcccctgacaggctacagcacagagcactcrcgctcctccagcctctcagacctgacgcaccgccgcaacacgtccaccagcagcagcgcctctgggggccttggcatgaccgtggagggccctgagggcagtgagcgggagcaccggcccccggagaagccgcckcggccaccccggcccctgcatctgtccgatcgctctttcaggtgaggcctactgcttggtgccccctggagaacagacctctcccggtggtgccttgaacctccgcttctttacctataacacagggaccgtaaggtccccacctcagagggttgggtggtgacgattccactagctgatggccctgaagggtgcagccatgcccggcgtgcagcaggttctgttcatggctgctcttgcggttttgtggatcagacaagagcacgatctgctaggtggccttaggaagctgacttacctgctcattgcctggcatcctcgtctataaaatcggctcatgatggcagctgcaccctattgtgcatgtgaggtttcagtgaagtacagcacggagcgcacagggacattctgagcgccgctgcggctgactggcattattgtcgtcgttctgtgcttgtacctgttactgccctgaccgttgtgacttgtccccccacgacctgacccaggcggaagaaggactcggtggagagccacccgacctgggtggacgacacgcggatcgatgcggatgccatcgtggagaagatcgtgcagagccaggayttcacagatggcagcaacaccgagggtgagccgtgctgggctggtgggggcgaggccacctgctccaagggctggccctgccgcgctcagcctccatcctctcctgtgtccccacagacagcaacctccggctgttcgtgagccgcgatggctctgccacgctgagcggcatccagcttgccaccaggtagggcaggcttagggaggggtcgtcggggcggctggggcttgggggtgagagcagagtccccacagtccactcacctggccttgaacgccaaatcttgtcgccacagtgtgaccctgggcctgtcatgtctctgaacctccctttccccatctgtcaggctgtgtggacaccaccacctcacctgggagcctggggcagtgagggcacggacaggttcggtggtttcccacagttcacaaggtcacctccagcaatgcctggtgcagggctcagcacatggcaggggcctcacacgcatttatttagaaccctcccttctacttcctcccagctccagggactcgggaagaatggtggtggtgatgcctcatgggtttactgaacaaatctttccctagcaccagctaggcactaggccctaagtgaaggcctggttcaatgcaggctgctgcctacacagcatccacagatggcaggggtagatgggaccaaagttgcgggaacgacagtttatagagtgctgcgtcacagacattcatttggagcatgttgactatgtgcctggctctccatgtgctttggctaaccaaatgaatgagcgagtgagcgaatgagcttcccacaggcgggctgctgagggcaggtggggagcccgcctaacatccacatccccagggaagaggcgtggccaggccgctgcgcagaggctaccctctcaagctgctctgctgactcctgctggccacggcctggaatggcagccatcacctcccagtagcctcctgggctgctctsgggtgggggtgagggggcggtgagcaagaaggaaactgaggggctggcttccttatgggtttgtaaacacacccctccctggccccctctgaaaatgaggaagcatcttggggaaagaaaccaatctggttgggagcgagatcacagcagagctacatgctgagccccgagagtccccgactccagggctgggcctgggctcggcagggaaaggagctgaccaggtttcctgacttcccactgccctcttggtcaccctcacatccctctgagcctcagtttcttcacctgtcaagtggggcaggatgcagtgactccctgccgaggtgaccgtgaggatggggtggcacagccagatgtgcccrgaagggctctgcaggccccacagactctgatgcttactatctgtgtcactgtgggcaagggacttaccatcgctggggcacggttttagcccctttgcaacacagggctggttaacagtacctgcttgtgaaacacctccagaggcctggtccagtggagcgctcaggaaatggggtatcgagggggacatgctgacctgtctctcacctgcagggtctcttctggggtctacgagccagttgtgattgaaagccattgaggagcaggtgtccgggctggagaagagtcctgctttctctggagtccagacctgtatcattccatgaggaactttccccttcagatcacctctgcgccacatctcatccatgcctcctccatgcactccagtccacactccccgtagcatcattccattgcccctcccatccatgctgggaccctcctggcccaccaaggcccaggcaccactgtgaatattctcctctgaaccactagagggcaggccaggcaggccaggcgggcccgtgcagcttgtgggcaagaaggagctggcaaggaccggcgctgctggagactgacccagccctctggctgaggacatgcagcrgctcctaaatgtagagatgcctgtggctgagggggcctctctacctgtgtccccactcactccaggagcactggctttggtcacgtcttagcagcagggccttgctccgttgytcccttgccctggtggtgggggggccagaccgcctccggaatcctgccacctgtgactgtctgactgcttagtgcttcagctgtcccttccttgtgtcctgggggacctgctggcggcctcttcctgggagccatgacctcagaccccacccacactccagatcgagacccctgcctccccccggcaaatgtcctcccgctgccttgcagcctgcactttgcacatgctcacccccagcacagtcccactggcccctcacctccccttccstgagctccttcccaaggactcctggtcactgcctgctgtgcagtcagaggcccagggtccagcagcccggcgggaacgggtgctgcctcttcctccagttagctccagctcaggtctgagacccgtgctgagaaaggtctgagcaccgaccgtgccctctgcccagggctgggtcctgagcagctggttttcctgcaggaaggttggagcaagcaaagtccttctctgccctcagggtcagctgcccagactggggcggatgccagagaggcaggtgggctgtggctggactggtccggagctggcttccttaccagaaaagcctcagccttcctctggaagcatcccccgttctgggcaagggggaagggctcctttaaggggtgtgctttcccagtggggagcagtctggccctgccccctactaaagcctctgctctcagcactttcccccaagtccttgtaacttgcttgaaggtgggttctggctgccagccagtccctggacaaactctcctgccccttttaaatttcactcattttgtataaacccagcaggctggtgtttacttagccctgtagcttttttcattttttctttccgtctttcttcttgagttcacggttcaatattgcctcctcgccctggtgaggggaggtgctgcttttctgccccacctgccggctggttccagcagcgctggggcccagctggggggccgggatgggggcttctctctctgggaggggtgcaggtgccctccccaggctgggagggttccttccctagctccccatctgcccccgctggtgagagttgggcttcttggtcttggaactccctggcattgggaacagagcatttccagcatttgttgttgttgttttactcacctaacccttagaaaatgaatgttagaaggtgcctgccgaggcgggacagagtgttygctcgcgctggagaaggctctgctcagccctgagagtcccttcctgccccacygatactggcactttaaaaaggaagctgaccgcacagtgtccagacgaattggcccccagaagatggggagttctgtcctgcccttctgtgtctgcgtgacctcacccagcctaggagggaggtgcattcagggtagatttgcctctcattcaaagttctggggctttgggyggaaaacagccagctttggcgctgttggggagactcctccagaccaggaaccccagaaggagacagagcctgccacatcctcccacgccaggccctgggccagggtgattggactgagaatttggccacaaccaaattgatgctggctggaaccagaggccagaaagcctggccttgtccccatgtgggagccctgtcctcagccctcttgtccccttgagctcagtgaattcccaccaggtgcccacagctcctggacttcaaattctatatattgagagagttggagagtatatcagagatatttttggaaaggagttggtctatgcaatgtcagtttggaatyttyttgaaagtttaatgtttttattaggagatttaaagaaaataaaggtctacaatatctttaggtttttttttttcctgtttaccgcacaaactgaccacatggcatgtctatcaggatggagggtgtccatgttctcctctgtctttagggaggtgataaggagatgggcggaggggtgtttttttctttgactcccctcctttctaacagaatgttgccaccactgcttgagtgggctgtgtttgttcctctgtcccagcttctgttgtagaaaataacattgttaggggaactcaggctagtgtcagcgtcttggtttggggagaaaaaattaaatgtttcggtttttgtttcttttgctgttttgtttttaccttgttactttatcatattgactttagggtcaaaggcaacatcagaagaagtcagatatgtatagtgacattccaggggtggggaaggtgtagggatccagggttctcccggtcttggccacaggcacaatcatcaccttcatcgttccagattcctggggagaaaactgagaagatcgttacctgccagcctcatacggagcaaaagctctgtcctcagggccaagttctaaccactgctctgtagaccttctctgcaatcaagtggcctctaaggagcatgcctgaggacaaataactgtgcctcagtttcctcacctgcagatggggttatcaaataacacgagtgtgcagcctgacctgcaggaggtgtgagtgtgttcccaaactaaagccccaggctgccatcatttacaggcttggcttgccccgggcccctcacccccgtttctgaccatcccaagtctctctgggacaggcaagtcactctggttctttaataagcttggaggtgttgggaagcttcagtggtactggccaggccaggaggaatcaggccaccagggctccatctctatcctgggatagcattcaccccactcctcctcagggctgaccccgactcatggcccctttaaaccctgaaggccgattctgccccttcctctgttatatgcacaactgaggaaggaggtaaaagtgggctcctaggtgagcccaaagtctcctgagagataagggaaaagaattggactgtaggtttaaaaaagttgctcttggccgggcacagtggctcacgcctataatcccagcactttgggaggctgaggcaggaggcagatcacctgaagtcaccctgaccaacatggagaaaccctatctctactaaaaatagaaaaattagctgggcgtggtggtgagtgcctgtaatcgcagctactcaggaggctgaggcaggagaatcgcttgaacccaggaggtggaggttgcaatgagccaaaatcgcgccattgcactccagcctgagtgacagagcgagactccgtctcaaaaaaaaaaaaaaaaaaaaaaaaaaagttgctcttgtcagctttgggagggcagactccatagttggagatgggcttccaaccaaccaaggagataaatgccagagggagcgaaccatgccaggctcaaagcacatctctccccaaactccccaggtggggacagcaggccaaaggcctccacataacccctcagggaggcctggagtccagatgctgtactccagtatctaaacaatcactgaatcttaaagctgacaggttcaaagctcttactttgggccgagcgcagtggcttacgcctgtaatccaggcactttcggaggctgaggtgggtggatcacctgaggtcaggagtttgagaccaacctagccaacatggtgaaaacccatctctactaaaaatacaaaaattagctgggcgtgttgacacgtgcctgtaatcccagctactcggtaggctgaggcagaagaatcgcttgaacccaggaggcagaggttgcagtgagctgagatcatgccactgcactccagcgtgggtgacagagtgagactcccgtcttgggaaaaaaaaaaaaaccaaaaaaacctctttctttgggccaagcctccactgagtgccagggatacagcagcaacctcagaccctaccctcggggctgacagggctggatcaacaattgcatcagtgaattaaaaggcacaggaggctgggcaccgtggctcacgcctgtaaacttttggaggccgagttgggaggatcgcttgagcccaggagttcgacaccagcctggataacatagaactccgtctcaaaaacaaacaaacaaacaaagaaaacgttcccgactggcttccctgaggaacgtggcgtcccagtgagaccggatgggtgaggagcagccggcctgtgagtggtgggggaccgcgttcctatctcggagctgaagaagcgtggaagatgatctggcccaacatctctttgttctcagaggaagggccttccaagaccggggaggggcctgtgcgtgggtcccggtccgaaacgtgtctgggctgctgcgagaggcagtcggtgaaggaagggaggggacatccgaagggtggcccgggaggccgggcgatggtgaggagggcgcctcctctccaccaaatcctccccatccatgcgggctagggacagaccctcccccgcccaccctaggctggaaagtgaacgttctctgcacctctcccacctacagactaagtagggcacccggtttccgtgtcggcttcaccactgactcggaatgggatctacctttctctgagcctcacttttcccatctgaaaaatggaacttccgatcccgcactcccatcccactctggccccgggactctgggatacttagagattggcttttggtggggcggcgacaggactgtggccatgaaggccagggagtctgggtccccaactcggtcccattccctagagagattcgggcagcaaccggccccacaatgctcttgagaactacacttcgccgatatgcaaaggagaggaggcggttcctgctcgtctccgacgaggtgggcccgagcaggcctggggactacgactcccggcgtgctccgcagtccaaagccggaagagcgtggacccggaaccggatgtggcttgcggctcgggtggctgagcgcgcggggaaatggtgagattggcaccgtgtgccggagataggggcgtctgggggtggggtcccgggtctgctcaggagctggggcatgggcacttggaacggggattgctctcccgcccccactattgtacggacgacaacgcggaggcctagcattctctcccagcctagaaactgatccctagtcagccttctaccatctgttgaatgggaagcttagaccgtgatcgggccgcgacgccccgcttccattagtgcgccgaaatagagggtcacttcgtcagctgagacctcccttttctccaggccacggggacagaccaggtggtgggactcggcctcgtcgccgttagcctgatcatcttcacctactacaccgcctgggtgattctcttggtatgtcattctccccgtccgctgctcaccttccccgagccctggcaccgccagagcaactactatataggctctaggcacggcgctggcttcattgcctgcctcatctcttgaactctccagaacaactctatgaggaagatgccagtggtaccgcattttatagatgagatagctgaggctaggggagaaggatctggcccaagattgcatccttagccgctacacttataactctgtttccggcttgctttgacttttgggggagttctgttccttctgggttagcctgctgactcttaggcatggcaaacgccagtgatatttgtgaaggcctttaggatatttttttcttgtgggaaaacttgttggttattgcttaagaagtgcagtgtgtctggaagtgcagaacttggtatcctttagagaaaaaatattagtgaagaagccctggaggcccaggttgggagtcagtcgaggattcctcaagtaccatttgctaggctgtgaggtgccttagggcaggtctcttgtgccctgttctcttgtccccaccaccaacctatagcaggcaccaaagcaagtgcccggtaaataccaataagaaattaaggaaagaaacaaaccacgacacccaaatgccgtaatcttaaagaaaagcaaatgcagtcccagtcctctgaatgggtcagccccttagatggaggaggtgggacgtttgggcttgggggctcggcaaggcaagcaagacacaccagagctcttccctcgatgccagccattcatcgacagtcagcatgtcatccacaagtatttcctgccccgagcctatgctgtcgccatcccactggctgcaggcctcctgctgctcctgtttgtgggtaagtcatcacctcctccccttgaccctgggcagggtttcgggaagaccccacctctgaacatgcttccacactttggcggtgctggaagctgcttgccccgaactcacccgtggggttttcctgttcatccttcgaggctgccagtcagtaacctctgggtttcctggtgccccaggctttttggactccaatgacctgtctacctctttcctgccccaaccccatcatcactctgctcacacctcagtcaccctcttgtcaccctggcttctaattcctgcacctctctctctcatggcttcctagggatggggactgtgtctccatcattactgcacatctagaacaggctgtggcactgaggctgtgctcagaaagtcatttggatgagtcagtcaacagccgggtgcctggatgatgggtggatggatgggtgggtgggtgaggtgtaggaggaggtgggtaggtatgtaggtggacagacaagtggttgaccgggtgatcgatagatgggtggatcttgttccccttggaatctgaaacactaaatgcagcatcttgcttgaggcaggcactcagttggtgtttgttgagtgaatgtgagtagacatatgccttgacgaatgactagggagataagcaggttccctggaggatggttgggtaggttcacagccctgtgtgtgggtggctctgctgtgtcatgccctggcctcccagcagccctgagcttagatcttatgtggcctttctggtctgtgtatcccaggactgttcatctcctacgtgatgctgaagagcaagagagtgaccaagaaggctcagtgaaggtcccgcagggatgaggctgccagccccttctctgcttcccctccagcacagggaccaagtgggggagcctgcagaacctgtccaggcacagtggctcctcaagcctgcctgtcctgcagagtccccatggcatggagcttacacctgactgactggagccccctccccgactcccacttccagaagctaggagggagggatacctggaagactccggtcacctccttcttgctcagggcctaaaagatgctggtcctcccaacctcactctcagactccctgccaccttttcccctgggttctgccgtcttgcctcacttcccctcctgtcacatgctgacgttggacttagcaggttctaaggccacatgtgtgacctctctgacttctcttcctccaccaaggcagctttccttaccctgacacagccccagaccccacaaagccttctggacctggaaagcctggggaaggactgacagaccccaggaccagccctggggctcagggcagccaccccgggccgctgaccgactgacctctcctcacggaggcccagccccaaagccccagggctggcccgtttgggacagctgaccaataaacactgatggtgtgtttgtctctgtgccgtgtttacccagggtcggggctggagcgggctgggagtggtcttgggtcaggagatcctgtacagtaggggtgactcgggggccttctgccctgaccctgtgcgctggggataaagcagggactgggacagatgtgcttcctacccaatggagctcacagctgggagtcattggaggccctggcacccctctgccatgcctcccctgtgccagcttggccgggttggatttattactttagggacccttgggccactcccctaaaaaccccacagcccaacttaacgtggccctgagcagtgaaggctgctctgtgttcaggttggctggactggcccagcccctagccttccagcagtcccaccgtgcctgggcagctggctctcccattttccacggcacctagtgtaaacccccattcctcaaacccggttccctcacttttcttccagttggtggaggtatcttcctcatcacagaggaaaaaggccaactgcagacacctgccctgtccccacctgctccatgctctgtcctccagtccaggcagaactgcccacttgggctttggatcctaaacccccaactactgtagtgggagcctgaggtcacagttggcgccccctgttgtgagaaagatctccatgggatcctcccattgttccctgagtgtgctctgggatccca

SEQ ID NO: 96853 - DNA, 300351 bp, Homo sapiens
  misc_feature (1)...(300351): n = A,T,C or G
tttttgtatttttagtagagatggggttttaccatgttggccaggctggtcttgaactcctgacctcaggtgatccacccacctcagcctcccaaagtgctgggattacaggtgtgacccaccgtgtccaccatacataggcttttaaattggctttgatggaacttcattacataagaggaatctcagaaaagactttttaaaagtcgagcccagccatggatttgtgccatgaaatatctgtgagttgggtgaatttcctctcctcttgaggttccaagataaacctggggcttctgggcctgtcagaatgtgacgttatttacttaccacacatcagaaaccctgcatagggactgtatacacaaaatatgatgccagttttcccaagggctttattggctccgtaagtcaggtttgatttctcaaaggaaagcacactattccagtcaaagccttggttaaataaccagtttctccaattgtgtcctgttacaaatgaaaacggattctttttttgtttttttagatggagtctcactctgtctcccaggctggagtgcaatggcatgatctcatttgatttcaacctctgcctcctgggttcaagcgattctcctgcctcagccttccaagtagctgggattacaggtgcacgccaccatgcccagctaaattttgtattttgagatggggtttctccatgttggtccggccggtcttgagctcctgacctcaggtgattcgcccgccttggcctcccaaagtgctgggattataggcgtgagcctctgcacccggccaaaaacagattcttattgcacttatgcaaataactgtcttgccataagttaagaatattcacaaatagcttctaatttctgaagaaatcaggtagagagaaacaaatatgctccaaattttttcataggagtatattaaattgttaaaagctgtcagtagctcaaaagaagttttaagactctcaaacacaaaacaaatgttcagcaaacattttaagcaaaaagttataaagattagttcagtccatgcagttaatttctgttctgcctgatactcatgaacattttagctctccatgagtcctaaagtttttcttctattctgatgtcacactctccaaagttatcagaaacctgcattcaagaacaactgttagagttccatagctgactatagaaccatcttccaaagaggaccaaaacaagacaacaattgttcgtagatgacaaaaggttttagggcagccatagtcaaagacaaaattgacaaggaaatttacctctgtggcatacaataatttaacataacaattataattattactgataatgtacactaagttatatcagaattataggagtttcccataatattggaacacatattaataacataattatagaaatacagcctaaagaaaatgagacaccatttcatatttgacaatgctacctgtatcatttttataccaaataaaccaaattatgtcatttttggactttagggaacctaatctctcaaaggattaattacatcagaaaaagacctaatttacaatttgattttagaaagcttgttgagtatcaaaggtttaaaacacttgatatcacaaaataggatcacaggtcattgtcaaataagtcattcatttaaccaaagtgataactcaatgttttttttttttaaaaccttcattctttgagaggcaacttaattttccaagcaagaagacttaagaaaaacagcaataagctaattaaatttgtttttcaaaattttataagtgatctagaaaattttaatgttgaccgtaagatagagcttccataagccttttataacctttataggctttctttttttttttttttttgagacggagtctggctctgtctcccaggctggagtgcagtggcgcgatctcggctcattgcaagctccacctcctgggttcatgccattcttctgcctcagcctcccgagtggcggggactgcaggcgcccgccactacgcccggctaattttttgtatttttaatagagacgggctttcaccatgttagccaggatggtcttgatctcctgatctcatgatccgcctgcctcggcctcccaaagtgctgggattacaggcgtgagccaccgcacccagcctatagcctttcttaaggagtcagttaatgcttcaagaggcaggagagtctcttttaatctgacacaggggcccatgtgctagtctttcatcagcacattcaagtgcctttgacgttagtgattaatatatagagaaattgaactttatctttcaaaatcagcccttagaatctcacgtgcccacctcttccatgatagtccctgggccttaaggagttgaacggctttaatttttggccctgtgtctcagaaatgcagtttattttgaccggcatcttctatggagcctgatgaggctttaattgctgtcagtgtttaagatttagcaggacttggtgtcctttttgacccaggagtcaaagccctgtaactcaaggtcacaaggactttagaagtacacacaagaagacacatggatatagtaacctcaattaaaaaaatttttgggctggtcgtggtggctcatgcctataatcccagcactttgggagcccaaggcaggtggatcacttgaggtcaggagttcgagaccagcctaaccaacatcatgaaatcccgtctctactaaaaatacaaagattagctgggtatggtggcgtgcgcctgtaatcccagctactcaggaggctgaggcaggagaatcgcttgaacccgggaggcagaggttgccttgagctgaacatccctccttcttaaacaattagtcattttattttaggactaaatttaccattcaatattttttttttttagtaagtgctttttttttttttttttgagatggagccttgctctgttgcccaggctggagtacagtggtgaaatctcggctcactgcaatctccacctcatggattcaagcaattatcctgtctcagcctcctgagtagctgggactacaagcgcatgctgccatgcctggctaattttcgtatttttagtagagatggggtttcaccatgttggtcaggctggtccagaactctttacttcaggtgatccacccaccttggccacccaaagtactgggattacaggcataagccactgctcgcagccaccatacaagattctttctcgtataacattatttctctttaagctttcttaccataaaaaaccttttttttttctgtctttacatctctttttatttcctggtttcttttaccttgttttattcacaaccttaaaataatctttgaattagacaaaactttttcaccttttttaagaaagttcacactttttaaaatcaagaatgttttcctatattatatattttattggaaaatacccaaataatgaaatatctattaatttaactttatattataaattaagacaagtttgtctgccagtatttatcccattacatttacctaatttttttattttaatggtttacctagattatgaaaaccacaagtcatgattttttttttttttttgagatgtaatttcgctcttgttgcccaggcacctgtaatctactgtaatctccagtagctgggattacaggcacatgccaccacagctggctaattttgtatttttggtagagacggggtttctctatggtggtcaggctggtcttgaactcttgacctcaggtgatttgcctgcctcattctcccaaagtgctgggattataggcgtgagctactgcacccaggcccaaaagtcatgatttaaagttatgaaaccgctgggcgtggtggctcatgcctgtaatccagcactttgggaggccgaagtgggcagatcaccggaggtaaggagttcaagaccagcctggccaacatggtgaaaccccatatctcctaaaaatacaaaaattagctgggtgtggtggcggatgcctgtaatgccagctactagggaggctgaggcaagagaatcccttgaaccagggaggcagaggttgcagtgagccgagattgtgccactgcactccagcctgggtgacagagtgagacgccatctccaaaaataaaattaaaaaataaataaagttatgaaactgccattgcaaaattataactgagacagtgaggaagatatgacctaactgactccatcttgcttctaaactccaagctgtcgttgttcattcctggactttgggagaaatttagtttatagtttagctttgaaacaaagatggtaacagtcctttcccaaaacaaacctacctaccatctgtggattagactgcctaaagccacaaaattagaggttatggtaattttactaaataattcaagatataactacattcattaaaccaatatcaacatcttatttgttaaaggttacacaagcaagatcattctgtcttgggctgcgtttatagttttgttacccctatgccaaattttgacaccttataatatttggcagggatgagtatgaaattgcttcattaatacatgcaaagaaaaatgtaggcgggcaattcttaagatgtttctaatattaccttaccattaattttaaagcaagcttatttattaaagattttacttaagttacataaacttgaaagagcatttcactagtcttttgtagtatatgatttaagcgcttttcattgttttaagccaattaattagcactcttttatatatttttagtagtgaaacactgtgtacacaacacataaatacacagacatattaggcatgctttagaactacattttacagatttatgaaaacctttttttcccctatattagactttcagattcttgatgacctatttcataaccctgggcagttttcagctaaatagccttaaatttgcatattaaaggaaacaacttaggtgaaagtcaaatagcaaaatttacattataaggtcggagagaaaacgtttggtgtgctagagggaaattaaaacagatttaattgccaattaagcataaaatcgtagaaattataaaggccttttaaatatatatacacacacacatagacacacacataaacaaatatcctatagcttttacttcagaacttttagccatgagataaacacaaattcaccaccctgcaaaaagaacttgttggatgcagtggtttttatcttaatagaaaaataacagcagatttagagcaggcagaaaagaaaaaaatcgagaaaaagagcacttaggaactctataatttgcaggtcgatcttagggctctttttccttaatgtaaatgtgcacaaagaccatattatttccattttacataaactttggcaagtagatgtgccatacaacctatggagtgctggaaagggggtcattctctttgtttcctcctcattcttatattgtttcccaatttttttttctctcttaataggaggaactgagctgtggcccaggttttttgattgctatgtgctgcttgtgggcaggatgctacagtgtgtcatcgctgagtcgtttccaccctcttacatgtctcagtttctctctccagaggtttatgaccccagaaaaggctcaaaaggctgggcgatcagcccttatatgcgtttcctggatgagccatttttaaaattaatttttgttggggatttccctccagggccgctgcacgtcgcaaggggttaacccccccagagactcccatgaggcccccagtcacctaggggcgctttcagctgggaggagtaaatgccttttctcttcagagctgagaaaactgtcattaacgtatgaaaacaacagttcacttcttcacgcaaatgcacacagacaaaccgaattaagtttaaatttgggagaaaaagcaatagagaagaccctttagaatgcatctctgaacaagaattaggatccttaaacaacaacttcagactggaacaaagcaacaacaacaaaaaaaccaacaatatgatcactgagcgctctaatggtaaggagaaattaagaccagctggttgttaatcttaactttatccaagacaaaccccaattcagttacctatctagggatgggtctcaggccgaaggctgctttctaccatcctagaagcaggaaaaaaacaaaaaacaaactcatcttccctgttagaagtgagctcagactccataggagttacctgcattccattgtcatggaagcaggagaaaagttgccttccttgtgttggaagcaagtaaaactctagaaaaagaggagttgtacagcaaaataaactttagatcttgactaaattttgggagatcagggattctctggacggggtactctcagacctcagcaaattgtcctattggtttgagccataaagttagctcatgctggtaccatgcaccaatgggagatttgtcaaaagtcaggggcatctccactcagaatccctcaatgattaccaaaatgtgaaccctgaaaatttgagacaggtctcagttaattcagaaactttattttgccaaggttgaagatgcgtgcccgtgacacagcctcagggagtcctggcgacatgtgcccaaggtggtcagggcacagtttgttttcatacattttaaggagacatgagacatcaatcgatatatgtaagaagtacgttggttccgtccagaaaggcggggacaactcgaagtggggagggggcttccaggtcgcaggtagstgagagacaaatggttgcattattttgtttctgacaagcctctccaaaggaggcaatcaggtatgtgtctatctcagcgagcagaggagtgactgaataaaatgggaggcaggtttgccctgagtagttcccagcttgacttttcccttcagcttagtgatttgtggggccccaagatttcccacaagtgaaaggaaaatatctcaatcccccgccccaaatcaccaagctcaaaggaaaattcaggttgggaactgctcaggccacacctgcctcccattctattcagtcacccctctgctcatgatgaacaggatgctgctgaaccctggggtcgctggggccttaaatgactttgatgatgagagactgggcatggagagctagaggccctcatctcccttccccagcgagtcggaagcgtccccattactagttcctagaatatgctgagatgtctcaggttgcggtgtgcagctgggagttgcagcctggcaggaggcccaggttttagcctgtgaaccggggccctgctatgtaggccagggtggctctgacctggcactctgtggggccagggcagacatagcagcaaaggccatggggtcacaaagagagagactgcagaaggatcaggagtaacaggcataatggggctattcttccctaggcctgaacactgggaaggcactggcagggccccggttttgatggtggattcttggagtaggggccttggtaatagggctctgagtgctggggcagaatgggctatcttgacccttcatagtcagggtcccaagtgggcaatcctggagcctccaggtctttggtccagcggcggggttttccactcaagggccacaggtacagacaagcagagcagaaacagcccccscggcctttcacttcccacctgcycccgagggagagagtaaggtttctgggggtaagtgggggctatctgaaagaaaagggtgattttggctggggctcggtgccctacaagagcccttgcttgactttgacgcaaggcacagactgggctctgaaggggcaggctggggggtagacgtcgtcatggatgttggatctcccttccggccatggcccaagtacgacccctgttcccttaaagtcaggacctcgcagaactttcgcaagatgggtcctcggagtctgcccgcgattgcgctcccaaggggtgccgctgccgagggtaggcgcgccagtcgagatcaaagcggatgggatgacgccactggagggcgcgcggggccgcggggcagggtggtgctcctgctgcaggtttcaggcctcttctgccttctacagccgccaggtcagcagaggcggaggcccgggctgtggatggccgaggagccgaactcgtgaagccacgttcctcctgcagctcttaacccaggcgcggcggctcgccgggccgctccccttactccgaaaccgtgagcctcagcccttccctctctccccaatcccagggggcgccggcggacaccccagaaacccacgcgctctcgttcctggtcccgccccctctacgttccctccccctctacgttccctccccttttccttccagaggcggcggccccggaagctcccgccattctggacccgccccctccaagctcccgcccctttcccttcctgtggaggcggcctcggaagctcccgtctttctggacccgccccttccccaccctgctccgccctcggccccggcccccgctccgagctcccttagctctaagcggttccggaagctcccgcctttctggacacgcccctgcctcccccacaggattccgactctctcccggctcgtcgagggcttgacattttaccggggggtggcccagaaaaacctcgtagagatggtgactttaaaaaattctttttcggctaggtgcggtgactcacgcctgtaatcccagcgctttgggaggccgaggcgggcggatcacttgaaatcacgagttcgagatccgcctggccaacatggtgaaaccccgtctctacaaaaatacaaaaattagccgggcgtagtggcgcaggcctgtggtcccagctactcgggaggytgaggtgggaggatcgcccgagctgggggaggttaagsctgcagtgagctgtgatcgcgccactgcactccagcctggacgacagggcaagattgtgccttaaaaataaaaacttgttttggtaaaatacacataatatttaccatatgtactttttttttttttttwaatggagtctggttctgttgcccagactggagtgcagtggcacaccactgggttcaagcgattctcgtgtctcagccacccatgtagctgggattacaggcatgcgccaccacgctgggctaatttttgtctttttagtagagatgggggtttctgccatgttggccaggctggtctggaactcgtggcctcaggtgatctgcctgccttggcctcccaaagtgctgggattacaggctgagccaccgtgcccggccctaccatgattttttttttttttaaacagaagtcttgctctgtcgcccaggcaatggcacgatctcggctaattgcatcctccgcctccggggttcaagtgattctcctgcctcagcttccagaatagctgggattacaggcacctgcaccatgcccagttaatttttgtatttttggtagagagggagtttcgccatgttggccaggctggtctcgaacacttgacctcaggtgatcacctgccttggcctcccagagtgctgggattacaggtgtcagccactgcgcccagcctaccatggtatttttaatggccacgtaataccctgtgtgtgttatattgtgtggatgtgttatattaatttaaccagccccctattgattaacattgtagctgtttataaaatggtgtagtaaacatcctttctgtaggtctttgtgcacatatggagtatatttgtaggctgatttcttggaagtagaattgttggggtaaaagctatgtgtgtgtttaatttatgattttacctatttaccctcccactagtgacttgtttagctacatttattcaaattgtctgcactcgctttctccacaaccttacctcctactcactccacaactcattctaatttggcttctctctatcactgcaccttcaaaggctctaaggtcaccaatgatcttcatgttgtcctatggacaatcttcagatctcatttcactgcttctctaaaagacttcatacagttgaccattctctcctttgtgaaacattcttctcccagctttcatagtgccacattcgcctggttttgctctagccatgttgtctttcctctgcccactctgaaatgttggtgctgctcagagctttggttaccatctacatgcagttgatccacacagtgaagtctcccttcctaacctttattcaactgcttatttgtcatcttgagttgaatgtcccacagggacctcaaatcaatcatacccaacattatcctcccccttctcatgctcccatctcagtagctgttccactgctctcctagccagaaacctacaggtctggttacttgaatgtccctattcctcaatgcgcacctctagtcaatcaccatggccctgcccattctatttccataatccttttcccttttttttttcttttgagacaggttctcgctctgttgcccaggctggagtgtagtggtgcaatcatgcctcactgtaacctcaacctctccagctcctcctgccttagcctcccgagaagctgggaagctgggaccacagacacaccaccatgcctggctaattttccttttttttttttttttttttttgagacggaatctcgctctgtcmcccaggctggagtgcagtggcgtggtctcagctcgctgcaagctccgcctcccgggttcatgccattctcctgcctcagcctcctgagtagctgggactacgggcgccygccaccacgcctggctaattttttgtatttktagtagagacggggtttcactgtgttagccrggatggtctcaatctcctgaccttgtgatccgcccacctcggcctcccaaagtgctgggattacaggcgtgagccgctgcgccsggccaattttccattatttcttaccaacggtcacctttcttttcctccctttgtccccaccaccttctgtaccacctggacactgcaatgatattctaattctaattgcctccctggctttaggcttgctactctttttttttttttttttttttttttgaggcagggtctcactttgtaccccaggctggagtgccctggcgtgatctcagttcgttgtggccttgaccccctgggttgaagtggtaggcttgctactctttaaaccagcttccaccctgtagccagagttaactttgagaaatgcagatctaattatgttactatcctgctttttaaaacctttcaataagttctgattgctcctagggtaaagacagaaactttttccatggttgattaggctcagacaaactctccagctttttttggttaccgctgtccccttctccatgccataatttgtttcttgaaggttttctgttccttcgcactcagggcttttttctttgctgttttctccatcctggaatgctctttctttccctctcaccttaacctggctaacactttttcaatcaccaagcctcagcataaatttcacttgcttgcggatgccttccaagacccctgagacttatgcccagtgttgagagcacaataaatatatgaatatgtttattcacattacatatatgaatatatgaaccacaataaatgtatgaacgaaccacttacgggccaagtgggtgattcttaggctgcagttttttcatatgacctgtagatgtcatcattggcctcagcttaactcagtctaggctgagtggtccccagcctggtgtgttcatccagcaagttggaaaggttgtcgaaaagcccagcttcttcccacaaggtctgatacctttccatctgtcctggccagctgccttgatagggtgaccaaccatcccagttttcccaggactgaactttcagtgttccaaggacaaggaattttcagtgctaaagctgggataatcccaggcaggtgggagagttggtcacccaaccacagtcagaagagccaaaactcccatatctgacctggagcaaggtctatgcccagcaagagggcttagcttcaacccagccaagcccctcacagcaacatctgtggtgggcagaccctgcatgcagcctggtgattgtaagaattaagagagaaacagtatttacactgtaaataaatataaagagactcacctttgccaggcaatcgctaccatttagtgagtgccactgggtataacacacttacacatattgtttctaatccttatagaaatcctaagagtacagtttactccctttttggaaatgagaaaactgagactcagarattaagtaaccagcccaagtcacacaggtgttaagtggtgaaattcaaacccatgtctgttcaaccacagagctcctgtgattttccctgaacctgcagcctggccatttttctgctgctctaatcttcatttgggaacccagggatatgaatgggaagcaagaggcaggtgtgggtggaaggggttgaggaagggggcctgtgatcagggcttggggaaggggatgggcacatggcattgacagcttgcttgtcctttcatgagtgggctctgccaccttgagctaaatgtggacatagcctggggacatccagggaggctccttcatgggcccttattctgacaccaagttgggttctaattgaggagccagggctatgtttcccagagtccaggatggacctagcccactctcatatgattgcaaagggacttctggacatgggagagcacgagagttagccataaactggagggacaagtgctgggtgggggctgtgaccagggtcatgctcagtgaatgactgcagttaattgtatagccaggcttctctccttcccagggacattgtaaggctgagttttattttgcccaggcagtcacttaggaattgagctgcttttgaatagtgaacaaaagttgcttttgtacaggtatggaccaaggcctgactgtgatgggcagtggcctggcagccagatgtcccctccacaggaartgtaataagccagactctgggattccttcatattaaaaaacaaaatacaaacatccttcaggaatcttaagttccctagcagggagctgctattgaaatgcagtgggctttaggctgtgcaggttcactgcatttccttgactctgtccaagagtcttagggtgcaaaaatctgccaaggccaccttggccccagacctacccagcccctgtgtctggtgtgacccattgccctgtggtgtggccagtttctgccctgtggctccactcagctagccacatcatcggacaggtggagcttgagcaagtcctcatcagagctgggtcatgtctctgtccttccacagctggccttccatcttctatcagagaactgggccttgcacattctagggcaggctgagcataatgcagggctggagtggacagaaacgactgatgatgctgccttgtactcgggactcctgygtccttcattctgaaaacacctagtgtgttccaactgtgactaaagggaagagggaactgtgagacagtcatcaacartgtacccttacactgacctggggcttcttgccagaagctcatggaagacagtcacctggtgcggtggaaagcacaggactttatagtcagacacaactgggttctgctattttcttggtgggtgaccttgggaaagttactcaacctctctgagtcttgagttcctcaactggtaaataggaataataatatctatgtcacaagtttgttttgaggtctaaatttgctgatcaatgtctataaaaatgtatataaaaataaaatattcattgagtgcttatgatgtggcaggccatgttgaagtgctttctaagcatggtgtgaactcatataccctatgagctgtgtactttcattatctgtgctttacagatgcaaagattgagagaggagagcttgagtaacttgcccgaggtcacagagttagtaaatagcagagccaggatttggacccaagcacttaggctctagctcacacatactaagctaccaaaccatggtgccrtatggagtagggctgaataaagactagctattatgattattgtaatttagcattaagtgctttttatatccatggtgctaagtgttaattattagcatatttkgatgcaacatttatcctttttgttcctatttttccacagccatggcaacaaagggccttgtgctcactctagcagagcgtcctgcctttgtctgtgatccagcctggygcgtcagtctttgcaaacaaaagatgtgaccacccggccgcctatccctgcccccaccaaagcagtaatggaggctgaggcctctccagttgagccgagccaggagagcagcagacaggtacagatcagcaggccaggaacagggctcacaaaagagaggtcgtgcttaataaacctgactaatttcttggagcggcaacaatgccaagtggacagaggtgaaatgagggacagtaactcagtaactcatcctgattccgaggcacagaagcacagctaaaatcaacagagagagtttgtggagatgctgctggggcctgaaagggtctggtggggctcagttctgggggaagatggatggaaactcagtgagggtaagaggtacctctgagcagggacagaacacaggctgcccaagctacctattgaaatgtaaagctgactaggacgctttcctgcttagatcccatccattggcctcccaccacctaaatatcataatcatgtggacaataataactgtagttatttgatatttactatgtatagggtgctttacagaggaagaaactgagccatagagcttaagtaacctgcccaaagtcamacagttattaatacacaactgggacttcaatccagtttactgtcacaggctgacccaactacactttgggtccatctgtaactgtatttgatggcggtcccttccatcagacaggaagcccttctgcagcaggagccgtaactgattcggtgtctgcctctgtagccttccagttgagctggatttccagctcaactgaagcgcctaggtcctctgtgcttctccctctgaacactctctgggtgagctcatccatgctttcagcttcaattcccacctcccggaggaagacttctagagaaggcatagggttgactccctaagcactcttccaccccacatgattgatcttagcccatcacattcattccatccttcttgccagtagttggtttaggaatgaagatatgctccagccctgctcagtgagatgaaagggaccgtcttagtcagttcaggctgctataacagaataccatagactggatggtttaaacaatacacatgtatttcttacagttctggaggctgggaaccaagatcaaaggatgggaagattcggtgtctggtgagggcctgcttcctggttcattgactgtcttcttgctgtgacctcacttggcagaaagagggctagagagttctctgggggccaggcactgtggctcacacctgtaataccaacattctgggagaccaatgcaggaggattgcttgaagccaggaattcaagaccaacctgggcaacatagtgagaacctgtagttccagctacttgggggctgaggcaagaccatcacttgaggccaggatttcaaggctgcagtgagctatgatagtgccactgcactgcagcctgggtgacagagcaagaccctgtctctaaaaaaataaaaacaaaataagaagagagttctttgggggtctcttttgtaagggcaccaaacacctaatcacctgacctaatcgcctcccaaaggccccatctcctaatacataccttgggggttaggatttcaacataagaatgttggaggacacaaacatttattccataataaggacgtttgctgaaggccttctgggaaaggtttcctcacccctaggtgagagtgatgtaaacagaagtatctctttttcccgggaatgttgttaagtctgaaggtgtcctggaactgctgcagctgttttgctaacacctgaggatggagccaacagtaaaggtggcagagcggagagatggaaggagtctttgcctttaagggcactcgatctgccaaccctggaggccacactaacgctgaatttcctcacacaagggaaattaaacattgtcactgttggagccattgccagtgggtttctgttatagcagaaagcatgtttattgttacaaacagagcagcattcagacttttgtgggccccttcctatgtaaactttttatttatttatttttttgagacagagtctygccctgtcatacaggctggagtgcagtggcgcgatctcagcttaccacaacctccgcctcccgcgttcaagcgattctcctgcctcagcgtcctgagtagctgggactataggcacacgctaccatgcctggctaatttttgtatttttrgtagagatggggtttcactatgttggccaggttggtcttgaactcctgacctcgtgatccacccaccttggcctctcaaagtgctgggattacaggcctgagccactgtgcccggcctgtaaacatttttttaaagttatattttatgactgcattagcacaaagataaattatattaatattatttattaaaacatcttctttgccaggcgcagtcaagcctgtggtcccagctacttgggaggctgatgcaggagggtcactcaagcccaggagtttgaggctgcagtgagctatcatcaagccactgcaccccagcctggacaacagagcaactctgtctcttaaacaggctgggtgcagtggctcacgcctgtaatcccagcactttgggaggctgaggcaggcagatcacttgaggtcaggagttcgagaccagtctggggaacatggtgaaaccccgtctctactaaaaatacaaaaattagctgggtgtggtggtgtgcacctgtaattccagctacttgggaggctcaggcaggagaatcacttgaatccaggaggtggaggttgcagtgagccatgatcatgccattgcactccagcctgggtgacagagcgagactctatctcaaaaacaaacaaacaaacaaaccaaaaaacttttgacttaaaagtttgttttttcttctgatttaaagggaattgtattagggtgctcttgcactgctagaaattcctccagcctgggcaacatggagaaacctcatctctaccaaaaattacagaaaaataaaaaattagccagttgtggtggtgtgtgcctgtagtctcagctgctggggaggctgagatgggaagatttcttgaacccaggaggcggaggttgcagtgagctgagattgttccactgcactccagcctgagtgacagagcaaaatcctgtctcaaaaaaaaaaaaaaaaaaagaaagaaagaaagaaaaagaaatacctgagactgggtgatttgtaagaaaggagttttggctgggcatggtggctcatgcctgtaatcctagtactttgggaggctgaggcaagaggatcacttgagcccaggagtttgagaccagcctgggcaacatggcaagatcccatctcaattatttaaaaaaatgaaaaagaaaaacaaagaaaagaggttgaataggctcatggttctgcaggctgtacaggaagcatagtggtatctacttctggggaggcctcgggaagcttccaatcatggtggaaggtgaagggagagcaggcccatcacatggtgaaagcaggagcaagaaggcggggtggggcgggggaggtgccacacacttttaaatgaccagatcttgcaagaactcactcactattgtgaagacagcaccaagaggatggtgccaaaccattcatgagaagttcacccccatgatccaatcacctgccaccaggtcccacctctaacactgggtattacaatttgacatgagatttgggtggggacaaacatccaaaccatatcaggaattaaagcatttttgtcagccctaaaagtcctggggcactcatgtctctactgtgcttagcggatgggctggtcctggttacagctcccaaatatgtactcaggcccacacctctgttttgaccttcgagctcccatgtccagctgtcttttggatagttcccctttggtgtcttactcaaatccaacatgtctcaagctgaacacagtttcccccaaatcttttctttgcccagcatcccctatctgagtgaaacatgtaccacccagctagttgcaccagccagaaacctggacctcaacctctccctcaccctgtagccgtgtccagtcaccaagtgctgccaattttctctcttacatggctcttgaaagcatccacttctttccattttcacttctgtctctactgctgttgtcctaatccgcgttaccagcgtctcttgcttggattaccaccgtctcttgctgggattaccaccatggacactaatggtctccctgcctttcacttgccctgcaatcatttatctacactgtcccagaagaatcttttccaactgcttaaaacccactgatgactttacttcattatttctctgtttaaatccagctgatggcttcctgttgctcttataacagagatccaaaacttcaaggaggtctccaaggccttgtctagcctggcctctgcccctcttgctctgctctcttacccagcttcagctacatgatcttctctcaaacacacaggctccctcctggcacaggacctttgcacatgatactcatcttagtccgtttgagctgctataagaaaataccatagactgggtagcttatagaacaaaagagctttatttcttacagttctagaggctgggaactccaatatcagggtgctggcaaatttggtgtctggtgagggccctcttcctgttcacagatggcgccttcttcctgtgtcctcacatgctgggagggcacacaagctcccttgagcttctttaatatgagcactaatcccattcatgaggaaccctcatgatctaatctctcccaaagcctccaccccccaatacctttcaccttggcagttaaaattttaacatatgaaacttaagggacacaaacattcagaccatagcaatattcttctattttctactccttcagctcaaagcttctcaaggaagctttctctagtctaggtcaagtatcattaactatgtggcattaggcaagtttcttttatytatttatrtatttaatgagacaggggccttcctctgtcgcttaggctggagcgcaatgatgcgattgtgactcacttcagccttgaactcctgggcttaagtgatgctcctgccttggcctcccaaggtgttgggaatacaggtgtgagccgctgtgcctggcatagggaagtttctttactgtgtggtgccttcgttttctcatctgtaaaatgaagatataataatgcctaactcacaggtttgttgtgaggattaaatagaatgtcacatgggaactgctgtgagggtagctggtgcagtgcctgcttgcctagttgtcctggcccctggctagctctctagagggggaaagtggtggagagatccctcccaattaacactagctggagatgttgggctgatacaggttctaaaatgtgaggatttcagggaagagcatctctacaagggcacagaagatttctgagttacctgagtgaaagcaaagagctaattgtgccagagagtcattgacaatgcctggggttgggctagggtactcggagaaagaggtcaagagaactcacaaaggtcagggagagagaggaggtgagtgggagtacaccacatttctgtcaaatctctgagtagcccagagccctggaaggaagggccctggttgccacagggtctctatgtcaagaaaacctgggctgtcatccctagcctgtcatttatgagctggaggagggggaaagtcatgtcacttctctgtgtttcagttttcttacctataaaattgagctaatgattgactttgtggggtcggtgggaggattaaatggggctataatagtttgctggggctgcctaatggcttgagctgagacgttggtcttctctggcccttagactgggacttacaccatcagtgcttctggttctcaggcctttggactaaagctgaaatctatatcactggctttcctgggtctccagcctgcagataacagatcatgggactttgcagcctccataactgtatgagccatttccttataataaatctcattgtactctctctctctctctctgtatatatctgtgtatatatatatatatatatatatatatahmcacacacacacacacacacacacacatacatacacacactatgccaggccatgttttgtttcttctgatctacagacgattaattgcctatttaatattgattttttcccttcttagttagggaaaatttgctggccacatgtctagaggaaaaattttacattctaacctgtcttttagatagggtggccaatgagctataagcagtaaggcttccagaaaagccctttaactttaactttaactttcatcttcctgcccagaactrtgatatgatggctggagtgccagtagccacattttaaccttgaagatagaagctgcttaaagaatggtgaagcacaaaaatagaatcctaggtgactttctagagcataccagtcttagactgcctgcctctggaattctcttatgtacaagaataaatttgtacaagccatcatagttagatctctgttactactcaccaattacaatccctaataaataaacatgtcgcctttctgccgactcagcctagagttccaggaacttttttttttttttttaagacagagtcttgctctgtcatccaggctggagtggagtttgcaatcttggctcactgcaacctctgcctcctgggttcaagcaattctcgtgcctcagcctcccgagtagctggaattacaggcatgcaccaccacgcccggctaatttttgtgtttttagtagagatgggtttcactatgttggccaggctggtctcagactcctgacctcaggtaatctgcaggccttggcctccctcccaaagtgctgggattataggtgtgagccaccatggccggcctctaggaatttaagtgggcatttctatgaacatccaatcattcctgaagaaaaaaggtgcttattataccatatggtgtaagaacaaagatcacttacttttttttttaatggagtcatatatatatatatatatatgtctatgtctatacacacatattttttgtctgatttcttttttttattattattatactttaaattttagggtacatgtgcacaacgtgcaggtttgttacatatgtatacatgtgccatgttggtgtgctgcacccattaactcgtcatttagcattaggtttagctcctaatgctatccctcccccctccccccatcccacaacagtccccggtgtgtgatgttccccttcctgtgtccatgtgttctcattgttcaattcccacctatgagtgacaacatgcagttttggttttttgtccttgcgatagtttgctgagaatgatggtttccagcttcatccatgtccctgcaaaggacatgaactcatcattttttatggctgcatagtattccatggtgtatatgtgccacattttcttaatccagtctatcattgttggacatttgggttggttccaagtctttgctattgtgaatagtgccgcagtaaacataygtgtgcatgtgtctttatagcagcatgatttataatcctttgggtatatacccagtaatgggatggctgggtcaaatggtatttctagttctagatccctgaggaatcgccacaccgacttccataatggttgaactagtttacagtcccaccaacagtgtaaaagtgttcctatttctccacatcctctccagcacctgttgtttcctgactttttaatgatcgccattctaactggtgtgagatggtatctcattgtggttttgatttgcatttctctgatggccagagatgatgagcattttttcatgtgttttttggctgcataaatgtcttcttttgagaagtgtccattcatatcctttgcccactttttgatggggttgtttgtttttttcttgtaaatttgtttgagttcattgtagattctggatattagccctttgtcagatgagtaggttgcaaaaattttctcccattctgtaggttgcctgttcactctgccggtagtttcttttgctgtgcagaagctctttagtttaattaaatcccatttatcaattttggcttttgttgccattgcttttggtgttttagacatgaagtccttgcccatgcctatgtcctgaatggtaatgcctaggttttcttctagggtttttatggttttaggtctaacgtttaagtctttaatccatcttgaattaatttttgtataaggtgtaaggaagggatccagtttcagctttctacatacggctagccagttttcccagcaccatttattaaatagggaatcctttccccattgcttgtttttttcaggtttgtcaaagatcagatagttgtagatatgcggcattatttctgaggcctctgttctgttccattggtctatatctctgttttggtaccagtaccacgctgttttggttactgtagccttgtagtatagtttgaagtcaggtagcatgatgcctccagctttgttcttttggcttacgattgacttggcaatgcgggctctttttggttccatatgaactttaaagtagttttttccaattctgtgaagaaagtcagtggtagcttgatggggatggcattgaatctataaattaccttgggcagtatggctattttcacgatattgattcttcctacccatgagcatggaatgttcttccatttgtttgtgtcctcttttatttcattgagcagtggtttgtagttccccttgaagaggtccttcacatcccttgtaagttggattcctaggtattttattctctttgaagcaattgtgaatgggagttcactcatgatttggctctctgtctgttattggtgtataagaatgcttgtgatttttgcacattgattttgtatcctgagactttgctgaagttgcctatcagcttaaggagattttgggctgagacaatggggttttctagatatacaatcatgtcatctgcaaacagggacaatttgacttcctcttttcctaattgaatgacctttatttccttctcctgcctaattgccctggccagaacttccaacactatgttgaataggagtggtgagagagggcatccctgtcttgtgccagttttcaaagggaatgcttccagtttttgtccattcagtatgatattggctgtgggtttgtcatagatagctcttattattttgagatatgtcccatcaatacctaatttattgagagtttttagcatgaagagttgttgaattttgtcaaaggccttttctgcatctattgagataatcatgtggtttttgtcgttggttctgtttatatgctggattacgtttattgatttgtgtatggtgaaccagccttgcatcccagggatgaagcccacttgatcatggtggataagctttttgatgtgctgctggattcggtttgccagtattttactgagaatttttgcatgaatgttcatcagggatattggtctaaaattctctttttttgttgtgtctctgccaggctttggtatcaggatgatgttggcctcataaaatgagttagggaggattccctcttcttctattgattggaatagtttcagaaggaatgataccagctcctccttgtacctctggtagaattcggctgtgaatccatctggtcctggagtttttttggttggtaagctattaattattgcctcaatttcagagcctattattggtctattcagatattcaatttcttcctagtttagtcttgggagggtgtatatatcgaggaatttatccatttcttctagattttctagtttatttgcgcagaggtgtttatagtattctctgatggtagtttgtatttctgtgggattggtggtggtatcccctttgtcattttttattgtgtctatttgattcttctctcttttcttctttattagtcttgctagcagtctatcaattttgttgatcttttcaaaaaaccagctcctggattcactgattttttgaagggttttttgtgtctctatttccttcagttctgctctgatcttagttatttcttgccttctgctagcttttgaatgtgtttgctcttgcttttctggttcttttaattgtgatgttagggtgtctattttagatttttcctgctttctcttgtgggcatttagtgctataaatttccctctacacactgctttgaatgtgtcccagagattctggtatgttgtgtctttgttcttgttggtttcaaagaacatctttatttctgccttcatttcattatgtacccagtagtcattcaggagcaggttgttcagtttccatgtagttgagaggatttgagtgagtttcttaatgctgagttctagtttgattgcactgtggtctgagagacagtttgttataatttctgttcttttacatttgctgaggagtgctttacttccaactatgtggtcaattttggaataggtgtggtgtggtgctgagaagaatgtatattctgttgatttggggtggagaattctgtagatgtctattaggtctgcttggtgcagagctgagttcaattcctggatatccttgttaactttctgtttcgttgatctgtctgatgttgacagtggggtgtaaaagtctcccattattattgtgtgggagtctaagtctctttgtaggtcactaaggacttgctttatgaatctgggtgctcctgtattgggtgcatatatatttaggatagttagctcttcttgttgaattgatccctttaccattatgtaatggacttctttgtctcttttgatctttgttggtttaaagtctgttttatccgagactaggattgcaacccctgcctttttttgttttccatttgcttggtagatcttcctccatccctttattttgagcctgtgtgtgtctctgtacgtgagatgggtttcctgaatacagcacactgatgggtcttgactctttatccaatttgctagtctgtgtcttttaattggagcatttagcccatatacatttaatgttaatattgttatgtgtgaatttgatcctgtcattatgatgttagctggttattttgctcgttagttgatgcagtttcttcctagccttgatggtcttcacaatttggcatgtttttgcagtggctggaagtggttgttcctttccatgtttagtgcttccttcaggagctcttttagggcagtcctggtggtgacaaaatctctcagcatttgcttgtctgtaaagtattttatttctccttcacttatgaagcttagtttggctggatatgaaattctgggttgaaaattcttttctttaagaatgctgaatattggctcccactctcttctggcttgtagagtttctgccgagaaatcagctgttagtctgatgggcttccctttgtgggtaacccgacctttctctctggctgcccttaacattttttccttcatttcawctttggtgaatctgataattatgtgtcttggagttgctcttcttgaggaatatctttgtggcattctctgtatttcctgaatttgaatgttggcctgccttgctagattggggaagttctcctggataatatcctgcagagtgttttccaacttggttccattctccccatcactttcaggtacaccaatcagacatagatttggtcttttcacatagtcccatatttcttggaggctttgttcgtttcttttcattcttttttctctaaacttctcttctcacttcatttcattcatttgatcttccatcactgataccctttcttcctcagtatccgaatcggatactgaggcttgtgcattgatcacgtagttctcatgccatggttttcagctccatcaggtcctttaaggacttctctgcattggttattctagttagccatttgtctaatttttttaaaaggtttttaacttctttgccttgggttcgaacttcctcctttagctcggagtartttgatcgtctgaagccttcttctctcaactcgtcaaagtcattctccatccagctttgttcctttgctggtgaggagctatattcctttggaggaggagaggcgctctgctttttagagtttccggtttttctgttctgttttttccccatctttgtggttttatctacctttggtgtttgatgatggtgacgtacagatggggttttggtgtggatgtcctttctgtttgttagttttccttctaacagtcaggaccctcaggtgcaggtctgttggagtttgctggaggtccactccagaccctgtttgcctgggtatcagcagcggaggctgcagaacagctgatattggtgaacagcaaatgttgctgcctgatcattcccctggaagttttgtctcagaggagtacccggccgtgtgaggtgtcagtctgcccctactggggggtgcctcccatttaggctatttgggggtcagggaaccacttgaggaggcagtctgtctgttctcagatctcaaactccgtgccgagagaaccactactctcctcaaagctttcagacagggacatttaagtcttcagaggtttctgctaccttttgtttggctatgccctgcccccagaggtggagtctacaaaggaaggcaggcaggcctccttgagctacagtgggctccacccagttcgagcttcctggccgctttatctactcaagcctcggcaatggcaggtgcccctcccccagcctcgctgctgccttgcagtttgatctcagactgctgtgctagcaatgagggaggctcygtgggtgtaggaccctcccagccaggcgcaggatatattctcctggtgtgccgtttgctaagaccgttggaaaagcacagtattagggtgggaatgacccgattttccaggtgccgtatgtcacccctttctttgactaggaaagggaattccttgacccctcgcacttctcgggtgaggcgatgcctcgccctgcttcagcttatgctcagtgcactgcacccactctcctgcacccactgtccaacactccccagagagatgtacccggtacctcagttggaaatgcagaaatcacccgtcttctgtgtygctcacactgggagctgtagacgggagctgttcctattcggccatcttggctccaccaaccagtgtcattaactttaaaaaagatggtcaaaagagaagtaggggtagttcttgacttaattacaacctgtaattttgtacattacactttgatatctctaaataaagctttttttttttkgggatggagtctggctctgtcgcccaggctggagcgcagtggcacgatctctgctcactgcaagctccgcctcctgggttcacgccattctcctacctcagcctcccaagtagctgggactagaggcacctgccaacacggcaggctaatttttttgtatttttttttttagtagagatggggtttcactgtgttagccaggatggtcttgatctcctgacctcgtgatccacctgcctcagcctcccaaagtgctgggattacaggcatgagccactgcacccggcctaaataaagcatgttgaatgtttgcacatctgctgataagtgaacatttttatctcatactgtgctaagcaattctggttttgccaactttgtcagtacaagatgatttgtacagctatttgatttttttgtgcattttactggtattttatataaataagtgggaaatggaaaaatgaagttgctgatagtggtgacaaaatgcatattttataaatttattacaattgagatccaatagccaccattaagttatgctgaaaatgctgactcttcatgctaatttggatgcccattggtgtttattcagttcattctgtgttgatttgcaagggaaaaaaattaaagaacatgtactcatacaacctaatagtgagaaaacaataactaaatttaaaaatgggcaaaggagtctgggcacagtggctgttgcctgtaatcccagaactttgggagactgaggtgggaagatcgcttgaagccaggagtttgagaccagcttgggcaacatagtgagaccctgtctctataaaacacaaccccccctttttttttttttagatgcagtctcgctctgttgcccaggctggagtgcagtggcgccatctcagctcactgcaaactccacctcccagattcaagcgattctcctgcctcagcctcccaaatagctgggattacaggcacacactaccatgcccagctaatttttgtatttttagtagagacacggttttaccatgttggccaggctggtctcagactcctgacctcaagtgagctgcctgcatagacctcccaaagtgctatgattacaggcgtgagccacagtgcctggcctctacaaaaaaaaatttaaaaaatttgtcagacatggtggcatgtgtctgtagtcctagctactcaggaggctgaggcaggagcatcactagagcccaggagttcaaggttgcagtgagctatgatcgcagcactctagcttgggtaacagagggaaaccctatctcaaaatcaaaaaaagaaagaaagaagaaagaaagaaagagagagaggaaggaaggaaggagagaaagaaagaaagaaagaaagaaagaaagaaagaaagaaagaaagaaagaaagaaaaagaaagaaagaaaagaaaagaaaaaggaaattgtaaactttgtgaaaacacttcaaaatgttttttataaaatactgaaaagggaaacaacaaaaatgaccaatatgttaggggttaaacatatgacattttctagaagaytggggctgatgaaatatttactttgctaatctgcaatgtatatgggaatgctatgggaaaatagcattagaatcaacaacacaaataattattaaagtattagtgccatagtgcatagttacctgtttttaccttaagaccacatctcgataaatgtgagcattcctttctctaaatttgctacttaygatgtgaaagcagctcttttccaaatgatctagagtataatttttaagaaatcagaagaattgtgttgttagctattagctactattgaagctatttcacttgcaaaggaaggaaagcaaacccacaaatgttgagcaaatgccaaaatgccaaaaaggtcttacaaaatggtacagagaccacagggaaacagctgtgtttctgacaagcagcgtgctccatcytggaaatacaggaattaaaggagttaatgaacatgaggaaggaaagggaagtatgatccagtcttggctaactttcaccttggaggagctaataacaattctagaaataaagcagcaggaggagaaactactgataagggtagctcaaaatttgaggcccgtgagattaaatctgagccaattttgctttatttttgctgaagattttttgcagagatgaatgctgtttgtatttgagagttgagaagacataatttacttatttattcagtcagcaaatgtaagaggtgctggggatcgtaatgtttgagggagacttgaagtttcgtatgatggatgggccaagtgacggtgctggggattgtgtggggtgttccaggcagagggaacagtgtatggagaggcacagaggatgggcagatggtgatggtaaaggaatgattttctctatgtaatagtgggaaggaaaaatgttgctcttcagaaagataattcctggcttattatcacttccagggaagggacaacattcgcagcacggataggtggttcttttttgtttgttttttcgctcttgttgccgaggctggagtgcaatggcatgatctcactcactgcaacctccacctccagggttcaagctattctcgtgcctccgcctcccgagtagctgggattacaggcatgcgccaccacgcccagataattttgtatttttagtagagatggagtttcaccatgttggtcaggctggtcttgaactcctgacctcaagtgatccacccacctcagcctcccaaagtgctgggattacaggcgtgagccaccgcgcctggccaggtggttctttttattgaggaaacagccagtgattcttgggaggggtaaggaagggagggggaggtatgagataaagagagcagaattgctctgctcaagaaaggaagaagtgagaggaatttggagtttggggcagcctgggggaataggcctgagaaagttggagagagggggtcagtgaggagaataaatgagaagatgggaaggtccaaggaagaaccttaggtcaaatagagaagtcatcatgagctggagaacaggagaagcagagataaggggaacacgagatttttccaaggaatatacaaaacacaaagttttttagcacagacttccacattgtgtgggacagggcttgagtaatttttttttttttttttttttgacactgtgtcttgctttgtaacacaagcaggagtgcagtagcatgatcatggctcactgcagtctcaaactcctgggctcaagtgatcctcctacttcagcctccrgagtagctgggaccacagacacccaccaccatgcccagctaattttgtatttgtttttttgtggagacagagtctcattatgttgcccagtctggttttgaattcttggcctccagtgatcctcccacttcagcttcccaaagtgctgggattacaggtgtaagccatcacttctggcctgaatttttaaaaatttttatttatttattttattttttattttttttgaggcggagtctcactctgtcacccaggctgggatgcagtggcgtgatctcggctcactgcaacctctgcctcctgggttcagcaattctcctgtctcaacctcccaagtagctgggactacaggtgcgcaccaccacacctggctaacttttgtatttttagtagagatggaattttgccccattagccaggctggtcttgaactcctaacctcaggtgatccatcctccttggcctcccaaagtgctgggattacaggcgtgagccaccgtacccagccatttatttatattttcatggacagagtcttgctctgttgtaagctacttaagagacaggggtgggaggatagcttgagcctgggaagcggaggttgcagtgagccaagatggtgccactgcactccagagtgaagacaggggagactctgtctcaaaaaacaacaaaaaaaaaaaaaaaaagaaaaaagaaaaggaagaaagaaaatccctagatataatggctgtgccactttgagtctgcagtgagctacgattgtgccactacacctaggctggaatgcagcggcacaatcatagctcactgcagcctcaaatttctcacctcaagaggttctcccctcttggccttccaaagtgctatgattacaggaatgagccactgtacccggcccctatattagttttaaaatgcatttttctatttaaaaatgtcattgggattttgataaggattgcattgaatctgtagattgctttgggtagtacagaaaatttaacaatattaagtcttccaatacgtgaacacgtgatgtgtttccatttataacttctttaatttctttcagcaatgttttgctgttttcattgtataaatctttcactcctttggttaacttagttcctaagcattgtaaacggaattgtttccagtttccttttcagattattcactgtcagtgtatagaaatgcaagtgcttttgcatattgactgtatatcctgctactttgttgattcatttattagttctaacagttttttgtgaaatctttagggttttctacatataaaatcacattatttgcaaacagatgattttactcctcttgtccaatttggatgcgttttctttttcttgcctaattgctctggytagaacttccaccattatgctgaaaagaagtggtgaaacagacatggtgaaagtgggcatcccttcctgctgcagatctggaaaaaaaaaaaagtgggaatcttgtcttgttcctgatcttagaggaaaagctttcagtctttttccactgagtatgctatttcctgtgggtttttcatatatggttttaattatgttgatgtagttttccttcattcttagtttttcaagtgctttttatcgtgaaagggtatcaaattttgtctgttgttttctctgcatcaattgagcagatcatgtattttacttcccttcattctgttagtgtggtatataacatttttcaattttcatatgttcaaccatcctagcattccaggaataaattccatttgtttctgttacataatccctttaatatgtggctgaatttggttcactggtattttgttgagaatttctgtgtcaatattcataagggatattggtctgtggtgttttttttttgtgatgtctttatctaattttggtatctgggtaatgctggcctcataggatgagttaggaagtattccttcaccctgaatttttaatgaaagtttgagaagcactgatattagttcttctttaaataygtggtagaattaaccagtgaagccattatatctagggattttctttctttccttctttctttctttctttctttctttctttctttctttctttctttctttctttctttctttttcttctttctttctttttgagacagggtctcactctgtcacccctctggaatgtagtggcaccatcttggctcactgcaacctctgcttcccggactcaagtcatcctcccacttcagcctcccaaatagctggaactataggcacatgctaccatgcctggctaattttcattgttgttwttctagagacaaaatgtttttaaaaagttagccagtcatggtggcatgcacctatcctagctattagggaggctgaggtgggaggagcacttgaacctaggagtttgaggttacagtgagctatgatcatgccactgtactccaaccttgggtgacaaagcaagatacagtctcaaactaataatagtattaataataaagtctatattgtctggtatttgttttgtctcttttggttactatttgcttggaatatcttttccatcctttcactttccatttgtgtgtgtctttggatccaaagtgagtttcttgtagacagcatatagttgaatcatgtggtttttaattgttttattttgttttagaaacagagtcttgctctgtcactcaggctggagagcagtggcatgatcatagctcactgtaacctcaaactcctgggctcaagtgatcttcttgcctcagccttccaagtcattgggattacaagcatgagccaccatacctggcctgcttttctgtatattctatgacttttttcttaccatggggattatatttaacatcttaatgtaataacactctaatttgattttgcactagcttagcctcaataacacacaaaaactctgctcctttacagcttttcccccactcttttcagttactgattccacaaaattacatctttatatccttatgccccaaaacataatcatttttaaatgcatttatctgttaaattatgtagaaaacaaaatgtagagttacaaaccaaaactacaataatactagcctttagactaattattattattattttttaagacggagtcttgctcggttgcctaggctggagttcaatgctgtgatctctgctcactgcaacctccgcctcccaagttcaagtgattctcctgcctcagcctcccaagtagctggaactacaggcacatgctaccatgcctggctaatttttttttagtagagacaggttttcactatattggccaggctggtcttgaactcctgacctcaagtgatccacccaccttggcctcccaaagtgctgggattacaggcatgagccaccatgcctggcctggactaattgttttttaatgtattagtttcttaaattgtgtaggaaacaaaaagttttggccaggtgcagtcacttacaccggtaatcccagtactttgggaggccaaggtgggagaattgcttgagtccaggagtttgagaccagcctgggcaacacagtgataccttatctctactaaaaaataaaaaataaaaattaggtgggtatgatggcacatacctgtagtctcagctacttgaaaggctgagataggagattgacttgaacctaggaggtcaagactgcagtgagctgtgatcacactactgtactccagcctggacaacagagagaaacctcatctttaatttaaaaaataaagaaaacaaaaagtggagttatgaactattgttacaataatactagcttgttataattgcctacatatttacttttaatgaagtatttatttcttcatataccttcaagttattgtctagtgtttcttcatttcaccttgcagractcccttaagcatttctggcaaggctggtctagtggtaattaactccctcagcttttgttcatctaggaatatcttaatttctccctcacttttgaaggacagtttgtttgtttgtttgttttgagacgtagttttgctcttttgcccaggctggagtgaaggggcatgatctcagcttgctgtaacctctgccccccaggttcaagcaattctcctgtctcagcctcccaagtagctgggattataggcacccgctactacagccagctaatttttgtatttttagtagagatggggtttcaccgtattggctaggctggtctcgaactcctgacctcaggtgatctgcccacctcagcctcccaaagtgttaagattacaggcatgagccaccatgcttggctgaaggacagttttgacagatatagaattattggtgtacagttcttttcttttagcaccttgaatatatcagtccactgccttctggcctctgaagtttctaatgaaatatgtgctgataaccttattgaggatcccctgtgatgagctgtttcttgctgtttcaggattctcattttgtatttggctgttgaaattttgattataatgtctcagtgtgggtctccttgaatgcatcttactaggatatcattgagcttcttggatgtttacattcatgtctttaatcaaatttgggatgttttttgtcattgtttattcaaatattctctccttctccctttctctctcttcttcttctgagaatcccacaatatgtatgctggtcagcttcatggtgtcccagagttcccttaggctttgttcactttccttcaacttttctttttttttctgttttccagactcactaattttcattgtcccaccttcagttcactgactcttctgcctgcttaaatctgcctttgaattcctctaatgaatttttcatttcagttattgcacttttaagcttcataatttactttttgtagattaaaaaaaatctatttatattactattttgttcatacattgttttattggctttctccacatcttcctttagttctttgaacatatttaaaactgttgttttaaagtctttcttgccagcacagtggctcatacttgtaattcgagctactcaggaggctgaagagggagaatcacttgagcccaggagttcaaggctgtagcgcactgtgatcacacctgtgaagatccactacaggtggggtgcggtggatcatgcctataatcctagcaccttgggagctgaggcaggaggatcacttgaggccaggagtttgagaccagcctggacaacatagcaacactctgtctccgcaataaaaataaaaataaaaaaataagggccactgcactgtggtctgggtgacagacaatgagaccctatctctaataaaataaaataaagtctttctctagtacatcacccattaagtctttttcggggacagtttctgttgatttattttttcctttgggccatattttcctggcttttaaaaaatgttttgtgattttattgttgaaaactggacatttgcatctaatgtggaaactctggaaatcagattctcctcagggtttgctggcatttgtgattgtttttgtttatttatttattttttaaattttatatgcagtgtttgtgccaaagatcagcctgagatgaaaacttaaggtcttctcaggtcttttctgaaactgcaccttttcctaggcatgtatacttttaaattttaatttatatattttaacatacaaaaaccactttatatgcaattgttttttaatgtcctagtcttcagtgtctggctcccaaaaggggaaaaaatgaaagagagaagaaaaggatcctgggcctttaaatccccaggaagtcacttcaactatagaggagggacttgtggcaatggagggaggtgcaacaacaatggccctttgactctctgcacttctgttaccagaagcagtaatcagcaatcagagcacagatccctgatatttggagaacagagccatcctggctcccacaagctatgtgcaggttgctccaggaacacatcatatcattctccttgttggtgggagatgggtagctgctcctgtggtaacagttgaaatttactgaaattaactacaatttatcaccaagtcttcccctggaagttgcaagcyttcaatagactctggatttccaaaactgttacatcagacagaatctgacagtgcaattgttgtctaggtggggagatatattcttggttcttcctactctgccaactgcccagaatcatctccagatttttgtttagatagaagtgcaggttccactctaagaaaaccttggggatgtaggtatctgagggagtttgtaggtcttagagtggaagttcaagaagatacagargaatgattggggaccaaaacaaagaaggaggctgggtcagttgagaggatgtatagaacaggtagagagttacaaggagagttagaaaggtaaggtgacacctttgggtggaatttatcttaagcattccttggtgaaagaggtacacacaggccaggtgtggctgagagtcttcctgtagtgatttggtaacaacagggtactggactcctgcagcttcatatgtgggtgcaatataaaaagagggggttaggtggcccagagcatctgtcccagggtcacatggtcactcagacccagggcccagtttgtggggggtccctgcctccctctccagtcttcattgcactctgctgcagacmcaatagcctccttttagaccctccatcatgccacgttcttccctaccataggaggcacatgctctctgcctgggatgcccttagtcttccttcggatcttgactaaaacatcacttctttggatataccctagatcccccaccattctctctcatcacattgtgtatcattccttcaagaacttatcacagttgtaattttacatttatttgtgtgttcatttgattaaagcctctctcctctttcttgtctgtaagtttcagagggaccatgcctgttttatataccgggtctcccagcatttatcccagtacttacacaaaatagttgtggtagttaaaaaatgtccacaggccaggcacagtggcccacgcttgtaatcccagcactttgggaggccaaggcaggaggattgcttgagcccaggagttcaagaccagcttaggcaacatagcaagaccctcatctttaccaaaaatacaaaaattagccaggtatggtggtacatgcttgtagtcccagctacccaaaaggctgagttaggagaatcacttgagcccaggaagttgaggcagcagtgagcctcatgacacacgctaccatgcctggctaatttttgtattgtgccatactgcactccagcccaggcaacagactgagaccctgtctcaaaaaaaaaaaaaaaaaaaaagtctacaaatgttttaacactttttttttttttttgagacagagtcttacactgtctcccagggttggagtgcaatggtgccatctcggctcactgtagcctctgcctcctgagttcaggcaattctccttttctcagcttcccaagtagctgggattacaggtgcctgccaccatgtctggctaattgttttttgtttttgtttttgttttttgtatttttagtagagatgaggtttcactatgttggccaggctggtcttgaactcctgacctcattatccatccgcctcagcctcctaaagtgctaagattacaggcgtgagccacccaccgtgcctggcccaacactttttttcaaaggcagatgtctatttttcctcctcgtgaatgtaaggccagacttagtgacttccttctaacaaatagactgtggtggaagtgactgtgtgtgacttctgaggctgggttaaagaagatacagcttcctccctgcatttttctcactcttggatcactcattcaggggaagccataccatgctgtgaggtcactgaggaaaaccagaacgcccctgtggtattctgtcatagcaacgcaaaatggattaagacaatgacaaaccaaaagaaaacaaacaaaaaattgttcataaatatgctaattcattcattcagcattcattgcaaaactattttattattagtcatctattgctacataacaaatttccccagnnnnnnnnnnnnnnnnnnnnccgcagggtcctctgcctaggaaaaccagagacccttgttcacatgtttatgtgctgaccttccctccactattgtcctatgaccctgccaaatccctctccgagaaacacccaagaatgatcaataaatactaaaaaaaaaaaaaaaagatacagagtacaaacatgctgtgtgcaagacttgaccagctgtcatttgaaaaagcagaactatatattattttttaggatcaattattgaaaaaggaagtattgaagtctccactaaaatagcgaatttacccgcccccccaaattatgttagtttttgcttcatgtattttgaagcttgtttcccacaaacagccagcaaccacttgctagtgatgggagaaagctaccttgaaagtggattctccagccccagtcaagctttcagatagctgcagttctggttgacatctgaactgtaacctcacaagggattctcagccagaaccaccacaccaagttatatcctgtgagagataataaatgattgttgttgtcttaagtctctaagttctgggataatttgttatgtagcaatggataactaaccataaaatattttgcaattaatactgaatgaacaaatcagcatattcatgaacaattttttgttttcttttggttggcattaccttcatgcattttgtgttgttatcccagaataccacagactgggwtattttatwttwttttatwttattttattttattttattttatttattttattttattttattttatttgagacagagtctcactctgttgcccaggctggaatacagtggcatgatcacagctcactgcagcctcaacctcctgggctcaagtgatcctcccacctgagcctcccgagtagctggatccacaggtgcatgccaccatacctggctgatttttgtattttttgtagagatggaattttgccatgttgcccaggctggtcttaaactcttgggttcaagcaatctgccagcctcagcctcccaaagtgctgggattacaggtgtgagataccatgcccagcccagactgggtaattttaaaagaacagaaatttatttcttaaagttctggaggctgtgaagtccaacattgagggtctgcctctggtgagggcctttttgctgcatcatctcatggtgaaaagtggaaaggcaagagagggcgtgtgagagcaagagaacaagaagtggccaaactcgcttttatagcaacccactatcatgataactaacctactcctgtgataatgacattaatccattgacgacagcagagctctcagaaactaatcacctcttatcaggccccacttcccaagactgttgccttaaatttttttttttgagacagagtttcactcttgttgcccaggctggagtgcagtggcacgatctcrgctcactgcaaactctgcctcctgggttcaagcaattctcctgtctcagcctcccaattagcggggattacaggtgtatgccaccattcctggctaatttttgaatttttagtggagacagggtttcatcatattggtcaggccgatttcaaactcctgacctcaggtgatcctcccgccttggcctcccaaagtgctgggattacaagcatgagccaccgtgcctggccttaaagattaattttataacacatgaactttgggggacacattgaaaccatagcaggaataaatcaggaattacattagtaataattccaacaggtgcctgaaattttcttttacattttctctgtactttatggactttctcaaccatacaaattggagtaaaaacacaaacaagatagcacaaatatctaatcctagaaagactgtgttggttgagtgatttcaatatgaggaaagattaattatacatgtacttccactatccaccgccaaagattagttggcatacaaggcacaacgcttatggatcatgaaatcatgatgaaattttggtcaagaaaggtttttttttttwaaaaaaaaatcttaaatgtagatttttacccaatctttaaggcagtagttgatttacattttattacatgctttaaccaaaagtttgtactttttgggttaaaaaagccaaatatttaagggtaatcaaccactgcaactgctttgtctttgtctctgtcaacagtaccctctgaatcctttcagtttcatagaggataaagagaattttcacaaggaatcttaatgtattagtctgtttttatgctgctgataaagacataaggctgagaggaaaaagaggtttaatcggacttatagttccacatggctggggaggcctcagaatcatggtgggaggtgaaaggcacttctttacacagtggcagcaagagaaaatgaggaagaagcaaaagtggaaaccccggttaaacccatcagatcttgtgagacttattcactatcatgagaatggcatggaaaaggccaacccctgtgattcaattacctcccctgggtccctcccccaacacggggaattctgggagatacaattcaagttgaaatttgggtgcggacacagcaaaaccttatcattccaaccctggcccctccaaatttcacgtcttcatgttacaaaaccaatcatgccttcccaacaatcccccaaagtcttaactcatttcagcattaacctaaaagttcacagtccaaagtctcatccgagacaaggcaagtccttccacctatgagcctgtaaaatcaaaagcaaactagttacttcctagatacaatgggggtacaggtattaggtaaatacagctgttccaaatgggagaacttggccaaaacaaaggggttacagggcccatgcaagtccaaaatccagcagggcagtcaaatcttaaagctccaaaatgatctcctttgactccatgtccacatccaagtcacactgatgcaagaggtgtgttcccatggtcttgggcagctctgcccctgtggctttgcagggtacagcctctctcccaagctgctttcatgggctggcattgagtgtctgcggtttttccagatgcacagtgaaagctaccagtggatctaccattctggggtctggaggatggtggccctcttctcacagctccactaggcagtgcccccagtagggactctgtgtgggggctccaaccccacatttcccttctgcactgccctagcagagtctctccatgagggtcccgcccctgcagcaaatgtttgtctgggcatccaagtgtttccatacatcttctgaaatctaggtggaggttcccaaacctcagttcttaacttccatgcacccgcaggctcaacaccacgtggaagctgccaaggcttggggatttcaccctctgaagccacagctgaagccatacattggcccctttcagccatggctggagtggctgggacataggcaccaagtccctagactgcacacagcactaggatcctgggcctggtccttgaaaccactttttcctcctgagtggtctctgggcctgtgttggcagggctgccatgaaggtctctgacatggcctggagatgttttccccacggtcttggggattaacattaggctccttgctacttatgcaaatttctgcagctggtttgaagttctccccagaaaatggatttttcttttctgtcgcatagtcaggctgcaaattttccaaactcttatgctctgcttcccttataaaactgaatgtgtttaacagcacccaaatcacctcttgaaggctttgctacttagaaatttcttctgcctggcctggcgtggtggctcacgcctgtaatcccaaaactttcggaggccgaggcaggtggatcacttgaggtcaggagttcgagaccagcctgaccaacatggtgaaaccctgtctttactaaaaatacaaaaaaaaattagctgggtatggtggcgggtgtctgtaatcccagctattcgggaggctgaggcaagacaatcgcttgaacctgggaggtggaggttgctgtgagctgagattgcactactgcactccagcctaggcgacaaagctagactctgtctcaaacaaaacaaaacaaaacaaaacagaaagaaatttcttccaccagataccctaaatcatctctcttaagttcaaagttccacaaatctctagggcaggggcaaaatgccaccagtctccttgctaaaacataacaagagttgcctttgctccagttcccaacaagttcctcatctccatctgagaccaactcagcctggattttattgttcatatcacaatcagattttggataaagccattcaacaagtctctagggagtttcaaactttcccacattttcctgtcttcttctgagcccttcaaactgttccaatctctgcctgttacccagttccaaagtcgcttccacattttcgggtatcttttcagtaacaccccactctactggtaccaatctactgtattagtccattttcatgctgctgataaagacatacccgagactgggaagaaaaagaggcttaattggacttatagtcccacatggctggggaggcctcagaatcatgatggaaggcgaaaagcacttcttacatggcagcagcaagagaaaatgaggaagaaggaaaagcagaaacccctgataaacccatcagatctcgttagacttattcactatcacgggaatagcatgggaaagactgaccctcgtgattcaattacctcccctgggttcctcccacaacatgtgggaattctgggagatacaattcaagttgagatctgggtggggacacagccaaatcatatcacttgacctggtgrgatgtaatattcattattccctgttgtaatccagcacagaagtaatgcctgatacacacacagcagacactcaaaaatattattgaataaacaagtgagtgaataaatctctgtacttatcataatcattcagatgttaaattctattccagttgcctaagtaggaatgaatgtacaactaacactggtagaaacagagaaagtctgaattatgcagcattaatctaacaagtacagtgaactactgtattattgcttgtttgctcgtgtttacattttcttcacaaaaatataatttttgttttacaactgtgtggtaaattaggatatggcttattctgtgaccagctcattcatcatctcttccaatgtcattatggtgtgactttctgaaatgcagagactgaaaagttaaactacgtttcccaggttcctttactgttagagttctaaatgagacttaggttccttcaawcaaatgcattcacatgggacctgaaaaggaactgggctcctaataattccctcatacagtatatggtaatttcccctacctgcagactcaccttcccctacccacaatctatatggttccaggagagagttttaggaatccatctttctggtcccaatggtcatagagctgtttggtctggacctggaagtgcaagtgatggctccctaatttggcaggagcttcctgaagtggaagaggtggcatgatttcagaaagttggtggctactgggtgttaatccctgattcagctggtagtttactattcttagtgggagcagcagcttcctttacagctcagctctagagtgtggctttgagagttgtttctggaagactggcctacagtttctccagcccatctaatcatactgtaagccatttaatatcttgcattacatccatttcttttttttttttttttttgagacggaattttgctctttttgcccaggctggagtgcaatgatgtgatctcggctcactgcaacctccacctcctggggttcaagtgattctcctgcctcagcctcccaagtagctgggattacaggtgcccaccaccatgcccagctaatttgttgtatttttagtagagatggggtttcactatgttggccaggctggtctcgaactcctgacctcaggcgatccacccaccttggcctcctaaagtgttgaaattacaggcgtgagccactgtgcccggccacaataaatccatttctgtacaaaggagtagtaatttttttttccctctgccactgaaacctaacccaaagcaagggactaggaggtcctgtacaactgacatgatttattactatgtagattattagaatacagatgtaatttaatatttatgaaatttcacatattctattgtcagggccatccagcttcaaacaaaaatatatgctcctgcaacattctacaaattgatttttcaaaaaatcctaccaaatttaaattctattgaagtattcttttattgttttctagtgccattaggactgtggtttgcatgcaacagaattatactagatttaagcaaaagaaaaatgaatttatataaggatacaggtcatctcatgaaactccagggctaggaagtggtagaacctcaggaataacctggagccaaggattgcagtgctaaagagaacttaggawgccctcttgccagctctcactctttctctctccttcattctttctcattactaactgtaaggaatacggctgtgctttggtcaaaaataggccaaggtaaacatccagagtgactcagcgagtttagagtgcaggcgtataactccacttgttatcacagccatgtagccataacatgggaaggccattccttgactctaagccactattgtctgtaaaaggtataattgccctgataacactgtacaggcatgctggagccaagagaaagagaaagagagtcaaagctgtccatctttgcagacagacagaggggagccaggacacagcttggcttgcttgtgcccagagagagtttagctgctgaccctgaaggcaagggagagccagccacgcagctgtgtgtgggagccgccggactaagcagccaagacagggcggacagtgtgagagagctgttgatgagagctgctgctgaataaaatcatctttcacctgcttatggcccccctgggtgttctttctgctcatccacccactcccctcataccccagcatgacaattggcgtagttgtgaacttgacactagtgttctctgtatcctaatccactggcttaaaaaaaaaaaaaagcctctaggccagacgtggtggctcacacctgtaatcccagcactttagaaggctgaggcaggcagatcacttgagcccaggagttagagaccagcctggacaacatggtgagatccctgtctctacaaaaaatacaaaaattagctgggcgtggtggcatacacctgtggtcccagctactcaggaggctgatgtgggaaaattgctggagcccaggggatcgaggctgcagtgagctgtgatcatgccactgcactccagcctgggtgacagagcaagaccaaatctcaaaaataaataaataaaccaaaataaaaggatagacaggtagactgaggcagaaatctcccagactcaattccagagtgttgaggaaagtccatgagtaaccagcttcagtctggtgcctagttcagccaagctgcacaactctaaagggtgccattcatctaaacctctaaaggatgccattctatgaaatagtgcccctggtgcatattttacagaagggaatgtgaatgatgcccctttggcaccaatcagctggagtctggagtccgagttccatacaggaacttggcaatgggtgctgtgttcctggaaccatatagattgtgggtaggggaaggtggatttgtagataagggaaattaccatatactgtacaattattaggagctcaggagacaagttcatggatgtgtattacaagaatggtatactgattttaaatatattagaccaggaagagacaaattatggcccacaggccagatccagtctgccccttgtttttggaaacatggtttcattagaacacaaccatgctcagttatttgtatattgtcaatggcctcatttgttctagaatggcagagttgagcagttgcaacagagattatacagttcacaaagactacaatatttactacctggttccttacaggaaaatgttgatcctttgcctagatccttgatgcccaaaaggaggtccacaagcctgcagtctcagcatcacctcggagcttctcaggccttcacctggaactactaaatcagaacttgcatttaaataagatccccaggtgattcagaggcacattaaagtctgagaagcaccatgtgaaacttatcagtgggcgcaagcaatactattgaaatattcattcacaaaccctttttagcctatgggacacgatgcaataccccagcatattagattagtgtgccactatccctggatttgatgtagtgatttttttttctgactacgtcaaggcagagtgtcattaccatcagcacaaattcttaccaaacatctgcctggacaaaaggatatctggctacaatttgttaggtacctacttattcattcaattataacagatatttattgagggcatactctgtgctaggcattggaccacaataatgaacaaattggcacaattccagccttcmtgttgttgtggagctttcatgtatcatcttatctatttctttttaaaagcttttaggtggatatattaatctccatgaggaaactgaggtgcagagaggctaaatgacttgctcaaagtcatacagccggtgagtggcggaggtgaaaattgaacataagatgtaagtctttctgacaccacagtttatgttttctcctatgcagcagtttcatgcgttctcctattgcagtgccaaagagaacttaagcgtgattctaggagattgtaatctgaaagagatctacatccagagaaccagtgttttctagataagaaatggtctcccacttgccagatatagccaagatgatactgcgtgattggggcaggttgaaaactggagaagcccagctcctttcccaagaccttctcttcagaagccacacacctgctacctttatctgtgagagagacagatgcctctgattcagttactccttccagacacttggaatgagagatgcacctgaggccctgggtaggacaggaaatgcactctcttagggagaaaaggggttggggttagtgcttcttcctccaagaaactcagagtgaattccattcactggggtcaccttacctttctagctctccttcccacctgttctacacaccccttcaacttacccagcccttcttccttgtcttgcttcttaatcattccattgtactttcttgaacgttcattctgagaactacaagtatacctctcctagatagttatgtcctcaaactggagaagagaaatgaaacaggcagagggaggtggggagagggatggagagacgagggcacaagtgaatgatggagaaagatattgggctggacccaggtagtgaggaaggaggaagaggttgaacacatggctggttgagggaagaaggaagagcaggaatgacaggcatggagcaggatgctctctgatggagcatgaggaaaaggatrgcaccgagaagctagcagcgatgggccaaaaacaacagcaacatcatcattcccatccccatctctatctctataatagtgaccatatgaagtaagtactgtaactacctccattttatagttaaggcaactgaaaaatagaaggattaggtaaattgtttctgatcacatgactgtaatgacagagtcaagatgaagacagaggcaggctggcttcaaaatccatgctcttatctaccatcctgtcctgtctcgcaaaggcacaatgttgaaaacaataggacatatttccctttagatatccgtggcccagaattgacctgtttgtgttcatttcaagcaaggcatttttttattttttatttttttgaaacagaatctcactcgtttgcgcaggctggagtgcagtggtgccatcttggctcactgcaacctctgcctcccaggttcaagcgattcccctgctcaccactacacccggctaatttttgtactttagtagagttgtggtttcaccatgttggccaggttggtcttgaactcctgayctctagtgatctgcctgcctcagcctcccaaagtgctgggattacaggtgtgagtgactgtgcccagctgcattttattaataagcagaaatggattaataattaccccagttcatctataccccttaaaagcacctaacataattaaacaattttaaaaaggcaaactgtcagaattaatatataaatctaacaaattattggattttttttccctagctgatttctggtttgaactggggacaaagttattctcactttgtcacaacctttatgtgtcctgattttagcacctgtaaatagtactcaccctatgggtagtatagggtttcttgggaggtaatgatttatcagttaaaatgtaagaagaactttaaacaattcagcccatttagcaggcattcggtgagcagttgtggtgtgttgggagcaagggggacaaataacagggcatcagctttgaactattcaaagtgagccagtcagacctggagttaggaaggctccaggacagtatgacagaggctggcgaggagctggagcaaagggagtatagcggaggtagcaagagctgtgcctggggcttgagagaaggctttgctgaagctgcacaagacctctgtcttagagttcatctaaacagactgagataacgcgataagcacaagtaccttacttgagggtgagtccaagaaatatggtgagggagtaggaaagtgagatagaaaagggaagaaagccattaatgagagggttacagctgggagcaactggggctccatcctgttgggtaccctctaagggaatgggtagaagcacacatcggaattgtcctaccaaggagtaaggaagctggggcattttccaccaactcccaccccacattgattatgaactgctcccgagggtgctaattctctagtacctcagcctccctttcacataagccaagactcctcctgcagccagataaagccttcaagccaagagatgcaggtgttagaggtgtatggcatccactgttctcaggggctgcaggtgccctctgggctgggccaagggcaacgcctccattttggcagcaatgtatgagagttccagtttctccaaatcttcgaatcttgctattgctacacttttaaatcttagccaatttgatggcataaattagcgtatttcactgttgttttaatttgcattgtaattttaaagtttattaatcttttattttatagttagaagatatggaatcttgtttaagaaatcttactctatcctgaggtaaaaaaattctcctatattttcttctaaatgatttatacaggtttttcttcacattcaagtccttgacatggagttaattttttgggtttttttgagacagagtcttgctctgtcgcccaggctggagtgcggtggtgcaatctcggctcactgcagcctccacctcccgggttccagtgattctcctgcctcagcctcctggatagctgggattataggcacacgtcaccatgcctggctaatttttgtatttttagtagagatggggtttcaccatgttggtcaggctggtcttgaactcctgacctcaggtgatctgcctgccttggcctcccaaagtgctgggattgcaggcatgagccatggtgcctggctggagttgattttttataaatgctatgaggtagggatcaatatgggtaactgactgcccaaaaatcatttattgaataactcaacatttcccccactgattcataaggctaccttataatatatcaagtttccatttagatgtatgtctgtttcagggctttttaattctattttttggtggacatttaggtccttatcttactagacttcttggcattggatcctgttgaccctctcctaaacattgtactctccwgacttcaacaatggttcttgtctttcctcctttctctgactgccttgtaaatgttggttttcctcaggggccattctctctacacagcttttctcactctacaccacagggagaaatattttttgcctaaaagcgaactcaaggaaaacagaaatgtttactgggtgcagctgtttaattatgcttttaatttcagaatagtttcaaatgtaaacaaaagttgtgaagatagggcagagaattctcacrtacccctcactcagtttcccctattgttaacatcctatattaccatgggacatatatcacaactaagaaatcaacattggtacgtgactataaattaaacactttattagcatttcaccagttttccccscaaagtccatttgctgtttgaggatcctcttcaggacaccacattacattctgtcatcatgtctccctagcttcttctggtctgtgatagtttctcatactttgttgtccttgatgactttgacagttttgagaagcactggccagggtttgtttgtttttgcaaatgtccgtatttgtccagtgtttttctcatggttagactggggtcataggttttggaaaaaatcacagaggtgaaataccattctcatcccatcatattgttactgaaccaggcttcttcttcctgtcatgcagtatgtcaatcactgagatgatgtgttttgctgcagaggaagagtttattcatgaggcagccaaacaaggatatgggaaaacaggtctcaaatctgcctccctgaagatggaattttagggatatttatagaatagaggagcaagatggtccaaagcatggggaaaggtgatcgtggtaaggaaaactgaggtaattggtcatctgtgcaagcataacagacttcatggctcttcatagaatatatgttcagaaaattacagcattagcatgatctgagggtggagtttttggccctctgacatcaaaaggtgacccatcagatgctcacacaggcccagttgaaaggttggtggtctcagctggcttgaactggacaagaactgactctctaagttcctgaaaaacaacttaagcaaccattaccatggtgatctatacatcagaaatgttatctacaagaaagctagtggaaatttagttatatattacttagcaatgtgacttttagctatataggttttaaaatcaactaaaagcaaattaataaagacaagtaaggtaagttaaatttggtgggcctaattgggtttgtcctcagtttcaatatcaagggtacattgccattaacatgaggtattagtcttctctcacactgctatgaagaaataccagagactgggtaatttataaagaaatgaggtttaattggctgatggttctgcagactgtataggaagcatggcagcttctggagaggcctcaggaaacttataatcatggtggaaggtgaaggtgaagcaaggcatctcacatggccagaccaagaggaagagagagagggggaaggtgctacacacttttaaacaaccagatctcatgagatctcactcactatcatgagaacagcaaccagggggatggtattaagccatccatgagaaacactctcatgattcaattaccttccaccaggccccacctccaacattgcggattacaatttgacatgagagttggacaggaacacagatccaaaccatatcattctacccccagcccctcccaaatctcatgtcattttcacatttcaaggtacaaccatgcgttccaacagtcccccaaaattttaacttattctagcattaacccaaaagtccaaagtccaaagtccaaagtctcatctgaaacgggaagtcccttccacctatgagtccgtaaaatcaaaaacaagttagttacttccagagacagtgggggtatagctgttgtgtaaatcaagcttgtccaactcatggcccatgggccacatgcagcccaggacagctttggacatggctcaacacaagtttcttaaaacactatgagatatgttttgcaatttttttttagcttatcagctctcgttagtgttagtgtattttatatgtggaccaagactattcttcttccactgtggctcagggaagccaaaagattgaacacccctggggtaaatactcctatttcaaaaaggagaaatcagccaaaagaaaggggctacaggcaccatgcaagtccaaaacccagcagggcaaccattaaatcttaaagctcaaaaataatctccttcgaattcatgtctcacatccagggcactctgatgcaagggaaggggctcccaaggccttgggaagctctgctcctgtggctttgctggttcagcccccagaacaactgctctcaggggctggcattgagtgcctatggctttccaggcacagggtgcaagctgccagtggatcttccattccagggtctggaggatgataaccctcttctcacagctccactaggcagtgcctcagtggggactctgtgtgtggggtccaacctcatattttccctctgcatcaccctagaagaggttcatcatgagggctccactcctgcagcaggcttctgcctggacatacagggttttccatacatcctctgaaatctaggcggaggctcccaagcctcaacttgtgtactctgtgcacctgtaggcttaacaccatgtgcaaactgtcaaggcttattacttgcactctctgaagcagtggcccaagctgtacttgggccctttttagccacagctagagttagagtggctggcacacaggcagcagtgtcccaaggctgtcctgtgcctggcccacaaaccattttgtcctcctagacctccaggcctgtgatgggaggggatgccttgaaggtctctgaaatgcctttgaagctcttcccccattgtcttggatattatcactttgctcctctttacttatgaaaatttctgcagcctgcttgaattcctttcctgaaaatgggcctttcttttctaccacatggccaggctgcaaatgttccaaattttaatgctctgcttcccctttaaatataagttttagtttcaggtcatttctttgttcatacatatgagctataggttgttagaagcagccaggccacgtctcaaacacttttctgcttagaactttcttccaccagataccctaaatcatctctttcaagttcaaaattccatagatccctagggcaggggcacaatccaaccaagctctttgctaaagcatagcaaaagtgacctttgctccagttcacgataagttccatatttccatctgagacctcctcagcctgtccaatatctgtccatgtcactatcagcattttggtcacaactattcaacaagtctctagaacgttccaaattttccctcatcatcttttcttcttctgaaccctccacactcttccaacctctgcccattacccaattccaaagttgcttccacattttcaggtgtctttatagcaatgccccactcctcaataccaactttctgtattagtctattcttgcacagctataaagaaatacctgagactgggtaatttataaagaaaagaggtttaattggctcattgttctgcaggctgtacaggaagcatagcagcttcttgggagacctcagaaagcttccaattatggtggatggtgaagggagagcaagcatgtcacatggtgaaagcaggagcaagaaagagaggggaaggaggtgccacacacttttaaatgaccaggtgtcacaagaactcacttactatggtgaggacagcaccaaaatgatggtgccaaaccactcacaagaagttcacccccatcatataatcacctcccaccaggcaccacctccaacattggggattacaattcaacatgagacttgggccgggacacagatccaaaccatatcacatgacctgtcagtgatgatgttaaccttgataaccaagctgagttagtatttgacaggtttccttactatatagttgtcctccacctctcctctcytgttgcatttaaaaatttttaaatggaataaaaaatgaaatggaaaactaaatgaagctttattaaataccaygggggagtgtgcaggtgcagtggctcatgcctgtaatcccagcactttgggacaccaaggcaggtggatcactcgagctcaggagtttaatcccagcctgggcaacatggcaaaaccctgtctctataaaaacaaaaattaactaggtgcagtggtgggtgcctgtagtcccagatacttgggaggctgaggtgaaaggatcacttgagcctgggaggcagaggttgcagtgagccaagatcatgccactgcactccagcctgggtgataggagtgaaaccctataccccccacccccgccaaaaaaaaataccatgggaagaaattatattattggaacgtaggttattcactattcaccagaagtttgtcctagagaaattggcattactttttaatccattaatattttagagtctgggtatatttggccttatcacttcccttggttttaactaccatctataagttgatgactcacaaatcttcccaggtcctgatcactccctgcatctgaaaccacccttgcagaattataagtaatgagagataaatcttttttttttttttttttttttttgagacagggtcttgttctgttacccaggttggagtgcagtggtgtaatcttggttcactgtgacctctgcctactgtgttcaagcaattctcctgcctcagtgtcccgagtagatgggattacagttgcacaccaccgtgctcagctaatttttgtatttttttttaagtagagacagtgtttcgccatgttggccaggctgatctcaaactcctgacctcaagtgatccgcctgcctcagcttcccaaagtgctgggattacaggcgtgaactaccatgtcaggccagtaatgagagagaaatctaacatgactaattgcatcttgcttctaatctcacaggctaaattgcttttttgcttattctggtatagaggccaagataactgtgaaaggaatttagtttatagctaaactttgaggtaaggaaaactgacccccttccatgtttggagattgaagatgctttcataaaacaagattagaatcatggtagggacttgaactttgctatagaataggcataaacaatcacctgtcattgtttaactttcttttcttttttgagatggaattttgctcttgttgtccaggctgtagtcctgtggcacagtctcggctcactgcaacctccgcctccctggttcaagagattctcctgcctcagcctcccaagtagctgggattataggtatgcgccaccacacccggctaattttgtgtttttagtagagatggagttttaccatgttggctaggctggtctcaaactcctgacctcaggtgatccacccacctcagcctcccgaagtgctgggattacaagtgtgagccactgtacccagccaagcttgcttttctataagctgcttttgctatcccagagtcatgtaactgggggtcacaagatttgtaactttcccaactattcaaatgaattaacatcactattgtaaaacctaaagaactagtctttgagatatttttcagatttagcattttggcaacacaagagatgctacctggtccttagatgcccccctccctggaactgattagactgtgcaaagacaatttaaacactcttgtgactttatccccagccaatcgatagtttcagttccctagacccctgtctgccaaaatgcccttaamaccctagcctccaaattgttggggacatgaatttgagaaatgcctcctgtcctgcttggctggtcctgtgatattaaactctttcttttcagcattatctgctgttctcagtgcagcaggcaagagcccatcaggctgtgacaggttggctacttaatgtattcaaactcctataaaatgtttcccctgtgatgtttcagagacacttcaaattcaatgtaccctaagctgaactttttgtgtcccctccatcaatccctgcatgacccacatcttctcctccagtgttctctagctaagtgaatcaaaccaaatctatccatttacctaagccaaaaacccaccctccacctcaaaacctgagtgatctttctaaaacataaagtctgtctatatcaccactgccatgtctataatattaaatcctctctcaagacttctatttccctctttggtttcaacttttaccattcccagacttgttctctaccctcatgagtgccaaatgacctttggttcattgagcataccctgtggtttatgcctctgtatctttgttcaggctattaccttgtctggaagagttccctcttccaactctgtctgcccactatcttcttatccttcaagattcagcccagcattttatctttgtaaacttcaaaacatctagccccattcagtcttcctcactagattgtaagttcctgagggtagggaccatatacggttcatctgtttgtttgtttgtttttgagatgtagtctcaccctgtygcctaggctagagtgcaatggcatgatctcggctcactgcaacctccgcctcctgggttcaagtgattctcctgccccagcctcccgagtagctgggactacaggcatgagccaccatgcctggttaatttttgsatttttggtagagacggggtttcactatgttggccaggctggtctcaaactcctgacctcaggtgatccaccacctcggcctcccaaagtgcataagccactgcacccggcctatggttcatctctgtagcccgccatccccacccaccctgctcaatatagtacctgccagtcagactgaagtcgcagtcactcaggaaatgtttgggaccaagctgatttccactgtgctcctctgacacttaaagcggttattacattttattattattattaatcaaaatgcctggcacctcaccaaggaagtgagctccaggaagacagagtcttgagtcttattaatgctacaggaccagtgtttggaacacaataggagctaagtgagtatttcttggatgaatgatcagagcaggaactgttaaaattgaattgcttttttcatgactcttcaaccaaacattggccaaaccatcctgagggaagtttggtctcctttgtcaatctacttaagaaaaaaagaaatacatagctgaaaatgatgtaaaaatggctaaattggtaatgtgagcatcactaggtgaaaagtttcaaagctaggttatttctcataaatggaacattacaaaataggcatcaactggccggatgcggtggctcacgcctgtaatcccagcactttgggaggccgaggtgggtggatcacaaggtcaggggttcgagaccagcctgaccaacatggtgaaaccccatctctactaaaaatacaaaaattagctgggtgtggtggtgggtgcctgtaatcccagctactcaggaggctgaggcaggagaattgcttgaacccgggaggcggaggttgcagtgagctgagatcgcgccactgcactccagcctgggtgacagagcaagactcggtttcaaaaaaaaaaaaaaggcattaattttccttagccaggtacagtaatatgcaattaaatagttttaatctcatgcctaaagcattgctgtttagaaaagtaagacaggtaattgtaaagtttcaaaatccagcaagtaaaatcaggaacactcccagaattgagtctagaggagactgagagtcagaagagagtctggcaattaggagaaaaaggaagcagtagtttgacattggaaagtgcctggcatgtaagagaagaatctggcaagggagggacaggtgactaatcaattaccacagattcagtctgccattgtctgggctttggaaataagttgatgaggtttggatttaataaacattaaaattctaagaacacttaagaactgcccagggaggctgtggagcgatcatcatatgagtagatttctaaggctagaccagacacccatctattatggatggtttgagactaccacatccatcctgctaccacagagagaagttaatgaccctgcagatcttcattccaaacttctgaaaggcggagagaggttaaatggtgctaactttgattctgctgtttcatcacagattccttgctattaattcagatacaattgacaagcattttctctaaacaagagatttaatttgttggtcttttcataaacattgctatccaatttttatacacctttatatatatatataccaacatttacatacccctatacacagtaaaatttcacttgatacgtttgcttggaatttgcaatactttgaatggggtcaggttaaagttaaactttgcttagcaaacccctcccattgtagattaatattcatattttgaacaaaatttgagagtacataagatgacaagtttccttgaagattttaaaaaactggaagccaaagtgatggttaccctctgcaacagcaattttaggagagattgttccaaggtttatcttcccactagactatggacttccatgagggcaagggccttggtttgtttgctgggtattcccaccattcagcctaggacttggcacataaagggtacacagtgaattttctgataaaattaatcaatcaaagaaaacatgctgagatttgggagccctgccttaggacatagtgagaaatatattagggggagttttacttagtttgtacccagttacaccaattattgagaaatgtgtgatctaggacaagtcattcaacctcctagagccttagttttctcatctgtaaagtgaagctagtgataatacatatcatatagagttattgcaaggatttagtgagataatgtatggtcctacccgataccaagtatcactayaagacggggtttctcaacctcatccctgttgacattttcagctggatagttcgttgctgtggggtactgtcctgtgcattgtggtttagcagcatctctggcccctacccactagatgccagtagcccccaacaacccagttgtgatagccaagaatgtctccagatattgccaaatgtgccctggaaggtaaaattgcctcttgttgggaaccactgctataaagttagggtaattaatttggtacgaggatagacaaatagatccatggaacagaagagagagactaaaaacatacccatgcatatagggaatgtgatccatgataaagatggagttacatctcagtggagaagggataggctctttactaaatggtgctggagcaactgattgaaaaaaatataattctatcccacattattcatataaacttttagaagaaaatgtgggagatatctttattgtttcagagtaggaaggatttcttaaacaggacacaaaaagcacaaaacatgaaagaaaaggttgatacattttacgtttaaaactacatataccaatggcatcatagacaaagtcaaaagctaagtggtgaattggaagaaatgatttgtgacccagatattcaacaaaaggtatctattaagaatgtaatgaagtaccaattaatacctaaacaccaactactgtaacaaattaccaaaactgggtagcctaaaaccacagaaatttaccctatctcagttctggagtccacaagtccaaaatcaaggtgttagcagagctggtttcttctggaggctctaagggagaatcatgctgtgcttctcccctagctcctggtggttgccaccaatctccggcctttcttggcttgtagctgcatcacctcaatctctgcctctgtcttcacatagccttctttcctgtgtttgtctgtgccttcaaatgggcttcttagaaggatactagtcatatttagtgcccaccctaatctaatatgacctcatcttcacttgattccatctgcaaagacctatttccaaataagatcacattctgaagttcctgtggacctggattttgagggatattcaaccctgtagagtctgcccttcagcccctcaaattcacatatgtctcatgtgcaaaatacattcatcccatctcaacatatccagaagtcttaactaattccagcaccaactgttttttttcccttttttttttaacaatctttctctttctttcttctttcttttctttctctctctctttctgtcttctttctttccttccttccttctctctttctttttcttcctttcctttctctctctctccttcccttcctccctccctccttctttcttccttcctccctccctccctccctcctttattcaacaaaagatatctattaagaatgtaatgaagtaaggattaatacctaaacaccaactactccctccctcctttccttcctctctccctctgtctctctctctctctctttctttcacagacagggtcccactctgtcacccaggcatgatcatatctcaaactcctgggctcaagtgatcctcctgtctcagcctcctgagcagctgggactacaggcacatgccactatgcccagctaattcttaaatttttattaaaaaattaaaacagtggctcatgcctgtaatcccagcactttgggaggctgaggcaggaagatcactgagcccaggagtttgagaccagcctgggcaacatagagagaccccatgtccataaaaataaataaataaacaaataaataaataaattagctgggcatggtggcatgcacctgcggtcccagctactcaggaggctgaggcaggaggatcatttgagcccaggaggtcgaggctgtagtgaactctttctcagacttcctttcaatctcatttctttgaagtcactaactattcattaaccattgtccttgaattaatataaatacatgcctctggctatctcttcttccaggcaaagtgaacagccaggtgcattgctcaaagttatgtacattgggaagatttcctgttcatttagagccaccattgagtggggctgtgatgctgtgaccattccctttcaggtgatatcaccacattgcacagactcatcagaaaatcaggcctggattttttcttcctcatgtaactgagttgaaggacaggtgttaatggagtaggagtaggtgctgtaggagtctgagtcacttgctcatgcaactcacatgtgtcttcaggaccagctcaagggtaatctcacacatgtgatatatgagatatatatgtaacatatttgtatatacatatctttttctcttacacttgatgatagaatgctgctatacctgtcaaatttatggcttgaaggatcagagaatagtttatgatgggcaactcaagtcacatgatattatttagtctctatagaagctgtttttcataaaaagaatgcttgtctgcagaagaaaacataattttgttccaaaatactgagagtttaaactatgattatcctattatgacgtggcagaggctttattttatctctgtctgctacagacactttgagcgccactgtattcagcttgcatggaaatccagatgtttcttttccttgatttgtgccccatttgaaactggaagcctaatcaggcatggtggcatgcacctatagtctcagctacttgggaggctgaggcaggaggatctcttgaggccaggagttcaagctgtagtgtgctatgatcacactggtgaatagccactgcactctagcctgggcaacatagcgagaccctatttctaaaaaaaaacaaaaaattaaaaaaatctggcagccttggccaggcacggctgctcacgcctgtaatcccagcacactggaaagccaaggtgggcagatcacttgaagtcaggagttcgagaccagcctggccaacatggtgaaatcctgtctctaataaaaatacaaaaataaggtgggcatggtggcaggcacctgtaatcccagctacttggaaggctgaggcaggagaattgcttgaacctgggaggtggaagttgcagtgagctgagatcatgccaccgcacatcagcctgggtgacagagcgaggctgcatctaaaaacaaaaaaaaaatctggcagccttatgggttatttcgtgaaggaaacaggcccaaatgtggtatagtcagcctctttctccagccctctacctcccaccattttcgcttaacaggctcatgaacaaagtggtcctgctttcaaaatctaaagagatccactaggcactgaacttttttcttaggggtaggaagtacaagctgcaacttgtccttcaccttgaagaatatatcttgccatccctcagaccattagacccctgaaaacttcactgatgtaagtctttgtcttttattttttttccaaggcagaagaatttttcttagtacagaacaaaatggagtctcccatgtctacttctttccacacagacacagtaacaatccgatctctctttcttttccccacatttcccccttttctatttgacaaaactgccatcgtcatcatggccccttctcaatgagctgttgggtacacctcccagatggggtggcggccgggcagaggggctcctcacttcccagacggggcggctgggcagaggcaccccccacctcctggacggggcggctgctgggcagagacgctcctcacttcccagacggggcggccgccgggcggaggggctcctcacttctcagatggggcggccgggcagagacgctcctcacctcccagacggggtggcggtcgggcagagacgctcctcagttcccagacgaggtcgcrgccgggcagacgtgctgctcacatcccagatggggcggcggggcagaggtgctccccacatctcagacgatgggcggccgggcagagacgctcctcacttcctagatgggatggcggccgggaagaggcgctcttcacttcccagactgggcagccgggcagaggggctcctcacatcacagatgatgggcggccaggcagagacgctcctcacttcccagacggggtggcggcccggcagaggctgcaatctcggcactttgggaggccaaggcagtcagctgggaggtggaggttgtagcgagccgagatcacgccactgcactccagcctgggcaacattgagcactgagtgagcgagactccgtctgcaatcccggcaccttgggaggccgaggctggcagatcactcgaggtcaggagctggagaccagcccggccaacacggcgaaaccccgtctccaccaaaaaaatacgaaaaccagtcaggcgtggcggtgcgcgtctgcaatcccaggcactcggcaggctgaggcaggagaatcaggcagggaggttgcagtgagccgagatggtggcaatacagtccagcctcggctaggcatcaaagggagaccgtggaaaggggagatgagggagagggagaccgtagaaaggaaagaggtagaggtagaggtagrggtaggggtaggggtaggggtaggggtaggggtaggggtagaggtagaggtctttgtcttaatctgtttagctactgtaacaaaatatcataccatagaatgggtaccttatatgaagatattggatattccttatataaagaagtaaatatagatatttacttctcacagttctagaggctgagaagtccaaaatcaaggcgttggcagatttggtgtttggtargggcttggttcctggttcataaatggtatctttaagctgtatccccatccccatatgatggaaagagctagctagctctctggggcttcttttataaaggcactgatcccattcgtgagggcagagccctcatgtcctagtcacttcttaaaggcctcacttcctaataccatgaccttggtgattcattttcaacataagaatttggcgggggaacacagacattcagaacatagcaatttcctgaacttttatgatgtttattttccactccaggctatgcatgtgtcttacaaaagcatctagtcagggtatttgttatgtgacttcctgttcattgtacagtcagcaaaatgtcaactacttacagaagttggttaggtgttatggaaaggtgatacaatcaaagtctctacaatctagattatgacagagttggagagtaaacacagacttgaggcaagatagtgaagtccgttttcacactgctgataaagacatacctgagactgggtaatttataaagaaaaataggtttaatggactcacagtgccacatggctggggaggcctcacaatcatggcagaaggcagaaggcaaaaggcatgtcttacatggcagcaggcaaagagagaatgagagccaaacgaaagggggaaaccccttataaaatcatccaatcttgtgagacttattcactaccacgagaacagtatggaggaaactgcctccatgattcaattatctcccaccagctccctcccacaacatgtgggaattatgggagctacaattcaaaatgagatttgagtggaacacagccaaacaatatcacccactggcattcctgacttgcagagaatggccaatacagagcctttcaaggatggtagttctcctctcaccaatgcacttctcaaagcttgggttaaaggagtctcttatattttttggagactactgtaagtaatcattctgccatcttaaaatcagaagtcctaagcctttcccttttcaaaccacttaatttgtctttcatttctatcattccaatgctcttattatcagtaacctctcgttactaaatccaagggacgcttcagcctttagcagcatttaacaatttctattcttggctttcatgttgtcattctcttttggagtttattacatatctctgcttcttcctcatctaatggctggctcttcctccactattcatcctccagtgttagggtgttttagggctatttcttcagctcttttcttttcttgccacactaacttctctccttagatgatttcattcattgtcatcatttcggttaccatctatatgtcagttgtgctcaactttatctccaggccagaattttctctccaacagtagacatagaaaactgacattattatctctgcccactcccatcttcatctccattgttctccattttacaaaatggttccaccatccagtaattgctgaatcaaaggggtttattcatgagtcctcaaatttcttcactctcacatcagtcccaacaccaaagtctattgactctgtctctaaatacatacatatatatatgtatataaatttttaaatagagatggaatcttgctatgttgcccaggcctgtcttgaactgatggcctcaagcaaccctcacactttggtctcccaaagtkttgggattacaggtatgggccactgcgcccagcctaaatacatttctgatacatcaattttttctctacctgtatgtctacacactagtatttagttgccatgtcttcctggtttctctagtctgtaatagtttctcagtcctcccttgtttttcatgaccttgattttcttgaagagtactggctaggtagttcatagaatgctcctcaatctgagtttgtactatgttttctcatgattacactggacttttaggtttttggaaagagtatcacagaggtgaagtgcccttctcattagatcctatcaacaatgagtgatacccacatgatatcactaatgacgttaactttcatcacttggttaaagtggtatctgctagctttccatgcagtaaagttactatttctccctttccctgmtttatccttttatagagagttactctgcatagctcatctttagaagggagagggtagaaattaagctccaactcctcaaattgagaatatctatatgtattatttataactcttctgaaagaagataaaccactgggtttttttggtgtttttaaaattaatatataatatttgtacatatttatggggtacatgtgatactttgacacatgcataagaatgtgtaataatcaagtcagcatatttaggctatcatcaccttgagcatgtatcatttatttgcattgggaacatttcaaatcctctcttctagctgatttgaaatatacaatacattattaaccatagtcatcctactctgctattgaacattataactttttctttctgcctaactatatgtttatacctattaacccacctcttttcatctcccttgcttcacacactcttcccagtctctggtaactctcattctactttacctccatgagatcaacttttttagattccacatatgagtgaaaacatgcaatatttatctttctgtgtctggcttatttcatttaacataatgactccaagttccatccatgttgctaaaaataacatgattttattctttttaaggctaaatagtattccattgtggataatactacattttctttatccattcatccattgatggacacttaggttgatcccatatttttgctatcgtggatagtgctgcagtgaacatgggagctcaggtatccctttgatatactgatttcttttcctttggataaatactcattagtgtgatttctgaatcatatggtagttctatttttagggttttggtttttgttgttgttgttgttgttgttttttaagagatagaatctcgctctgttatccaggctggaatgcagtggcacaatcatggctcattgtaatgtcaaactctgggctcaagccatcctcctgccgcagcctcctgagtcactgggattacagatgtgagccaccattcccagtcctgtttttagttttttgagaaatcttcatactgttttccataatggctgtactgttttacatttccatcaacagtgtataagagttcccttttctctgtatccttgacagcatctgttattttttctttttaataataaccattctaagtggggtaagatgatatctcactgtggttttgatttgcatttccctgatgattagcaatgttgagcattttttcatatgcctgttggtcattttatgttttcttttaagaaatgtctgtttagatcctttgctcactttttaatgggattatttgttttttgctgttgagttgtttcaattccttgtatattctagatattagtcccttagcaaacgaatagtttgcagatatatttctcccattcaacaagttgtctcttcactctgttgattgtttcctttgctgtacagaagctttttagttcaatatagtcctatttgtctatttctgttcttattatctgtacttctgaggtcttagctataaaatctttgtctaaaccaacattctgaagtgtttctcctatattttattctagtagttttctagtttcaggtctctgtttaagcctttaatccattttgagttgatttttgtatatggtaagacagaggggtccagtttcatttttcccagcaccatttattgaaaagggtgtccttttccccaatgtatattcttggcaccttttcaaaaatcaattggctgcaaacatatgcatttatttctgggttctctattctgtttcatttgtctatatgtctgcttttttgttttgttttgttttgttttgttttgtttttaacaaggtcttgcgctattgcacaggctggagagcagtggcatgatcttggatcactgcaacctctgcctcccaagctcaagtcatcctcccacctcagcctcccaaacagctgggactacaggtactaaacactaagtctggctaatttttgtattatttgtagagacaggattttgccacattgcccaggctggtcttgaactcctgagctcaagcgatctacccacctcagcctcccagagtgctgggattataggcatgagtatatgtctgtttttataccaatgccatgctgttttggttactataaccttgtaatatattttgaagtcagatagcatggtgcctccagttttgttctttttgctcaggattggtttggctatttgggctcttttttggttccatatgaattttgtgcccagagattttgttaacactgtccaaacactacagaataaataaattcaactaacagaagtaaccttaggaatgcagaaaatataaaaccttacaattttaactcctcaccttgtatgtggacattagccaagggccttttgttgttgatatggtttggctgtgtccctacccaaatctcatcttgaattgtaactcccacaattcccacatgtcatgggaggaacctggtgggaggtgattgaattatgggggcgggtctttcctgtgctgttctcatgatagtgaatgagtctcatgagatctgatggttttaaaaatgggggtttccctgcaaaagttttctctcttgccactgccatgtaagaagtgccttttgtcttctgccatgattgtgaggcctccctagccatgtggaactataagtccattaaacttctttcttttgtaaattgcccagtctcaggtatgtctttgtcagcagcatgaaaatggactaatacactactttggtaccagtagagtggggcattgctgacaagatacccaaagatgtggaagcaactttggaactaggtaacaggcagagggtggaacagtttggagggctcaaaaggtgacagtaaaatgtgggaaggtttggaacttcctacagacttgttgaatggctttgacaaaaatgctgatagtgatatgagcagtaaggttcaggctgaggtggtctcggatggagatgaggaactcactggaaactggagcagagatgacttttatgttttagcaaagagattggcagcattttgcccctgccctagagatttatggaactttgaacttgagagcgatgatttagggtatctggaggaagaaatttctaagtagcaaagcattcaagagatgacttgggtgctgtgaaaggcattgagttttagaagggaagcagagcataaaagtttgggaaatttgcagcctgacactaagataaaaaagaaaatcccattttctgaggagaaattcaagcagctgcagaaatttgcataagtaatgaggagccaaacgttaatccccaagacaatgtagaaaatgtctccagggcatgtcagagatagttacaatagcccctcccatcacaggccaggaggcctaggaggaaaaaaaatggttttgtcggttgggcccttggtccctgtgctgtgtgcagtctagggacttggtgccctgtgtcccagctgctccagccatgactaaaaagggccaaggtacagatcaggctgtggcttcagagggtctaagcctcaatcttttgagcctgcaagtgcacagaattcaagaattgaggtttgggaacctccacctaggtttcagaggatgtatggaaacacctggatgtccaggcagaagtttgctgcaggggtggggctctcatggagaacctctactaaggcagtacagaagggaaatgtggggttggagcccccacacagaatctctactggggcactgcctaatggagctgtgagaagagggccaccatcttccagaccccagaaagatagatccgctgacacttgtgccatgcacctggaaaagccacagatactcaatgccagcccatgaaagcagctgggagggaggctataccctgcaaagccacaggggtgaagctgcccaagaccatgggaacccacctcttgcatcaacatgacctggatgagagacatgaagtcaaggagatcattttggagctttaagacttgactaggctgggtgcaatggctcatgcctgtaatcccagcactttgggaggctgaggcaggtggatcacctgaggttaggagttcaagaacagcctggccaacacggtgaaaccaagtctctactaaaaatacaagaaattaactgagcatggtggcagacacctgtaatcccagctacttgggaggctgaggcgtgagaataatttgaaccctggaggcagaggttacagtgagctgagatggcactactgcactctagcctgggtgacagagtgagactctgtctcaaaaaaaaaaaaaaaaaaaagaactgactgccctgctggattctggacttgcatggggcctgtggcccttttattttggccaatttctcccatttggaatggctgtatttacctaatgcctgaacccctattgtatctaggaagtaactaacttgcttttgattttggctgataggcagaagggacttgccttgtctcaggtgagacattggactgtggacttttgaattaatgctgaaatgagttaagactttggcggattgttgggaaatctcatgaggacatgagatttgggaggggccatgggcagaatgatatggtttggttgtgtcttcacccaaatctcatcttgagttgtaactcccacaattcccacatgttgtgagaggaacctggtggcaggtgattgaattattattcctgtgctgttctaatgatagtgaatgagtctcatgagatctgatggttttaaaaatgggagtttccctgcacaagttctttctcttgctgccgccatgtaagaagtgcctttcaccttctgccatgattataaggcctagtcacatggaactgtaagtccattaaacctctttctttcttaaattgcccagtctcggatatgtctttatcagcagtatgaaaacggattaatacaggtgtgctgagaaacagaaccattctattccctgtaagggctgtgtcccgtgcatttcatggctatcacactgggcacttkgaggttacagttttgagcttcacccaatctggtttgattccagcaccaaagctttatcatgtctcagtgaatcaatatttctattaatatttatgtttaaaattcttaaatatttaggccctataaggaaaccacacagcaaaaatctgcactctgtttgaactaaaacctgactaaaatagtgaagagttttagtgagtcatgaaacttgaagagatctgaaaaagtggcatttctcctggcctatttacaggagtttcatgtttttaacaacataattgcattgttcagctcatgcctcctccccaccatagcacccagatttcccctctcaaaacagcatttaagaacactttgcattttattgtggtatttttttttttttgtagaagtggggtttcaccatgttgcccaggcaggtctcgaactcctgggctcaagcaatccacctgcctcagtctcccaaagtgctgggattacaggtgtgagccactgcatctggccctgcagttatttttaaggtaaaatttacatatacttaaatacaaaaaagttaactgtataattctgacaaatagatatacgtctataacccataccttcaagatacagaaagctctattgtgtcctttccccatcactcctttcccctgacccccagagagaaccactgttctgattattttcactttagattggttttccttttctagaaattcatataaatggaatcacacattatgtactcttgtacatagtctcttttgcttagcaatgtctgtgaggtttttccatgttggtacatatatcagtaacttgtttctttatatttcttagtactattcaattgtaagactatgccacaatttgtttatccattcgactgctgaagaatgtttgggttgttggctgttttatgctattgtgaataaagctrctacaaacattctgtacaattctttttgtggatatttgtttttatttctcttggctgaatacctaggagtgaaattacttgagtaaataccccggagtgaaatataatgctacatgtttatgtttgattttaccaaatatttttccaaagtggttgtttcattttacattcttaccagcaacatatgagagttctctttgatccacatcctttccaacatttggtgataccagttgtttttttttttttgagacagagttttgctcttgttgcccagagtgcaatggtgtgatctcggctcactgcaacctccgcatcctgggttcaagcaattctcctgtctcagcctcctgagtagctgggattacaggcatgtgccaccacacccagctgattttatatttttagtagagatgggctttctccatgttggtcaggctggtcttgaactcccgacctcaggtgatcccccctgcattggcctcccaaagtgctgggattacaggcgtgagccaccgcacctggccagggtgatgtgatgccagtttttaaaaattatagccgttctagtaggtgtgtagtggtttaaatttgcattttactggtgagtaatgaggttgagcactttttcttgttcatattggcctttcatatatcttgctttgtgaagtgtctgttcaaatattttgcctatttattaatattaattttagtaattctttgtatattttgaatacaagtcccttgtcaaatatatgttttgtggatatattcttccagtttgtggttttgcmtattattttctttttgttgttgttttcattttgtttttgtttttcggagacagggtctcactctgtcatccaggctggagtgaaatggcacaatcatagctcactgcagcctcaacctcccaggctcaagtgatcctyctgccttagtctcctaagtagctggaactacaggcacatgccacaatgcctggttaatttttaaaaatgtttgtagagacagggtcttgctttgttgcccaggctgatcttgaagtcctggactcaagtgatcctcccatcctggcctcccaaaatgctgggattacaggcatgaaccattgtacctggcctcctattattttcttaatgatattttttgatgaatagaagttttaattttgatgaagtctaacttattactttaaaaattattattgctttccatgtcatatttaagaaaatttgtctactcccaagcctcctttctcccccaccaaaggctttagttttaggttttacatttaggtgtcatgaattaatttttgtatatggtgtgaggtaggagttgaggatcatttttttatggatattcatctattctagcactatttgttaaaaggctttcccttttctgttagattgctttgattttctgttagcttgtccttgtgttgctataaataaatatctgaggctgggtagtttataaagaaaagaggattaattggcttacagttctgctagagcctgcagaactttataaattatccaatcccagatatttatttatagcaacacatgttcaagcatgactccagcatctgctcctggcgagggcctcagaaagcttataaacatggtggaaggcaaagggggagaaagcttgtcacatggtgagagttggagcaaaagacagagtggggaggtgccacaggctttcaaacaaccagctcttgcctgaactaactgagtgagaactctcatcaccaaggggatggtgctaagctgttcaggagggatctgcctccatgatacaaagacctccccccgggtcccacctccaacactggaaatcacatttcaacatgagatttggaggggacaaatatccaaaccatatcattccacctctggccctccaaatctcctgtccttctcacattgtaaaatacaatcaacttttcccaacagtcccccaaagtcttaactcattccaacatcaagtccaaagtcctaagtctcacttgagactcatctccttccatctataatcctatgaaattaaacaagttatttatttccaagatacaatggtggtatagtcattgggtgagcattcctattcctaaagggaaataagccaaaagaaagggagaaacaggcaccacagaagtcctaaacccagcagggcagttattaaaacttaaagctccaaagtaatctcctttgactccatgttctgtatttagggcgcactggtgcaagaggtgggctcccaagccttgggcagctccacccctgtggttttgcaggatgcagcctctgtggctgctctcacaggctggagttgagtgcctgcagctttcccatactgaggttgcaagcttgctggtgctctaccattcttgggtctagagggcatggcccactttccacagctgtccaagtcagttccctgatgatggctctgtgtgggggttccaaccccacatttaccctcagcattgccctaatagaggttatctgtgagtgctccacccctaagacaggcttctgcctgggaacccaggctttctcatataccccctgaaatctaggtggaagctgccaagcctccttcactcttgcattccatatgtccacagacttaacatcatttggaagctaccaaagcttgtgctttccaaagtggtggtccaagcagtacttgggtccatttgagctgtggctgtagctggaacagcaaggatgcagggatgtggttcagggctttggtgctccacgcctggcccatgaaactattctttcctcctaggcctctgggcctgtgatgggaggagctgcctggcagatctctgaaatgccttcaaggcmcttttcccattctcttggctatcagcacctggttcccttttagtgatgcaaatctctctagcaattggttgctctgcagcctgcttgacttttttctctctcacttggccaggtggcaaactttccaaacttttacactatgcttcccttttaaatataagttccaactttaagtcattcctttcctcctgcatctaattttgtaggtgttagaagcagccacattaattcttgaataccttgccacttagaagtttcttctgcaagataccctaagctgtcactcttaagttcaaccttccatagatctctaggatgtggacacaaggcagccaggctctttggtagggctttgcatgggtgatccttaatccagttcctaataacttctcaatttccatctgaggcttcatcagcctggccttcactctctctctctctctctyttttttttttttttttttgagatggagtctcactctctcgcccaggctggagtgcaatggagcagtcttggctcactgcaacctctgcctcccaagttcaagctattctcctgcctcagccccccaagtagctgggattacaggtgcttgccaccatgcccagctaatttttttgtatttttagtagacatggggtttcaccatgttggtcaggctggtctcgaactcctgaccttgtgatccgcctgcctcagcctcccaaagtgctgggattacagacgtgagccactgggcctggccaactctatctctatcaacattttggtcacaactacctaaccagtctgtatgaagttccaactttctctcatcttcctgtcttcttctgagccctccaaacttccaacctctgcccaatacccagttccaaagccacttgcacattttcagatatctttatagcaatatcccactctcagtaccaatctcctgtattaggccattttttgcattgctataaagaaatacccaaggctgggtaatttttaaagaaaagaggttttgttggcttacagttctgcaggctttacaggaagcatgctgctggcatctgctcctagtgagggccttaggaaacttacaattgtggtagaaggtgacagggagacagcatgtcacatggcaagattgggagcaagagagagagagggaagaggtgccacattcttctaaacaactagatcttgtgtgaattcattcattaccacaagaatggcgcaaagctatggacaagggatctgcccccccatgatataaacaccttccaccaggccttaccttcaatactggggattttatttcaacatgagatttggaggggacaaacatccaaactatattagtgcctttgactcatcatatatacgtgagtttatttataggttctctattcagttccaatggtccatatgtctatccttatgccaccataagttttgtttttttgtttttgtttttgtttttgtcttgagacagggtcttgctttgtctcccaagctggagtgcagtggtgcaatcatggcttactgcagccttgacctcctgggctcaagcaatccttctgcctcagccccctgagtagcttgtacaacaggagtgtgccaccatgcccagctaatttttgtattttttttttgtagagatgtggttttgccatgttacccaggctggtctcaaactcctgggctcaaataattcacccaccttggcttctcaaagtgctgggattacagacgtgagccactgaggctggcccctacagtcttaatgctatcgttttataataggtcttgaagtcaggtagtatgagtcctctagcttgtttccctttcagggttgtttagtcctttgcatttagattctaggtcctttgcattctcatatacatttaagaaactgcttgtcaatttctacttaaaaacaaaaacaaaaaacctgcctaacctgattgaatctacagataaatttggggagaattgacaccttaacaagactgagtcttctgacccatgaacctgttatatttctccatttatatagatcttttgatatacctcttacaactaactgttttgtagttttcagtttacaggatttccatatgttttgttaaatttatacctaagtagttcatgttttttgatgccattgaaaattgattttttttttttttgagatgaagtctcactgtgtcgcccaggctggagtgcagtggcatgatctcagctcaccgcgacctctacgtcttgggttcaagtgattctccagcctcagactcccaagtagctgggattataggtgcatgccaccatgtcyggctaatttttgtatttttagtagagacagggtttcaccatgttggccaggctgatctcaaactcctgacctcaggtgatccacccacctcggactcccaaagtattgggattacaggtgtgagccactgtgcctggccaaaaattgaattattttaaatctcactttccaattatttatttatacctcatgcatgaagttgatcagatattctgaggaactctctgactcatgctatggggtaattccaggcttccatggctgggtcccagttctagaaaggtggcctgaagattggatactccctacccaataaggcatttatttcatagaattgcatgaaattgaactactaaaatggtgctgacatgctgacttggggtaaattaaattgtttatatgggtaggggccctagaaaattttttttccagtatcctttactttttaggggcagccctaaccaggtgtgtggttgtcccccttcggggaggagagaaatagcatatcaggagagttctgttctcctctttgtgagaacattcactctggcaagaaccactactctctctatccttctgggacctgagagaaaggtagttcactatatttcccccaatctcaccaaagcctctgaaatggatcatcataggaaagtaacttatcataactgcatccttgaccaaaaatttaccccttatttctatttaagtacacatgaaagcatggcaaaaatacatttcagggaaactgattccttacccctgcagcatgctgtctgttgcacaagagctagttatgtatctgaagtgtgaatgggcccagttgagtcttattctgactttccatcacattgaactttggagccttttcaagtctgtgaagttgagatgggaaccattatgaaaagctaatgtgggccgggcccagtggctcacgcctgtaatcccaacactttgggagactgaggcgggcagatcataaggtcaggagtttgagaccagcctgaccaacatagtgaaaccctgtttctactaaaaatacaaaaaactagtcgggcacagtggcgggcgcctgtaatcccagctactcaggaggctgaggcaggagaatcacttgaatccaggaggcggaggttgcagtgagccaagatcgcaccattgcactccagcctgggcgacagagcgagactaaaaaaaagaaagaaagaaaagctaatgtgaatgttctgtttacttgtggcttttatataatttattcatgcacttttaggctagcagaattattcccatgttagtttagtatttctaattaaccaaagtgaacatcactgatgagtggcaaggcctctcaactgaaggatgtctttatgctgaaatcagcactactctggcagcaaaggaaagaccctaagcctattcttctgcactgatgagtaactttctgggttcttacctgctcttagcttttgttcctgggagaaaagagattgtgatttttttttctacgtctgaatatgccatcaaccaacaaattttctatatttaaaaatactgattcccatagaacttgtggcataaaaaacaagtgaatttaatataaatacaaagtattagtttggtgcaaaagtaattgcagtttttgccattacttttaatgaaaaaccgcaattayttttgctccaatctaataattagctggctaggcatattttctagtgaggagtcccgatgtcctcatggtcaggactccactcaccatatgaataaggtgttgaaatgatatttatttggtcaaaatgagagagttatggtttgaacttaagaagaatagctggttcataatttacctgtggatggatgtgggagactgaacaatatggtttagaggcccagaaaagatgtgtcatctaatgtacaaattagagagcatgacactagatgtaatgttttagtgtaatcaaaagaagttatgaacatattcaattcacagatgcgcttttcattctccctcaaaattttatatattctctgatgactatgttacttgtctattttttcttcttcagacttctcatttcagcccaagaagaagaagcttccagtaaatatatgatcattcctagaaatttcacatgatttatgtgactcaattatgggttttgtttgtttgagttggagtcttggtctgtcgcccaggcgggagtgcagtggcatgacctcagcctactgcaacatccgcctcctgggttcaagcaattctcctgcctcagcctcccaagtagctgggattacagacatgcgccacgacacccggctaatttttgtagttttagcagagacggggtttcacatgttggccaggctggtctcaaactcctgacctcaagtgatcccccggccttggcctcccaaagtgctaggattacagacgtgagccaccatgcccagcctcaattatgtttgtaatgctgcttttcccatgctgccaaatagcactgtttcaccatgctatttcsacctaaggcacccactatttatcatcaaggatcattgccaatgatcttaagaactgtcttttctttttttttttgagacagggtctcgctttattgcccaggctggagtgcagagtgcagtggcacgatcttggctcactgcaacctccgcctccaaggttcaagcaattctcctgcctcagcctcccgagtagttgggattacaggcatgtaccaccatgcccagctaactttgtatttttagtagagacaggctttctccatgttggtcaggctggtcttgaactcccgacctcaggtgatccgcccgcctcggcctcccaaagtgctaggattacaggcataagccactgcgcctggccaagagttgtctcttcttaaaacccctctctccaaaattttaggcttcattactcctcaatctgtattctttctaaatggggtaactaagataaataaaagcttactaggtttcatcttgtcaaaaaactctatgtcttggtatgttttctgcatttaaaaaattcacattgacttaggaaagtgtgatctaacactcaggttacactcggggcaactggcaagagtaggtggtatgtgttggtgatagtgagacagtaagaggctgcttcctacctacctgctccaggtggcagcagcaccccagaaggaaggatcagggaagaactttctgagcagtggtaaacctcctacaaacctccctcctcctctggtagaggagtgggcaaagttaaggcaatgaagccctgaccaaatacaactatgcctcaactaatcctctaagatagcttatttggatttttcccatacctaccagtactacaatacatgttgctgtacacaggtgaacttgtctgattattccttcgcaatatatatctacagctgaaaattgctsagttgaagatatatgaataattcttaactttttgatacaggttctcaacttggcctccagaaaggtgggtgaaagtttctatttccccatattctcacccatattcagtgttaaggatctgtttcttttgctagtacaataggttaactattgttaaaatatagggttgttagcagataatctttgtttttgagttttgtaggaacatctctggagtgtcaacattaatatacaacatttgttggtggttgatatagttttttttaatgttagagcggtattcttccttctttcctattttactaaaacatctttaaatcataaggaatatatgctatacattattaaatgcctttggcaacatttttttaagatcgtgttcaaccttttggcaccttttaaggtgctcacataatttttcttctttgaaaatttatgtgttaagttgtattaatagatttcctaacagtgaaccattcttacgttcctggaacaaatcttatatagttgtggtggataactctttaatattctgctgaatcagtgtgctaaagttttatttatgaattttggtcaagtgagatttttctgtaactgtttttgtgtgctgtacttgtgaggcctttgaattggggttatagtagcattgtgaaagaaatcatgaacattttctcctttttcttggtctggaaaattttaaggaatattgaaattatatgtttatttatggcttgaaataatttaccttcaaaattattaatagatgaatcttgtgccttttcttgagattttcttgtatatctttttcaaaatcattcatgtttattgctacgtctagtatttggcaaaatgtattttgtgagacactagtcctttgaagtagtctttaaaaaactttcatggccaaagaagtcttggtgactcacaatggacataaccatgtattctgctgtcaagaaaaaatgaggtctcattcgtttaacacagaatttccaaaatgtatttgatgtgattttcttttataacctaacacttgtggcagaagctgctgatttttcagtcccaggatttattctttctatcttcctttggtattagaatccccaaatctgtactgggcacatgggtactcagaacaaagacaaaatttttctttattcttttgtttttgtccttcttttagatagttgcgactgtatgattaagttctggccagcaggatgtgggtgaaagtgacatgtgtgtcttcagagtggtagctttaaaggaaggggcatgatctacacaataattgcccctcttaccagacttaatggagggtgcatcttggacaagatgcaaactgcatgtagrgtatccctgaacaacaaaataaaagaaggctgggtgtctgcctccaacaaataaccatttcagccctgggtttttataaaaaaatacaaaacaaaattttgtctcaaaccaagacaccatgaayctcccttgccaaagaaagtagcttgtcttcctgtgtttgcgtacactagccttgctttggttgaaaactggtaacaacctaactgggatagttttgcaaagggatatgcatcctcctcaagaatcactacaatcacctttggttgccactggaatcataagtaggatccaatctcagtctgctctagggagtcagatattgtgttagtcctttcttgcactgctataaagaaatccctgaaactgggtaattaataaagagaagaggtttaattggcttacagttctgcaggctatacaggaagcatggctggggaggcctcaggaaactttcaatcatgatggaaggggaaacaggaacatcttacatggccagagcaggaggaatagagagaatggggaggtgctacacacttttaaacaaccagatctcgtgagaattcactcaatatcatgagaacagcaagggggaaatctgcctccatgatccagttcacctcccaccaggcccctccttcagcattggggattacaatttgacatgagatttgggcagcaacacaaattcaaaccatatcagatatacggtatgacccaggaagaaatagctaattcaccattattacacggtttggctaatatatacagtgttaacagaaacctgagaacatttgtagtaggttctaaaggtgtcagaccaaggtaaccggtagaattaattgatcatgtagaattattaattggggacacttactagagattccaggtttaatgtgttaatgtatgcagatggagatgactgtaacagctttatgagttggttgactgaaattttaactcaggggtgacatgtttaatgaggatgagatactggagcttcactggcatgaagtaaagaaggaaatccaaacacttaaaggcattgaaaagttggagtgagtttattatgtgcaaactgcacattcatcttcccactctaactcctgaggaggcctggaaaacacttctgtcactagggcatggagtgatacatactgtgattgctttcctctgtgggaaaggtatgaccatgtgagttgctgccattgaaatgaactcccagatttcactagaaatgatgtgagcccaagtagcagatatcaaatgacagcacttaactgtgaaaracaaggtgggtggctgcattactgtaaagggcagcagagatgttatcagtaataaagatgctgtgaccctgtcttggtttcttttggctgctataacaaaaataccatagactggatggtttcaacaacacacacttatttctcacagttctagaggttgagaagtccaagatcaaagtgctggcagatttggtgtctggtgagggcctgcttcttagttcatagatgactggctattgtctcattgtgtgctcacagagcagcaaaggcaaggggtctttctgggggtctctttcataaggagactaattttattcatgggggatccacccttatgacctaatcacctcccaaaggcctcaccttctaataccatcacatggggggttaggatttcaacacatggatttttttggtgggaggggggatacaagcattcattctatagcagatccgtaaggagccttggttttagccaattaattatgatgttctttggagtgaaacagagcagcctatcctatgtctgatagccaaaaacccgacttgagttaccacaatggagcatcatggcctctcagccagttgacatacttaagccagtttacaaattgtacagcccttgactgaatgggagccttctctcccttaaggagtgatccagcaacattaaattccatccagctgcaagaatacattataaaaccttctctaggccttatccaaagagaccttcgccatttgctagagtggctgtaagctaggaaaaaaaawaggaatatccagacctttaaggtattaacaggcactgtctctgaattgatgctaagtaattgggatccaaaatgacacaggtggctcacagtggggctatcggtgacaggtgatagatggaatcttagcctaagttaaagtaggactgctttgtccacagaaatatcctatggttgtttccctatctcctgaattggcataaacatgtttatgagcaccattgtggtagaatgggctaaacctgtctatcaaaatagcaaaccaaaagcaatactgcatccctacaggaattgcagatatcagtgccatcaaaggcttgaaacagctcagatgctgataactttcatgtccacattcaaaatacctgtttcagccaagtgcaatggctcatgcctrtaatcccagcattttgggaggccgaggcaggcagatcacttgaggtcaggagtttgagaccagcctgaacaacatggtgaaacccctgtctctaccaaaaatacaaaaattagctgggcatggtggcacatgcctgtaatcccagctactcgggaggctgagacaggagaatcacttgaacccaggaggcagaggttgcagtgagctgagatgtgccattgcactccatcctgggagacaaagtaagactccgtctccaaacaaaacaaaacaaacaaacaaaaaaaacacctgtttggcctctacagagactggatggatcttagagaatgactatagatgatcaggtcacaagacaataccatgaaaggatgggattttgtctttcagcatgcagtattatgctttgaatcagagatcattatatggcactgtctcttccataaccagaaaccagaaatcaagagatggaaatggctattctctctattacatgtaataacccactcaccagatttttgctttccccttcagctactttgagctctgttggtttggagatcttagtttctaatggggaatagaacaacgattccactgaattagaagatgaaactccatttgactatttgggctccctacgtcactgaaccaacaggcagataaaacagttactttatgcaatgattacttccttagtaccatgggaaaattgagttgctgctacacaatggagcagaaagaacgattctgacaccaggggattctctggagctgcttttaatactttcttttcccttcccttcccttcccttttccttcccttttccttctcttttccttcccttttccttccccctccctccctcgtttccttccttcctttccttcgttccttccttccttccttctttctttctctctctctctctttctttctttctttcttttcttccttccttctttccttgatggaatttcgctcttgttgttcaggctggagtgcaatggtgctatctcggcccactgcaacctctgcctcccaggttcaagcaattttcctgtctcagcctcctgagtagctggaattacatgcacctgccaccactcctggctaatttttgtatttttggaagagatggggtttcaccatattgggcaggcyggtctcaaactcctgacctcaagtgatctgcccacctgggcctcccaaagtgttgggattacaggcgtgagccactgcgcccggctacttttaatactttcacacccaaagttaaggttacagaaaactatagcactttttaaaagcacaagactattgaggacttttcaggaatgaagtttcagctcacctctacattataaaagagcaagatggctagtggaagaaggaagtcatagataccacctatggccaattatagacgtgaggactgtagtagcattacctattttctctttgtttactatatgtatgtttacttgtatatttaactattttatcattcactctctttttccccttattattttatataccagttgttggargttaactttacaattgtgtctttaggtggaagaatattcagtgggaccatgactaaatttgaggctaaattattaggttggtgcaaaagtaattgcagttttatatcgtgaattttaagtcattataactaggctcaaacacttatttattaatcaaaataggaaccattaaaatcaacacatttttgccaatgagaaataagtttatttattcctgtagcataaacatctgtgcttcgggattcaacaaactctcttggaaagcattttctgcatcctgccggtcgtagaagcattttccctgcaaaaagttgtcgacatacttgaaggagtggtagtcagttggagagaggtcaggtgaatatggcggatgaggcaaaacttcatagcccaattccttcaacttttgaagcgttggttgtgcgacgtgcagttgggcattgtcatggagaagaattggaccctttctgttggccaatgctggctgcagacattgcagttttcggtgcatctcattgatttgttgagcacacttctcagatgtaatcattttgccgggattcagaaagctgtagtggatttgaccaggtgcagtggctcacgtgtgtaatcccagggaggccaaggcaggcggctgaggtcaggagtgcgagatcagcctggccaacatagtgaaaccccatctctactagaaaaatataaaaattagacgggtgtggtggtgcacacctgtagttccagctactcgggaggctgacgcaggagaatcgcttgaacccgggaggcagaggttgcaatgagccgagatcaagccactgcacttcagcctgggtgacagattgagaccctgtctcaaaaaaaaaaaaaaaaaaaaaaaagctgtagtggatcagaccggcagcagaccagtgactatgacctttttttggtgcaactttggctttgggaagtgccttggagctgcttcttggtccagctactgagctggccattgccaattatataaaatccacttttcgttgcacatcacaatctgatcgagaaatggttcgttgttgttgggtagaataagagaagatgatacttcaaaacaacaatttttttgattttcagtcagctcatgaggcaccatttattgaactttttcacctttccagtttgcttcagatgccaaatgaacatagaatcgtcgacgttgatttcttcggcaacttttatttatttatttatttatttatttatttatttatttattttttttattgatcattcttgggtgtttctcgcagagggggatttggcagggtcataggacaatagtggagggaaggtcagtagataaacaagtgaacaaaggtctctggttttcctaggcagaggaccctgcggccttctgcagtgtttgtgtccctgggtacttaagattagggagtggtgatgactcttaacgagcatgctgccttcaagcatctgtttaacaaagcacatcttgcaccgcccttaatccatttaaccctgagtggacacagcacatgtttcagagagcacagggttggggataaggtcacagatcaacaggatcccaaggcagaagaatttttcttagtacagaacaagatgaaaagtctcccatgtccacttctatccacatagacccggcaaccatccgatttctcaattttttccccactcttcccgcctttctattccacaaaaccgccattgtcatcatggcccatccccaatgagccgctgggcacacctcccagacggggtcgtggccgggcagaggggctcctcacttcccagtaggggcggccgggcagaagcgcccctcacctcccggacggggcggctggccgggcggggggctgacccccccacttccctcccggacagggcggctggccgggcagggggctgacccccccacctccctcccggacggggcggctggccaggcagaggggctcctcacttcccagtaggggcggccttcttcggcaacttattgtgtagttgtaagaggatcagcttcgatgtttgcgctcttttggtcattatcaactcccaatggccagccactgtgctcctcatcttcaaggctcttgtctcctttgcaaaacttcttgaaccaccactgcattgtacgttcattagcgttagcagctcctgggctaaatgcattgttgcaagttgtctctgctgctttacgacatttttgaacttgaataggaaaattgctcaaatttgctttttgtctaacatcatttccatagtctaaaataaacataaaataaacagcaagtaatgtcatcagcaaaataaataaataaataaataaagcgagagtgtccattaaaataatgtataacataaccacatttatttgagagtgtatcscaatatcaaaaggcaaattccaacaatgcaaaaactgctgttccttttgcgtcattagtataactaatgatggatataatgaccggactatgtgtctcctcattttgtggagttggtgagaaattcacttatataaagtttaaccgaatctttttaggtagaaacatagagttgttttattgttgtatggaagtttgaatgtgtgtaaatgggtgcatatggaagccaaagggatgaattgtgccatttattaatttattgcttctcagatccaaatgtacccttctttgccatgctatttaatattggagatggaccctgtaaacaggtttactttgtcagctgcttgatattagtcttgtcaatagggagttctggagaaacactgcaaggccatagaagaagaaagatacttcatttcctggttccactgagctggtttttgacatcatgaaggaggcmtggtattgctctcctcagcagccagctttgccctgcatcctttagcatatttctctgctacctagcaggttgcttttactgaccagctacggccaacctgcgtccttcagcaagtttttccatcagccagtggggtgcccctacaaagcagatccagctgcctacatggtccggcaagtttttcctccctctggtgagtcagtcctatgagccagctctggtcagcaacattcggcaagttctttcactaactgaaggcatcttgttcctgaggcagctactccctctccaaagaggtctgagtcttagcttagtagtgggactcttctaaggcttttgttctttccttgttcccttgttttgcttttccttcttaaattccagtcctcactgggcttgtatgaccacactctccacttcttgtatgactcagtctcttttgttgcttctccctgtatgtctacccctcaattattggtggtcacttggtttcatcctagttcctccctgcctccccaccctcaactctatatacttgttctgggtgatcttaactttttctgtaagatcccagctcttaccctaaccctaaccaaattcttctttgtcctaagttattctcctaggcttcagaccaatttacacttggatttctcacaagtacctcaagcctaacatgtcccaaaagtgaactcatcattctttccttgaaatctgctactcctgaattttctattttggttattgacttcaacttttactacatagtccaagttaaagatttgaaaccactttctactttctttatttttcatcaaagcttctttattgctccaggtctgcttagtccacctcccaaatagttcttaaatctgctttaacattcttctcctaacccattgaaatatccatggaaccattctcattgccattattttctgtcctctccacaccattttcatgctactgccatatttctacctcctctttgtatacaatttaatctggtcattcccttcttaaaaatctctgctggctcctaagtgcttacaggataaaatgtaagctccttagaatggcataaagggtccttcagcaggcgtcactaactcttcatgttccagtcagttcaaactttttgccatagacctttcaaatctagaaatttgtgtgcctcaattctgggaaattttattgagttcttcctttcctttttctttttttagagacaggatctcactctrtaactcaggctggagcgtagtggtgtgatcatagctcactgtaacctcaaattcctgaactcgagagatcctctaaccttagcctcctcagtagttagaactacaggcatgtgccaccaagcctggctacgttttttaaaacttttttgtagagatggggtcccactgtgttgcccaggctgttcccaaactcctggcctcaagcaaaccctcctgccttgaccttccaaagkgctgggattacaggcatgagccactttgcccagcttaaattatttcattgatgattccctcccctttgatttttttgggtgactgctattattctgatgttgtacgttttgaactggtcatctagttttctcatcttttctctcctattttccatttctaactcattttgcactactttaaagagatttcttcaactttattaatatgtgaatttctgctattatgtatttaatttccaaaattctttttcctttgtcctctaaatgctccttttattaattcattcttgatgacaccctattcttgttttatgcatgtgttattctctcttctctctgtggaattttcttctcctggcagatgctttattttccctaagatttttttttttccatttgttgtttggttgttttgatatatgtctttggtgtgagacatatatcttcttcaaagatataaaaattcttggttatctgatcatgattacaagttaaagagctgattggaagcttgagcacaaggtggggcttattcattttgagtttctctgtgaacagatcaacaggagccatttgttggaaaaacccctaatgtcagtatttttaggtctttcttttgggatggtcagagtgcccggtgagagtcttgcatttcctgcctgcagaggtccagctgcagccaatgttctgggagcagtgtgggagatgaactaagagggtctcagcatttagtatgtgtattgtcatctgatttctctgtttttacaaggtatccaaccctttaactatacctggcacccccagaccagaggtcttcatcatatcttccccagaaaatcagcctccaaacttctactgtagtgggagagggatggtcatgtaaccatagggaaatgggggaggagatgtaggaaagtaatcactactcaaatagctgttacccaatcctcattttagccactctccttcatccctagtttcagaagtaattgatactgccagtttttattaatgcctgggcattaaggagatactggtgaagacatagagatctttatatctagaccacttattcaaatatgacaatgaaaagagagtgtgaaatataacacaagtcagagagaaytgaggggtcaaacagagactcttttcctctcagaataagagagtttgtacatactggaagggaaagtgaaaatcctcagcggagagacagaaattgagaaggtctgaaaaataggggckaattatgacaggaagatcctgaaggacccagagaaggtgagttggagggcataggcaaagagcttaaatttggtaggaggcaggataaaaagaaggcaggatgctgtgatctttagagaaagaaaagaagaagtcagtgcaatggcctattgttttttgtagaataagtggataactcatcttctgaggataataaattcagagcttttttttttttttttgagacggagtctcggcctgtcgcccaggatggagatggagtgcagtggcgtgatctcggctcactgcaacttctgcctcccagtttaagcgattctcctgcctcagcctcccgagtagctgggactacaggagactgcctttgcgccgggctaatttttgtcgtttttagtagagatggggtttcaccatcttggccaggctggtcttgaactcctgaccttgtgatccacccgcctcggcctcccaaagtgctgggattacaggcktgagccactgcacccggtcgttctcgtcttatatatgattctggtaattattccttattacttttcagaaattgaggcaggtccaagttttgtgggaccaggagcctatgcaatctaggtgttgtctttaagaaaaggaacacaattatgaatataagattaagcacaaaagcaaattagttacaagagtttaaatggggccaggtgtggtggctcacgcctgtaatcccagcactttgggaggcctagacgggcagatctcttgaggtcaggagttcgagaccagcctggccaacatggtgaaatcctgtctccacaaaaacaggaaaattagccaggcttggtggcatgtgcctgtaattctggctacttgggaggccaaagaagaggaatttcttgaacccaggaggcagaggttacagtgagccgagatcacaccactgtactccagcctgggtgacagagtgagactctgtctaaaaacaaacaaacaaaaaggtgcggtttaaaagcagccagcagccagtgcggctggacgcagtggctcatgcctgtaattctagcactttgggaggctgaggcaggtggattacctgaggtcaggagttcaagaccagcctggccaacatggtgaaccctcgtctctactaaaaatacaaaaattagctgggcatggtggcgcacacctgtaattccagctgctacttgggagcctgaggcagaagaattgcttgaacctgggatggggagattacagtgagccgagatcgcaccaatgcactccagcttggatgacagagcaagtctctgtctctaccaaaaaaaaaaaaacaaaaaaagaaaaaaaaagcagccagtgcaagtgaggggttttgaaacttawgcttcattataatcatgttatatctatttttattcagagatcaaaccttctcctcttatttaaagtccagtaactgggtctttgcgtctctgtgtctgagttcattttatttttgttttctgcccaggtcgtcagtttctctttcttcttcaggactagagacacagggtcatggaatctgagagctagaagagaccataaaagatcatctgatttaaacatttaattatggaaaagagaataagatccagaaaagtgaaatgatttgcatgaggytccatcaccaaggagatgtgaattagcacamcctcaattgcaaatattagaaaccccacatcagaatagctttaatgaaaaagacttctggttaactataatgggttgaacatttgcatttatttctgctccttccgctaaatctctctagatcagtacttcccaaacttcaacatgcatatgaatcaactgaggagctcattaacatgcaatgcatccaaaaattctggggtgaggcttgattctacatttctatcaagcttctaggtgatgccagtgttgctgatctgtggatcacattttggatagtaaggctctggatcaggggctgatgaactacagccacagcctgttttttgcatggcctgtaaagcctaaaatatatactatctggctctatatagaaaaagttttgccagcccctgatctagatggcaaaaagagaatgagaaaagtataaacccatggaaagaacaaatgcgataacaacagaggaccaacatttttaaacaatctggaagatgaaaagcagatggacaaattgtctttgctgaatggagtaagaagaaacccaggaatcttcatggggtgaaatccacaaagaaggtttgtttagattacatcccttagaaaaactcagggcttggagataccaggtgcctggaaaagttgataagggtgggtgtataggaagaaaggaaaaagtggtagacacacaactgggtcactgatatccccttttgagaaggactatttgctccactgcaaggaatgtgtttagctaatagtttccagctgttagcttcatcaggttctacctcagtttgtgagctgaaggcatgcttttctcagggaggctctagccaatgactgtacatgtgccttgccatttgtgcttaatgcaggactcttttaatgggaaatctttgccctgaagccctctattcggctgcaaaggttggcaccatggtctgaccattctgcctgtctgatcccaccatgcctctgaaaatgccccatccctatgaaccctcagagttggggtggggacagtggaggagattagtgccatgtttaaagattgagagggtgcaaaggatgcgaggggttgtgatccctactgtaaccccatttaacttgccaatatggcccctgtagaatctagaaagtttccaaaggatgcctgtagattaccacaatctcaaccaagtagcagccctgattgtatggcagtarcaactgccatactggacatggtatcatcactagattagattaatatggcctcaggtacatagcatgtagccattttgttggcaaatgcatttcttttctgtcctaatcaagaaagaatcagaatgacatacattcatatgaaacatagttattgtattagtcagggttttccagagaagatctacaaggtaagttggcaagcttaccttgcctggagactcaggagagccaatggcttagttctagtctgagtctgaaggtgtaagaaccgggaaagctgagagtatagttcctgtgtgaattgtgtgaggcttgagacccaggaaaaaccaatatttcagtttgagtctgaaggcaggaaaaaagctgatgtcccagttcaaaggcagtcaagcaggaaaaactccgtcttagtaaggggaaggtcagcctttttgttctattcagaccttcagctagttggatgaggcccacccacatccaggagggcaatctgcttaactcagtctactgatttaaatgctaatttcattcaaaaataccctcagagaaacacctagaccaaatatctgggcatctcgtagcctagtcaagttgacacataaaattaaccattacagttatttatagttttgccttggggttatattacatttcttgccctttgtcataatgtagtatgatccagaccatctcaaagaacatcttgttgattcattatattgatgacatcaagttgactgaaaagcataagcaaaagtttgctaggatgctagtggccttattaagacacatatgtgctgtgcagggtgggagaaaactacagtgaattggagacagtcattttggtaaaacgcttaggggcccagtttcagggcatgttaggatatccccttcaaagtgaaagataaaattgtttcatcttgcatcccaagtacatagaaagaagcacagagccagataggcctcttcaggttctgaaggtaagagggactgcacacctaggaatactgttctagcccctatactgaggtaacacagaacgctatcatcctttgtggtgcttggagtaggaaggggctctgaagcagggccaagcagtaggggaagcagccttgatgcttgggctgtataagccagcaggcccagttgaaggtatctgtggtgggaaaagatgcaatatggagtttatgggaagccccagtggaggaatcacagtgcaggtcctgggaatttggaacaaggtcatgttagtcacaggagaggattatataccctaagagaaatagctcctggtgccttactgggccctggtagagacaggacgcttgactctggggcactaagttactttgagtatgaaactttccattatgagctgggttctgttagacctgccaagtcataaattcagccataccagcatctgtcattagatagagacattacatccaggactataacagccttaggaggaatagagagcatgagcaggaagtctaggcctcctataccacctgctatatttgcattattgctcttccctaagcttgtgcttatatctatatgagagaaggtaagtctgatgtgagcgctgaaaaaggaagaaaaagcctgagcttggtttatgggtaggcctgtttggaatgtggatacaagccaaaaatggacagtaatggcattatagtcatattcagcagtggccctgaaaaatggcggaaaggaaaacttttccaaatgagtagagctgggagcagtgcatctggctagctgctttgtgagcaggtgaaagtggctagagaggtgaatatatatatatagattcctgggcagtgaccagaaggcaatgaccagagggcttgggccctctggtcagggacctggaagggaaaggatttttgtgtcacatattaatggccacctaaaagcatccaacatgaaagaggcattgaacagtcaagcagacaaaaatgacttggccaggtattgctaactagcctggtgctaactagctggctgccccaggactggtatgatggggacatgacagagaactcatggtggcataagtggaaattacatataggctcaacagcaggcattcccatctatcaagatttatctagctattgctgccttgaatgtccaacctgttggcaaccaaaatgaacaactaacctcctgatatagcattgttcctgmtacaggccaactgtatcacacagcacaccagtccctttcattctaaaagggtcaagagtttgttttcaaaaggagagatacctgcatatgagtttgcctttcctgcctacagacctcaaatagccccagtacccaaggacttatgaaatgcctgatccacaggcatagaattcaacaaggaatagcatccaaccagggaacccacttcacagcaacaggtgtttgagagtcatctggtactatagtgtgaatgtcccttctaaaactcatgttgaaatttaattgccattataacagcattgacagtcaggacctttaagaggtgattaggtcatgagggycctgccgtcattatcatgagagtaggttagttatcacaggagtgggttcctgataaaaggatgatgtttggctcccatcctctgtctcacaggctcactttcttccattgtgggaaaacacagcacaaaggccctcactagatgttggtgccatgctcttggacttaccagcctccaaatcatgtgttgaataaacttacattctttgtaaattacccagtctgtggtattctgttattgcagcacaaaatggattaagatatctggcatcaccattgaataccctagtcatatcatataacacaatatccagccagcctcataaaatgctggaaagaccttctacaggcatagaagcaaccagccttataaaatgcttaaatgcccttctatagacacatttgatatgcctagttcagagaccacattttgaagggatggggtggcatccttcaagatgatgagtatgcaatgaattaggcacctctatatagtgttgtggctccaacagaaatgagaaaccaaggagtagagacaagagtggcctcattatttatcatcatttacaatgaacttctgggagattctgtgcttcctgtccccacaactctaggttctacaggactaaaggttcgaatccattgcaccctaacttacggctgctgccagggcatcagagactccttgtgcccaggggctagcaggtgagaaaaggagttagcatactggcaggagtcattgacccttaagcaggaggcagtattcctcttacacagtgtgagcaggaaggaatacgtgtagaactgaagagatcttcctgattgcctccctgccccaatgtaactgtgaacagacacatggaataatcctggcctataaaggtatgattgctgagagctcagaactctaaggactgagggtttggatcacatctctaagcaagttccaagacccgctgaggtgataacggagggtgaggggaattcagaatggatagtggaagaagaaaaagatgagttccagttgtggccccaagaccagttgtaacaatagggaatagagctcatcccattaactatcctcttctgagtttcccctcaggaagagaactgtggaagatctgctccctgatttgcatgaagaagtaaattggtgaggtaaaagaagtgaactgtggcagccatgaaaatgctcttctcagatttctggctgtgggaggcatactttactgaccactttagctgctgtgctccaaaatctatccctgcatttacctctggataaatgctttccacaggctgctgccacccagtgatttagtacaatgagaaggagtactaagacaggtccattcctagaaggcgcaggactcctctgatgggcacatttggtcttgcctaactttcttagaactatactgcactctaagacccccccattcaaccttccttcctttcttttctctttcatctgcattgagatctgatgtctcttacagtcttccctagcttctascttcctctccatgttccctattaagcataacgtctaataaatctcttgcacatctaatcccatcttgactaattcacaccctaaatgtccattagagggagaatagacaacatgtggtacatttatatagtggaatactactaagtataaaaacagaacaaactgtcatgagaataacataggtgactctcaattattattatgcttaataataaaccagacataaaataatttatgccatattattccatttaaatgaataattggtatctctgggaggtgggtatcaagctgaaagggacataakggacttttctggaatgacagaaacattctacattttttctatgtaaagacctcatgggtgtatacatttgtaaaaagtcttcctagaaagcagactcagggggaaaacatcatcaagctgtacacctgagaattgtgccttttaattaaaagtactcaaaaaaaaaaagattggtgcttttttttttttttttttttttgagacggagtctgtctgtcgcccaggctggagtgcagtggcacgatctcgactcactataacctccgcctcctgggttcaagcgattctcctgagtagctgggattacaggcgcatgccaccatgcccagctaacttttgtatttttagtagagacggggtttcaccatgctggccaggctggtctcgaactactgacctcatgatctgtccacctcggcctcccaaagtgctgggattacaggtgtgagccaccgcccccggcgatttgtgcattttaatgcatgaaaattccgcctcaataaagtattgaaaaaataataaaggagatttattggttcatgtaactggatgttgatagagggcttcaggttttgattcagctgtttagcaatgccatcagaaatctcattttttttttttcatctttcccataagtcttttggtatgtcagcttcaacccaagcctggcttacctttgtattcacagcatgctaccaacaacctccttttctgggtcgaggcactaagagaattgcttttgtaagctctcttaaaagagtaagaactttcttctttcctggaagttgctagcaaaccacatatcttattggcccaataggttatgctcattcctgaaccaatccctacgaccagggaaatgccatacactgattgacttatctctgcctatccctgaatgaatcactttagaatgagatatggaattatgccagttgatcagacaagttagcacttacccttggagctaaagtcctctaattttatggctgctccataactgaaggaagagaaccacgaagtctaccacaagaaaaatagcagttgactggacacagtggcttacacctgtaatcccaatactttgggaggctgaggtgggtggatcacccaaggtctggagttcaagaccagcctggccaacatggtgaaaccctgtctctactaaaaatacaaaaattagccaggcatggtggcgggcacctgtaatcccagctactcaggaggctgaggcaggagaattgcttgaactcaaggggtgggggttgcagtgagctgagattgcatcactgcactccagcctgggcaacaagagtgaaactctgtatcaaaaaaaaaaaaaaaaaaaaaaccagagttgggtaataggtccaatcaattcaaatcatggtcttctagccaggcatggtagctcatatctgtaatcccagcactttgggaggccaagatgggaggactgcttgagcccaggagtttgagaccagcctgggcaatataggaagaccttgtctctacaagtgtggtggcgaatgcctgtggttccagctacttgggaggctgaggtggtaggatcgcttgagcctaggaagcagaggttttagtgagccaagattgtaccactgcactccagcctgaataacagagccagacactgtctgaaaaaaaagaaaaaaaaaaaatcatgatcttcctttctaattcctaaatatttctcattcccacttcattcagtgtttatgatatacccaaacaaagtgttatcaggaagcacaggtgtctatcttctacattttgaaatagaagccaaaataaattttattaaataaatgactgggttgcatacagtttgcttgtcaaatgatacctaaatcctcatctctgagtctcactctatccttcaccttcatctcatcatttcattccatgcaaaggggttgaggatgtttcacaaatgcaaatttaaagatttatttctaaggttggatcaaaattttcctgacatcaaaagagttgtattaagatgtgaggtattcttcctggttattgatttttggtatttgtgttttcaccctggggattgcaatgctgtaaaataagtatctttagactcccacagtctccttgaaatatgtcaattctctcatcagagaagagggatcaaacagagagaggtaacacaggcccagagccattgctagcccatatggtcacttggtgagaatgagaaagaggcacccagatgcaacctggttggtgcagggatgggcaaatggagtgcaggccagatttcagcccctttttgcccgatgtctagatatcttttcgtccaatgccttctacaagcctttattacctccttcccacactgttggtttatctccaaactcatcttttgcctccagactttatctttctcctgattcatcctacatatttctgtctggttaatattcctaaaacactgccttttatcatataactgtcctgctcaaaatacctttattagcttccctccaccaacctaagaaaatgcagattcctcaagttagcattttacaatgcttttaaaagcttttcacaatgtctcctgtctctcttgcagtcttttcccactatttctcaccacaaacttatggtccaattaatctagcattcttgttattcacaaccacatattgcatattcccaaatgtcttatttgcygtgttattaccatctgtatttatatatttatgtgcttattttttattttttatttatgtttttgagacacagtctcactctgtctcccaggctggcagtggtataatctcggctcagtgcaactccgcctcctaggttcaagcaattctcctgcctcagcctcccgagtagctgggattacagatgcccaccatcatgcccagctaatttttgtatttttggtagaggtggagtttcaccatgttgaccaggcttgtctcgaactcctggcctcaagtgatccacccacctcagcctcccaaagtgttggaattacaggtgtgagccaccacgcccgcctaacatggagcttatagtctattttgggaaacagacattaagcaaataaacacataaatataggctaggcgccatggctcacacttgtaatcccagcactttgggaggctgaagcgggcagatcacttgaagccggagtttgagaccagcctggtcaatgtggtaaaaccccatctctactaaaaatacaaaaattagctgggcatggtggcatacacgcctgtagacccagctacttgggaggctgaggcaagagaatcacttgaacccaggaggcggaagttgcagtgagccaagattgtgccactgcactccaacctgggtgtgacagagtgagactgcatctcaaaaaaaaaaaaaaaaaaaaaaaagacagtaactgattaaatcagaataacatattcattgattcaaagtgcaaatattttctgaacatcttctatgtgtaggcattttggcaggtggtagaaataggcccttacatggaaatggttcctgcccttccacagctcatagtctagttagggggacaggcattaaaggaatattcgttctcccaaaaaactctgataaattataggaaagaaaatagtgtgtgttatggaagcctgtaaatgtggtaccagattcaaggtggagtagggattatgctattttgcagtaatctatttatagwtatttacagatataaatccatttaccaatataaacagatttctttttctttctttttttgtttttttagagagggtcttgctctgttgcctgggctagagtgcagtggcatgatcatagcttactgtaaccttgaactcctgggctcaatcaatcctcctacatcagccttcagggtagctaggactacagggtgtaggccactaatccctgctattttttatttcttgtgtagagatggggtctccagtctgctctgttgcccaggctggtctagaactcctggcctcaagggatcctccactttggcctcccaaagccttgggattacaggcatgcgccactgcatctggcctaaacagatacttattgagtacctactacactgaataagcaaacaatttgaattacttctaattccagccagcctgggcaacatagggagaccgcccctctacaaaaatttagaattagctgggtgtggtgctgtgcatctgttgtcctagttattctggaggctgagatggaaggatagtttgagtccaagagtttgaggttgcagtgatcaccccactgcactccgggctggacatcagagtgagatcctgtctctaaaaaaactttttttaaagtgaattatttctaattcttacaacatttatgtgtagaagcattattactagctcccttttgcaaatgatttaatagaatcatgaatagcatcacacacagcaagtgtgattcacacccaattctgcctgtgctctttaattctgagattacagcaaaaccaaactgtggctccagcctgtctccaatcatttactctcttcttactcttattttatcctacactctaaatctctcttactttgaagggcaaactcaactatagaaactcttttaatacagttcttggaacgttttaaagttgtagagattagtttgtcagcaaattctgaaataatctgagctttcttgatcgagcaagaaacagtaacttacaattgcgtgttgtttatggagttagtgatgaagctgccattcttgagcacccactatgtgccaggcagaggataaattatagtgaaggaaatagacatgattctcactctcatggagttgacagtcagacattaaacaaatatataaaaatacaactatgtaaaggtgtagaagactgagccaagtgaggaaaacatgaaagacctaattcagattggaggtaggggatcagagaattctaccaaaaaacacgcaaaagtgttttgtattctaggatgcaaggtgctaaaccctccaaaagaccccaccaggatgcarcccccgtggcgataagatcttgatgccccattgtcaaggggtggtgcgactttgtcccactctggggtggggtgaccgccggctttatcctacattgttgtggcgtgaggtgagttttcatcatccgaactttctgatgttttcccctagtgtcttctttcccagcgtctttctgccagatcttccgctctgctgtgacaacctcctgtcacatcagtaccgttggagctggattgtttttttctccttgtaccccgcgagcctataacttcacggaggcggctccttggatggcttatggccccgccatttcattcagtcacacagtccattcctgtctggccggcggcaggtgggttggaggtgcgcgggcgggcgggcgggcgtgcgagagcgtccggcgctcctctcccctccgcggtcgccggatccgcgagagcgctcggctcgcgttctaggctgtttgcgcctggagcgcgccgcgggcccgcgctcgctcccgcctgtcttcgcgtccgcggcggccaggacaccgcgcgccgcctcacgctaccctgcaggccgcccgcgtctgccctcgcggcgcgctcccgggcccggccgcggttccccactcgggccggctggctcgcgggttctctcgccccgcccccctcggcgccaccgctgggcgcttgcgcggggcgcgtggccgtggccagggtctccgccgcagcccgagcagccgccgccgcctcagtcagtcagtcagtccccagcaatggcggacggaggtgagcgagaggagctgctctcgccgtcaccggtctctccggcyaagcggcagtgttcgtggcccagcccgcaggctcatcaccctcgcggttcgcctggggcagccggcggaggggcagggggcgtcggcagcagctgcctggtcctcggggcccgcccccacctgcagccggattccttactggactgcgccgccaagacggtggcggaaaagtgggcatacgaacgggtggaggagcgcttcgagcggatcccggagcccgtgcagcgccgcatcgtctactggtccttcccgcggaatgagcgggagatctgcatgtactccagcttccagtaccggggcggccccggcgccggcgctgctggcggcgccgcgggggcttcgccggccgaggaggggccgcagccaccccccggggccgccgctccggccggctccgcccccgggggcgtcgcggctggggcatcccccgggctgggcgcaggggccggcgcggccggctgcggtggcgaggggctcccgttccgccggggcatccgtctgctggacagcggctccgtggagaacgtgctgcaagtcggtatgtgctcgtccaggcgttctcgggtcctcagcctcctcttccgcgggtgcctcttctcggcccgagccctggggccgagaccccggccttctgcccaactcctgtacccctgccgaaggacgaacaagtcacaaaaacttttttcaacctttcactcaggtccaccactgctctttcctccactgaccctctaccccaatttctttttgtttgaagagtgaatagatctctcttcttcactctttctattccccacaccaaggcaaagagaatggggaggtatgactttttggatgtaataatttcagaaatgtgttgtcctaatttaagtttggagaggagaggattgttagtaaatctggaacaagcggttttagagggagcgtttgagggacagactgtcagaggcaatctatagccctagccgattgagtctcgatgaaattaacactgggaaaaaagccccaacaaaatactgcatgtttcagacagttttaattgtctgcgttaggatttttcccctggaccggtgatgcttgggaatctaggctgcggactaacaataaccgaagatggaaatgtgacagcttctcctccacacccccacccaaggaaaaaaaaaaaaaaagccatacaatctggagtgggggtggggtctctcttccttgtcagactggggtaaatcaaaagctggtcacgctgggtttttcaaaagcttctcatttaacaagtcctatttgcttttatctttttgttatggaaaaatatattatacaaatgatttcttcctttactcctccggagcttctagtcagtttgttaatcttattaaatatataaatacagtgcttctgatttgtggaatggttaaggagaaggataaaaaaatgattaacattgactttgctatgtggaaaattaaaacacgaatttttttctatttggattattatggcattctggaagtacatatctttatgcgttttattgtacactatatgctcgtattaattgaagaaaatactgatttttgaaaggagttgaagggaggttgtttttagaattaaacaagcacagaaagacacaaaccccagacatctagctctccaggtaaaacctggagaaaacatttgaaaaatgtttttctttgaatcgtgctgtttcatataaagtaatctgcttctggttattgagaatcattgattcctgtgtttctaaccaaaacaacagcataccacaacttgttttgcaaatgtgaaatgtaaatttatcctgtgccagaatatagtgacagtggcttgagcaagttttgtttatttgaaagaggttagtcctttatttgtgtatatttttgaaagagtgacttgaataaatatgtaattaaggtgtacagctttaatactgaaacactgaaaacatgaaaataaatacaatcattttcctattagtctgtaaattttaatttttctgagtttcgatcatttatttaacttttaagattcttgtttcaaatattttaaatggaaaaggatcaatttaagtggtcattttatagtaagagatggatgaggaagaattttcaaacttgagggaacaaataaaagagaggaagagttttaaagaggtgtctatttttaaagtaactaaagtgtcactttccaaatgaaataggatattttgggtaatctagatcatgtttaaatcagatatttcccctttataatatgaaagttaatgtggttctggagttataggctctcttatggtagtttcagaagacacatataaacaaacatgttttctgattgacttgagaaaagacacatataaacaaacatgttttctgattgactttggatttcaaagacgaagaccggtgaataaatttatcactttaagtttatgctacttgagaaccacgagctgtgtaatttttattattctgaccttaatttaggttaataagtataggagagaaggatagcctgttctgcatctttttgagttctgtattttggtatgaaccacctttaatagagactcatcccccatctcctaaacttaaagttataagtaaatgacttaatctagagagtaggctttctaaaagtattgccaagagatgagtaaggaagtgattcgtatataccaagatagtaatcgtgtttttcagtttataactgcacttcaaactcaattaattactaagtgatgctaattaagaattctacatatttccttactgtttctaaacgatagaacctcagatttgggaagttactgaaggccgatgctttaggaagaacagaaagttggggtatttctgtgacaacatctttttaagaaaaagagtcataagggaatttaatgaaaaagggaatttaaatgaaaaaagaaagcacaaacaaaaaagccttcaaggcaaataaattaaaaacaaacaaaaacttgtggaaagagtaggtagattaaattctgtaatttctaattactttccacacaaaatctggtaatgggaagtcatgaattctggttaaaaattggatacttcagattttaaatcaaaactaaaacttttccagctatgctcaaaggatacatttcttttatgtaagtactgcatcagaagtagtattccttttaaaaggggaaaattgcaaattagtctcttcagggatgtctgtaagtttraagctatgtcaatagacttacagtctgatctcagtattgtaaaggttagagtatgaactctattgaaaacatatgaatgttttcagcatctgcatttttaacttgtttcagaagcccayggatatagtagtagtataaactttgggaaaatacttattcaggagtctgcagatggcataagaataagacacctataatttactaacggttttaacattttgacccttttgctatccactgtattttaaattgatttctttgtatttggtaaaacttaaagaagctttgctttttctcaggaaaatctgaattgattgaaggaaaaaaaattaacagtttttctcacttaaacacagaaatgttatatttacttggatrtttagttttaaaaattggctaaaggcatgcaggggccttctgcgcctggtacatcttagttatgtacgtatttatccagaaattttaagtagattttgacaggtgacttcaacaaaaccccatagttttagtctacacattttttaataagtacatgatttgttcttgaagtcttcaagactagaaccagaatgctaagtattaccttatgtggaagaggtacaattacaaagtcaataatggaaatataaaaagtggcccatttcaggaagttatctataacttaaacatcaagtagtaagtttaaaattgtgtacacttgtatatcatcaataaacaggtctgtgaaatttttctgtagtataacttttatgaaatttatcagtaacaagtattacagtttgttgatttttatatgtaatttgttttaatctatattgtttgggggaacaaaagatatctacattgaaaaaactgtggcatatgtgagttagaatgaataaaattataataaaatttcatgtggagaaaaataactttattgatatttaaggtattccatcacagaaggcagctgcattcctttaagcgggtgtgctttttagcatagaaatttttcaagttttaaatcacattatcttttttttttctgatcaatgagttctctccctccaccctaacacatcacatatgcacacattttaatgttcaataagtgcttgttgaatgactgaacgttaagaatggatttctcagtgttgtaaaacagagagagacctgaattttgagtatgagtggtattggaatatatggggaaaactccagatttgtgcatataataaactgatagcattaagtagtatgagtgttacaacttaggtgtatcttctgtgtttaaccatctattttgtgtgaygaatggtgatttatcaatttcttcaaatgaaagctttaaatgaatttttctaaaggtgactttctcaaggatagagctttggattttaaagatgatggataaactaaagagagtgaattttattttagaggttatctttattttaggaattttaaaaatatattatagaaaaggctggaaatttatgcctatgggagacaattttatttctcttgtttcaataatagcaattaaaaaacaagacattaactgtcagtaatctattatggtgagggttatatgaatatatacatgtgttaaaatgtatggaactatacaccaaaaaagtcaagtttactatatgataccgtagaaaataaaatttttaaaaatcaatgcattgatataatgtacaagagaaacatatatattactgtaaaaatgctgtattagtttcctatggctgctgtaacaaagtatcacaaactggattggcttaaaaccacacaaatgtattgtctcagagttctggaggctagaaatccaaaatcaaggtgttggcagtgctatgctccttctgcaacctacaggggaatcctttgttgcctcttgctagcttctggtggtttgttggctgtctttggcattctttgacttggagctgcaaaattccaatctctgattttgtggtcacgtggcattctccctgtgtgtgtctgttttcacatggccttcttataaggacaccggtcatattggattaggggctcaccctactccagtatgacctcatctcaatcacatacacaacaaccctattcccaaagtcacatcatgagggactgaggttatgttctgaggtattgggggttaggacttcagcatattttttggggggtgacataattcagcccataacagcttctcatacttgtttcttgttgcatatctgagtttcatgtgaattttaaactttattacattaagtatggcttaagttaggaaatcaccacattaattttattaggtaagcattatttagacttgcttgattcaatttgcatgattatttaatcttaatacatgtggaatatttttgacaaataagtggttatttaaaggttaaaattgtcattcttgataaaaaatgatgactgtgtgatatagcactcatggtatacatatatgaatgaatagattactgtgggttttttttcatgcacaccatttataactcagctttagaaatggataaccttgaaagcatatgaacagtgttttaatgtctgtttccaaaccctaaattactatggtttacaattagtgcttgatattagaaatagataataatttattccagataatttttatgtgaatttttttaccttgtggtttatttataggcttatttctttctaacataggcagcatgcttcttggacacttttagcctatcatggagctagtagactaagaaaatcatacttatttaaatattagctgtagtattatgtgattataygctaaattactctgcgatagtttttgtaatcatatatagtcaactgattaatttttggttttcagtgtaattgttctcccccttaggatgtataatgtggtttgtcctaagttggtgctcagtaaatgtttattgaatgaatgagtacattgtcatatcattttttatatttgtgtagtatgacatctctcttaattgatttatatgtaactgaagcctaaaagatgtattggcatttgtggctcaatttctggatgcttctgatttttaaagcattacatagataaaaattatccttgaagcttattattaacttgttcttggttcagtcattgaattaacgtttagtcacttattaygtgtaaggctcagtaaataattgtttacctgtttttggtggaagtctttctgtagtactttgcattttcctatcttagagtacaaagttaggttgggcatcaaagcctaaactaaggactacattacgttgccttccttaggtagggaggaagttataaacagtgaatatttgactctgagagtttctgaagcctgtttttgaaaagttccttggatacatgttttttggtcatttgcctgttccttataatggagtgatgaatgtggtatttaggggagtataacatagttaccttatttaaaagtagactattgaggccaggcgtggtggctcactcccagcactttggtaggccgaggcgggtggatcatgaggtcaggagatcaagaccatcctggccaacatggtgaaaccacgtctctactaaaaatacaaaaatattagccaggtgtggtggcgtatgcctgtagtcccagctactcaggaggttgaggcaggagaattgcttgaagccgggaggcagaggttgcagtgagccaagatcgtgccactgcactccagcctgggcgacagagtgagactccgtctcaaaaagaaaaaaaaaaaaaaaagactattgaagcaaaagctgaagtacccttctgcctagtggttttcttgccttaacagcagttgtttgcatactttgtatactttagtccttagagaaatacaaattaaaattcaaggaaatacctacattacacacacactaaaatggttaaagaaaaaaaaaagactgtaccaaatgctgacaagtatatggagtaactggaactctcatacattgctggtatgtaatgtatggcatgaatgcaaaatggtgcagctacattggaaaacaatgtcctttatagctaatcatatacttaagcaaaagattcagcaatcctactcttaggtatttacctgagataaatgraagtgtataaggggatttcaaaagctcatggaaaaatggaattaaaggataaaaattaaaagtataaactttatttctcaacataaactccatcaagttcaagaacttttgtaagcaatgatacaagccacttagcacatccctaaagaaatgaaggtcctaggaattcaaccatgtcaatgcagtcttctttacattattgactgaagaaaaattggtgccttttgaagatttttttaaagattagggaacaaaaagaagtcagaaggagccaaatcaggactgttaggtggatgcctaatgatttctcatcaaaactcttatagaattgcccttgtttgatgagaggaatgagcaggaacattgttgtggtggagaaaaactctggtaaagctttcctgggcatttttctgctaatgctttggctaactttctgaaaacactcacataataaatcaaatgttatcattctttgtccctccggaaagtcagcaagtaacatgacttgaatatcctaaaaaactgttgccatgacctttgctcttgatcagtctggtcttgctttgattggaccactgccacctcttggtagccattgctttgattgtgctttgtcttcaggatcatactggtaaagtaatgtttcatctcctgtcacaattcttcagtgaaatgcctccggatcttgatcctacttgtttaaaatttccagtgaaagccctgctcttattagctgatctggatgctgtggttttggcacctgtcaagtggaaagtttgttcaactttaatttctcagcagaattgtgtaagctgtacaaattgagatgtctatgatattgtctgttgtttctgctgtaattgtctgtcctcgattagagcacaaacaagatgaatgtttttcctcacaaattgatgtggatggtctgctgctgcaggcttcatgttcagcatcgtgatggatccttttaaaatgagttatccatttgtaaactgctggtttatttggggcattgccccatatacattttataaagcatcagtggtttcaccattctttctcccaagcttcaccataaatttggtatttgttcttgcttcaattttagcagtattcatgtttctctgataggggctcttttcaaactaatgtcttatcctttttagtgccttaaactagatcctatccagatatgttatagcaagttagtatgagtttatcttagtgcaaaacaaagtgaaatccatgtgcagtttttttataatactcattttccacaaacttcacaaactttttgaagaccctcatatgttcacataaagacttgtacttgaatatttatagtagttttattcataatagcccraaactagaaatgacccaaatgcttaccaaatgggggaatggataaggaaattgttgtatatccatacagatggaatactgttcagcaataaaaaagaacaaacttactgataggctagcaacacggatgaatctcaaaagtattatgctaaataaaagaaaccatacccaaaagactatatacaatttcatatgtatgaaattctagaaagcygagatataatgacaaagtagatcagtggtttgatcagtagatcaaagtagaagggaatggagtttgtgaataaaagttctctgaaatggaatttagaggaaagagactattccacagaacagcttgaaaaccaggaagatgcagctgttggtgtaaaacaaaggtgcattccagagaacaagggatttggcttttatactgaaagttcctgtccaggttcccaaacaggtycatgtatgcaaataaaggagtcaaactttcttagttctgattggtcaacacagctgagttctgattggttgatgcaagccacagcctattggttgttttgggcaatgtgaataggaatagtcagctatgaaagtctcaaagttaagcagaggtgtgggttctccaggaactcagagtaagtgtgtaacctctagtcagtaaatggctcttgggctctattttaaatgtaggcccagttaaccactcaggattcatcttgggagattggctcaggtttgtaggtgtgagaaaacttctgggtgatggaaatgttaatgactgtagtggttacatgactatattcttttgtcaaaacttattaaattgtatgcttaaattggcaaattttactgattgtaaattgtacctcaaaaatttgattttaaagaaaagaattgtgggcttcagccgggcgtggtggctcacgtctgtaatcccagcactttgggaggctgaggcggtcagatcacgaggtcaggagctcgagaccatcctagctaacatggtgaaatcccgcctctactaaaaatacaaaaaattagccgggcgtggtggcaggcacctgtagtcccagctactcgggaggctgaggcaggagaatggcataagcccaggaggcggaacttgcagtgagccgatatcgtgccactgcactccagcctgagcaacagagcaagacttccgcctcaaaaaaaaaaaaaaaaaaaaaaaggaattgtgggcttcaatcttggtttcacattaaaatcacctagggagattaaaaaaaaaccaaaaaaacagtacctggcactcaccccaaattaatcacgtcagaatctgctgagaattaggaccaaatttcagaatttttagaaagctcccaggtaattttatatgcagccgaggttgagaaatgccgttgtagaaaaatgatcacctggccaggcttggtggctcacacctgaaatcccagcactttgggaggcaagacaggaggatcacttgagcccaggggtttgagaccagcctgggcagcatattgagacctcatctttaaaaaaaaaaaaaaaaaaaaaaaactagctgggtgtaacggtgctcacctgtagtcccggctacttgggaggctgaggtgggaggattgcttgagcctgggaggttaaggctgcagtgagccatgatggcgtcactgctctccagcgtaggtgacagagcgagacctgtctaaaaaaaaaaaaaagaaaaagaaaaattaacacctttattagtgttatcattgtttctgaacctgttgttggcagtcaaaacattatgtaatctttattctacaaatgctatggaccatgtcaactttcttttctatttattgtttcacctatctttattaatggatgtgaaggaaaatcattctcttaactactcaaagaatgtctctctgtattttggagaggccttattccaaagtaaaaattgtcattgttactatcatcaaaagacatttgtatttaatgtaatgccaagctataattttcttcatgtttgttcacccatttatttatttataaaacctattttttttttaactgggcacagtggcttacgcttgtaatcccagcactttgggatgcttaggtgggaggatcacttgaccccaggagttcaagaacagcctgggcaacatagggagaccctgtccctattaaaaaaaattagccaggcatgttggcacacacttagagtcccagctacttgggggtgctgaggtgggaggaatgcttgagcctgggaggttggggctgcagtgagctgtgatcacaggccattgcactgcagcctgggcaacagagcaagaccctgtctcaaaaacaaaaaaacaaaaactttaaattttttagtatgatctgtgcaaaacagaacataatttctatatttaagaggcacacagtttactatggaatgtacatataaaaatggcgtttaaaaattttctattaaatcagttaagggtctgaatagataaaatggcatttaccacaatgttctgtaataatagaagaagttactatgggggaagagagtaggaagtgattaacttgggaagtggggactacaggatacattgctctattttaatataattccaattataagaaattttagaattatgtctaatattgcaataaagattgaaaacactttactgcttacaagttagattaacctctttttttttttttgagacggagtcttgctctgttgcccaggctggtgtgcagtggtgcaatctcggctcactgcaagctccgcctcctgggttcacaccattctcctgcctcagcctcccgagtagctgggactacagatgcccgccaccacgcctggctgattttttgtatttttagtagaaacagggtttcactgtgttagccaggatggtctcgatctcctgacctcgtgatccgcccacctcggcctcccaaagtgctgggattacaggtgtgagccaccgcgcctggccagattaagctttaataaaattctttctgtattaacattttttatgccccgtaatactttggtgcatagttgatccaaaggggtaatattagtaggaaggaagatgacaagatgttaccaaatattaatccttttttctgagagtaaactttacagatttctggctttaaaatagctttttgttatcttcagataatccttaccttttttgttaaaaaaaattgttgcttcttttaggtataaacatacaatggaactaatcaggaaaatagctttttgtgcttccattatcttttggtctgtgagcaacaggaaaatctattgtgtctttgaaagccttggagataattacatttttccccctattcattcatggttttattgaatagaggcctgtagcactgatagattctggaaaagccagcttgttcttattttgtttaaatctgtcaatacctgctaactgatatgagtagccaacatcaccaacatacattgatgttattagtaatataaaatccttccccacattatggctccctattgtgaaaaactcttatttttgtctcactgaatattatattattgtagtctttaccatcacatgtatttggatttatctaccatatgtgcatgtatgtrtatatatatatatatacacatatgcacacatatgtacacatacgtactatcacaaatatgtaattctggctccttcaaagtctcagttttttcaactgtaaaagggcaaaatgatggtacctacttcataggttgttttgagaattaaattagttaatatgtaaagcacttagaatgaggctgaacacatattaagtgctatgtaaatattcactattattattacagcttttaccaaaattgagagtattctgtatttatcttccctccctcaaccttcactccaccttctaaaggttttgtagtctgacttatgctttcattcactaaattaaaattgatctcttaaaggtcgctagtgacctcatgattgccaaacacagtatcttttttctagtcctcattcttcatgacctctgtatagaattttctgtagtctactatacatttctcttgaaatgcttcttcctagatttttgttttacttcaccattctggctttctttctgttttcttttattctcttaccccacaatagtaggatgcgccttcttatatcaagtcttctaatttacaatctaatttatttctacagtttcaactacaattttatgaacataagatagcatgatatgatgtagtggtttaaaatttgtttaaagcaactgtactctaactttcaaaggaaatcttatgctggaattccagcttttgcagcagataaaatctgagctgtgttggggattggggtggagaccagaacttaatcagtatggccagctacttcttccctttgaaactctgaagcacttccaaataatccaaagatcagcatatatatttgcctgccagatatttctaagtggatatcttaatagccactcaaaaccgaactgcttgataaggggattaatatccagaatatattaaagaactacaactcagccacaagaaaaaacctaattcaaaaatgggaaaggacttgaataaacatttctccagagacaatgtacagatgaccaataagcacaagaaaagatgctcaacagcactaattattagagtaatgaaaatcaaaaccacaatgaaatactacttcacacccattaggatggttattatttttttaaaaagccagaaaataacaaatgttggcaaggatgtggagaagttggaaccatttggaaatataaaatggtgtagcttttgtagaaaacagtatggcagttcctaaaaaaattaaacacagaataaccatatgaaccagaaattctgcttctggttgtataaccaaaataattgaaagcagggaattgaatagatatttatacaaccatgttttatagcagcattattcacaataggcagaagatggaaacaacccaagtgtccatcgacagatgaatggataaacaaaaggtctattttccttccttccttccttcctttctctgtctttctatctacaggaaatgttatttagccctgaaaaggaaggaaatcctaatacatgctacaacatggatgaatgttaaagattatgctaagtgaataagccagacaccaaaggacaaacattatatgattccacttacatgcagtatttaggtaggcaaattcatagagatagaagtagaatagaggttgtcaggggctgaggggagagagaaatgaagagttactgttctgttgaactagaattttagtatgggaggatgaaaaattctggagataggtaggagtgatggttgtacaaccaagtgaatgtgcttaataccactgaactgtccacttaaaaatgataaatcttagtatattttaccacaataaaaaagttaaaagccacatatattattttatttatacaaaatgtccagaataggcaaatcctagagacagaaagtaggttagtggtttctagggcctgtgagtaaggggagtgattactaatgggtatgggatttccttctggggtgaaaatgttccaaaattagatagtggcaatggttgcacaaatctttgaatacactaaataaccaaattgtgtacttttcaaagttgtgtacctctcaagggtgagctctattatgtatgaattatataataaagctatcattagaaaagcaaatattccaataaaacaaaaaggaaaggaaaaccttcaaacattatgtttcgtagagaatgagctctaaattcctaagtgccgtgtttggagacctgggcccaaatcccagttctgccactttctagctgtgtaaccttggacaagttacttaacctctctgagcctcaattctctgtgtactttcaggacacttataaaggagtgaggaaagcacaattaggagggcagagaagtcgaattgatgcaatcacaacggagacttcagtcaatcctatggggagctctgcagctgggatggcacttgagaattatctggaaatagatgtgggctggctgacctgagggagaagaggcataaccctgggtggggtatttttctttatgtggtagagatgaaggtgaactacactgtttctcttcagggaactacttgctgcccagctgccggaagtgctttcatcagacagcttccaactgtcagctgattcacgggctgtctcagcagcagagatctgcttcatctgaggtcatacttttctaagggcagcctgcaaatgactgagcaaggtaggagcgtaaagmtccagctatttcggccgggcgcggtggctcacgcctgtaatcccagcactttgggaggccgaggcgggcggatcacgaggtcaggataaggagcgggcggatcacgaggtctctactaaaaatacaaaaaattagccgggcscggtggcgggcgtctgtagtcccagctactcgggaggctgaggcaggagaatggcgtgaacctgggaggcgcagcttscagtgagaggagatagcgccactgcactccggcctgggcgaaagagcgagactccgtctcaaaaaaaaaaaaaaaaaaaaaaaaaaaaaaaaaaaaaattccagctatttcagtcgaacatggaactctccgacaggcaatacctgctccagagagccaaatctggttggctgagcttttatcaggcctgcattgcagtttgatttcttcctcttcccagtcctgcttctgttgccgttctttcacagatgttgatccctagtaagtgtgttgcatttctcattctatcttggtgtttcctttcagagaactcaatctgtgatactttggttgagggcagctcatggaggaggacatagctgtaacctctcagcagccaactctcctggcagttagaggaataaatgccttggtcctgacggaaggatccgagcgctacatttcctctgactcttggattcatttcgtagagtaaattcaccctataagggaaccgctcctccaggattgtttggtctctttttttggggatgcttacaagagtaaaattaggaggcaaatcacaacttctgtcactgaaagtagtccccagaacacagctgatcttgtcccgctcctctaatctccattatggattcttagccagaatctctggtggtctaagtggtttacctgggaatgggtggtgactgtttttttttgagacagggtctggctctgtcacccaggctggaatacagtggtatgatctcagctcactgcaatctccagcttcctggcccaggtgatcctcctacttcagcctcccgagtagctgggactataggcacgcaccactatgcctggctaatttggctaatttttatattttttctgtggagacagggtttttccatgttgcccaagctggtcttgaactcctgagttcaagcagtctgcctgcttcagcctcccatagtgctgggattacaggtgtgagccactgtacccagcaactgttttacagaaaagcctgagcctagttactgtgacgtttctcaggccttgcccactgcgtttgttcatttactgtcaacattgggctgggaagtatcaagagatgccccagtggtaaattagatgctaaatgtcctctactccctgatgttactttactttgtgttgataaatctgctttattttgtaaacaccatctgttgctgagatagcacataatgtgacattaaaatcaggtaattatgtaggttgtttttgttttgttttgttttttgagacgaaatccagctctgtcacccaggctggaatgcagcgacaagatcatggcttactgcagcccctaccttctaggctcaggtaattccctcacctcagcctcccgagtggctgggactgcaggtgcaygccgccatgcctggctaactttttgtgttttttgtagagataaggttttgccatgttgccccactggtcctgaactcctgggctcaagtgatccacctacctcggcctcccaaagtgctgggattgcaggtgtgagtcaccagcctggcctattatgtaggttttaaagatcaaatatagtattgttgaatatgctttattaatggttctttgatatattattaaagtactaattgcaaaagttttcagattattactttgtgtgttgtcccttgcaaatattattattattattattattattttctttgagacagagtctctgtctgttgaccaggctagagtgcagtggcatgatctcagctcaatgcagcctctgcctcccgggttgaagtgattctcctgcctcagcctcccaagtagctgggattgtaggtgtgcactaccatccctggctaatttttgtattattagtagagacagagtttttccatgttggtcaggctggtcttgaactcctgacctcaggtgatctgcccacctcaacctctcaaaatttctgggattacaggcgtgagccaccgtgcccggtcccttgcaaatattactaatatagcatcaaggtaattagcaacaaaagaagtcactcaaccagaatgttatccagtatgttagtgtagttttatttagaactttatttagtagtgaatggtttttcagtacctattcccttttatctattcccttggagattasaattgaaaaggagttggattttaactttcctcagttatatatctgtgtgataaatatgctgtctagcacaccatcaaaacaggttagccttgctagggtttttgtttgttttgtttttattagggaggctatcttctctctgttttgacgtctaggctgcctaatgaggccttgaaaaccagtctccagcagtgtccctgaagactttgtagtctggaatgaggggaccttacagcaggttttccccacctaatatctttagtgagatatacttcatgtactgtataactcatccatttaaagtgtacaattcagtggcttttactatattcacaggtaggggctgccttcaccacagtcaattttagaagattttcctcacctcagaagaaccttgcatcctttagctgtcactccccaatccaatcccatatagtcctaagcaattaccagtctactttctgtctctatggatttgcttattctagccattttatataaattgagtaagaatatgtagtcttttgtgactggcttctttcacttagcataatgttttaaaggtccataaatgtgtaacatatatctgtactttattcctttttaatggtgaataatattacattgtatggatataccacattttgtttatccattaattggttgttgcatgtttgggttgttttccttttggttattgtgaataatgctgctgtgaatatttgcatacaagcttttgtgtggatacgtgttttcatttctcttgggtatacatctaagagtagaattgttggatcatgcagtaactatgtataacattttgaggaactgccaaactattttccaaagtgcatcattttataattctactatcaatgtatgagtgttctgatttctccacatctttgccaatacttgttattatctatcttatttattatttccatcctggtggaggcccggaagtagtatctcattgtggttggtttggatttgcatttctctggtgactaatgatgttgagatcttttcatgtgtgtattggtcatttgtataacttctttggaaaaaaatgtttattcagatcctttgcccatttttaaattggatttttttattcttaagttgtgacagttccttattcattctagatactagtccgttatcagatatgtgatttgcaaatatattttcccattttgtgaggtgtcttaactctcttgatagtgtcctttgaagcacaaaagtgttaaattttgatgaagtacaatttattttttttctcggttgcttttttctttctttctttcttttgatagtatagctaagaaaccattgcctaacccaagatcaagaagatttactaccatgttttcttctaagtgttttctagttttagctcttatattttgttttatgtttcattttgagttgacttttgtgatgtcagaaggggcttcaacttttttttaatatggatatccattttttccagcattatttggtgaaatgactagtctttctccattgaatgatcttgacatgctgttgaaagccagttaaccataaatgagtttatttcaggactctcaattctattccattgatctttatgtctatccttatgttagtatcacattgtctttattactcttgctctagtaagttttgaaattgcaaagtgtgagtcctccaactttattcttctttttcaagattgttttggctattctcattcccttgagtttccctatgaattttagtatcagtttattttttgcaaaaaaaaatctagttgggattttgaaagcgattgtatcgaatccgtagatcagtttggaagttttggcatctctattagtgttctataaggaaactactactgtaacaaattaccatgaacttagtggtttaaaacaacacatatttaatattttacaggtctgggggttttctgggctaaaatcaagttattgagggcaggtatgatggctcacatctgtaatcccaacactttgggaggactagggcaggtagatcacttgaagccaggagttcgagaccagcctggccaacatggcaaaacccggtcttgactaaaaatacaaaaatttagccaggcatggtggtgcacgcctgtaatcccagctacttggtggcagaagcacccgggaggcagaggttgcagtgagccgagatcatgccactgcactctagcctcggtgacagagcgagacactgtctcaaaaaataaataaataaataaataaataaaaccaagttgttggcagagctgtattccatctagaggcttttcttggaaagaatctctttccatgtctttttccaatttctagaagctatctgcattctgtggctcacagcctcttccttttttataccgtatcatttttttttttcctgaggttcaagggattttattattattttttctttttttattattattatactttaagttttagggtacatgtgcacaatgtgcaggttagttacatatgtatacatgtgccatgctggtgtgctgcacccattaactcgtcatttagcattaggtatatctcctaatgctctccctcccccctycccccactgcacaacagtccccagagtgtgatgttccccttcctgtgtccatgtgttctcattgttcaattcccatctatgagtgagaacatgcggtgtttggttttttgtccttgtgatagtttactgagaatgatgatttccaatttcatccatgtccctacaaaggacatgaactcatcattttttatggctgcatagtattccatggtgtatatgtgccacattttcttaatccagtctatcattgttggacatttgggttggttccaagtgtttgctattgtgaataatgccgcaataaacatacgtgtgcatgtgtctttatagcagcatgatttacaatcctttgggtatatacccagtaatgggatggctgggtcaaatggtattkmtagttctagatccctgaggaattgccgcactgtcttccacaatggttgaactagtttacagtcccaccaacagtgtaaaagtgttcctatttctccacatcctctccagcacccgttgtttcctgacttctaatgatcaccattctaactggtgtgagatggtatctcattgtggttttgatttgcatttctctgatggccagtgatgatgagcattttttcatgtgttttttggctgcataaatgtcttcttttgagaagtgtctgttcatatcctttgcccactttttgatggggttgtttgttttttttcttgtaaatttgtttgagttctttgtagattctggatattagccctttgtcagatgagtaggttgcaaaaattttctcccattctgtaggttgcctgttcactctgatcgtagtttcttttgctgtgcagaagctctttmgtttaattagatcccatttgtcaattttggcttttgttgccattgcttttggtgttttagacatgaagtccttgcccatgcctatgtcctgaatggtaatgcctaggttttcttctagggtttttatggttttaggtctaayrtttaagtctttaatccatcttgaattaatttttgtataaggtgtaaggaagggatccagtttcagctttctacatatggctagccagttttcccagcatcgtttattaaatagggaatcctttccccattgcttgtttttctcaggtttgtcaaagatcagatagttgtagatatgcggcgttatttctgaggcctctgttctgttccattgatctatatctctgttttggtaccagtaccattctgttttggttactgtagccttgtagtatagtttgaagtcaggtagcatgatgcctccagctttgttcttttggcttaggattgacttggcaatgagggctcttttttggttccatatgaactttaaagtagttttttccaattctgtgaagaaagtcattggtagcttgatggggatggcattgaatctataaattaccttgggcagtatggccattttcaygatattgattcttcctacccatgagcatggaatgttcttccatttgtttgtatcctcttttatttcattgagcagtggttggtagttctccttgaagaagtccttcacatcccttgtaagttggatwcctargtattttattctctttgaagcaattgtgaatgggagttcactcatgatttggctctctgtttgtctgttattggtgtgtaagaatgcttgtgatttttgtacattgattttgtatcctgagactttgctggagttgcttatcagcttaaggagattttgggctgagacaatggggtttcctagatatacaatcatgacatctgcaaacagggacaatttgacttcctcttttcctagttgaataccctttatttccttctcctgcctaattgccctggccagaacttccagcactgtgttgaataggagtggtgagagagggcatccctgtcttgtgccagttttcaaagggaatgcttccagtttttgcccattcagtatgatattggctgtgggtttgtcatagatagctcttattattttgagatacatcccatcaatacctaatttattgagagtttttagcatgaagggttgttgaattttgtcaaaggccttttctgcatctgttgagataatcatgtggtttttatctttggttctgtttatatgctggattacatttattgatttgtgtatattgaaccagccttgcatcccagggatgaagcccacttgatcatggtggataagctttttgatgtgctgctggattcggtttgccagtattttattgaggatttttgcatcaatgttcatcaaggatattggtctaaaatttcttttttggttgtgtctctgcccggctttggtatcaggatgatgctggcctcataaaatgagttagggaggattccctctttttctattgattggaatagtttcagaaggaatggtaccagtttatccttgtacctctggtagaattcagctgtgaatccatctggtcctggactctttttggttggyaagctattgattattgccacaatttcagctcctgttattggtctattcagagattcaacttcttcctggtttagtcttgggagagtatatgtttccaggaatttatccatttcttctagattttctagtttatttgcatagaggtgtttgtagtattctctgatggtaggttgtatttctgtgggatcggtgatgatatcccctttatcattttttattgtgcctatttgattcttctctctttttttctttattagtcttgctagcggtgtatcaattttgttgatcctttcaaaaaaccagctcctggattcattaattttttgaagggtttttttggtctctatttccttcaggtctgctctgattttagttatttcttgccttctgctagtttttgaatgtgtttgctcttgcttttctagttcttttaattgtgatgttagggtgtcaattttggatctttcctgctttctcttgtgggcatttagtgctataaatttccctctacacactgctttgaatgtgtcccagagattctggtatgttgtgtctttgttctcgttggtttcaaagaacatctttatttctgccttcatttcgttatgtacccagtagtcattcaggagcaggttgttcagtttccatgtagttgagcggacttgagtgagtttcttaatcctgagttctagtttgattgcactgtggtctgagagacagtttgttataatttctgttcttttacatttgctgaggagagctttacttccaactatgtggtcaattttggaataggtgtggtgtggtgctgaaaaaaatgtatattctgttgatttggggtggagagttctgtagatgtctattaggtctgcttggtgcagagctgagttcaattcctgggtatccttgttaactttctgtcttgttgatctgtctaatgttgacagtggggtgttaaagtctcccttattattgtgtgggagtctaagtctctttgtaggtcactcaggacttgctttatgaatctgggtgctcctgtattgggtgcatatatatttaggatagttagctcttcttgttgaattgatccctttaccattatgtaatggacttctttgtctcttttgatctttgttggtttaaagtctgttttatccgagactaggattgcaacccctgcctttttttgttttccatttgcttggcagatcttcctccatccttttattttgagcctatgtgtgtctctgcacgtgagatgggtttcctgaatacagcacactgatgggtcttgactctttatccaatttgccagtctgtgtctttttgtttgtttgtttkttttttttttttttttttgagacggagtctcgttctgtcgcccaggcgggagtgctgtggcgcgatctccgctcactgcaagctccgccttctgggttcacgccattctcctgcctcagcctcccgagtagctgggactacaggcgccmgccactgcgcccggctaattttttgtatttttagtagagacggggtttcaccgtggtctcgatctcctgacctcgtgatccgcccgcctcggcctcccaaagtgctgggattacaggcgtgagccaccgcgcccggcccagtctgtgtcttttaattggagcatttagtccatttacatttaaagttaatattgttatgtgtgaatttgatcctgtcattatgatgttagctggttattttgctcattagttgatgcagcttcttcctagtctcgatggtctttacattttggcatgtttttgcagcggctggtaccagttgtgcctttccatgtttagtgcttccttcaggagctcttgtagggcaggcctggtggtgacaaaatctctcagcatttgcttgtctgtaaagtattttatttgtccttcacttatgaagcttagtttggctggatgtgaaattctgggttgaaaattcttttctttaagaatgttgaatattggcccccactctcttctggcttgtagagtttctgcagagaaatcagctgttagtctgatgggcttccctttgtgggtaacctgacctttctctctggctgccctcaacattttttccttcatttcaactttggtgaatctgacaattatgtgtcttggagttgctcttctcgaggagtatctttgtggcgttctctgtatttccagaatctgaatgttggcctgccttgctagaytggggaagttctggataatatcctgcacagtgttttccaacttggttccattctccctgtccctttcaggtataccaatcagatgcagatttggtcttttcacatagtcccatatttcttggaggctttgtttgtttctttttattcttttttctctaaacttcccttctcgcttcatttcattcatttcatcttccatcactgataccctttcttccagttgatcgcatcggctcctgaggcttctgcattcttcacgtagttcttgagccttgsstttcagctccatcagctcctttaagcacttctctgtattggttattctagttattcattcgtctaaatttttttcaaggttttcaacttctttgcctttggtttgaatttcctcctttagctcggagtagtttgatcatctgaagccttcttttctcaactcgtcaaagtcattctccgtccagctttgttctgttgctggtgaggagctgtgttcctttggaggaggagaggcgctctgctttttagagtttccagtttttctgctctgtttttcccccatctttgtggttttatgtacttttggtctttgatgatggtgatgtacagatgggtttttggtgtggatgtcctttctgtttgttagttttccttctaacagacaggaccctcagctgcaggtctgttggagtttgctagaggtccactccagaccctgtttgcctgggtatcagcagcggtgtctgcagaaccgcagattttcgtgatccgtgaatgctgctgtctgatcgttcctctggaagctttgtctcaggggagtacccagccrtgtgaggtgtcagtctgcccctactggggggtgcctcccagttaggctgctcgggggtcagggrtcagggacccacttgaggaggcagtctgcccgttctcagatctccagctgcgtgctgggagaaccactgctctccttaaagctgtcagacagggacatttaagtctgcagaggttactgctgtctttttgtttgtctgtgccctgcccccagaggtggagcctacagaggcaggcaggcctccttgagctgtggtgggctccacccagttggagcttcccggctgctttgtttacctaagcaagcctgggcaatggcaggcgcccctcccccagcctcgctgctgccttgcagtttgatctcagactgctgtgctagcaatcagtgagactccgtgggtaggaccctccgagccaggtgcrggatataatctcctggtgtgccgtttcctaagcccgtcggaaaagcgcagtattcrggtgggagtggcccgattttccaggtgccgtctgtcacccctgtccttgaccaggaaagggaactccctgatcccttgggcttyccgagtgagtcagtgcctcgccctgcttcggctggcgcacagtgcgctgcacccactgtcctgtgcccactatctggcactccctagtgagatgaacccggtacctcagatggaaatgcagaaatcacccgtcttctgtgtcgctcacactgggagctgtagaccagagctgttcctattcggccatcttggctcctccctataccatatcattttaacctctgcttccattgtcacatttcctgtctctgactttaagcctcttgcctccctcttataaggactatgtgattacattgaacccactcagataatccaggataattgctacatctgaagaatcttaatcacatctgtaaagtcccttttgtcaggttctggatgttagggtgtggacatatttggtgaggggcattattctgtttaccatgccatcataacaacatctcatcttctgatccatgaacatgggatgtctccccatttattggatcttaatttctttcaacaatgttttgttgaagttttatcttttttcaacttttattttagaattgggggggcacatgtgcaggtttgctacaaaggaatatttcacggtgctgaagtttggagtacgtacgaatgaatctgttacccaggtagtgagcatagtacccaataggtattttttttcaaccctaaccctctcccttccctatgttgtattcatcagtgtctgttgttcccatttttacaaccacatatrcccagtgtttagcaccttcttgtaagtgagaacatttagtctttgaatttctgtttctgcattaattaacatagcataatggtttccaggtgcatccatgtttttgtgaagtacatggctgtgtagtattccatggtgtatatgtaccatgggatgtacctcattttctttattcaacccactgttggtgggcacctgagctgattctatgtttttgctaatttgaatagtgctgtaatgaatatacaggtacacgtatgtgtctttttggtagaatgacttattttccttggttggatttactcctaagatatttttttctttttcatgctatcataaatggaattgtttcctttatttcattttttaattgtttgttgctagtgtatatagatagaaatataactgatttttgtatgttgatcttgtacccctaaccttgtggaattcattcatttatttatttattttaattttaaatagtatcttattgaatgttttattcacagaaaaataagctttaatctacaatgaatgccagattatacagcagagagcagttttcttagttttccacactgatagaaaggttcttactaagtgaaaaaagccataaaattatattcaccaatagagtactctgtctcaaaacattccacatgattgttcacaatactaatacaattaaatcagtcatttaygttaaagtataacagtgataaaaaatgcaaaatctaatataaattacattaaaacttttgttatatcaaatcagaaatgcaaatttcttactaaatacagaaaaatggtcaaatatatagtaatttaagatattacattaatgatacagaataggaaagtggtaaactccaaaaatctataggcatatctgcaaacttcagacttcaaagtagaatctgaccacccaaacattaatgtagcatttgtctaatttttgttttgttttgtttctgagacggagtctcactctatcacccagggtggagtgtggtggcgccatcctggcccactgcatcctccacctcccaggttcaagcgactctccagcctcagtcggtcgagtaggtggtaccacaggcatgcgccaccacacccagctatcccttcatttctgcaaagacagggtttcagcctgttggccaggctggtctccaactgctgacctcaggtgatccgcttgcctcagcctccgaaagtgctgggattacaggtgtgagccactgtgcccggcgccatttgtctaatttgaagatacagttgtcccttgctatccgtggggttttggtttcacaaccccctaggacctgaggatgcttaagtcccttagataaaatcacataaggccgggtgtagtggttcacgcctgtaatcccagcactttgtgaggccaaggcaggcagatcacctgagatcaggagtttgagaccagcctggccaacacccttgtggaatgaatttattactcaaatagagataaacttttatcttcctttccaatctggaatccttggtccttatcaagtcacaaaactcagtgttgtttgtgccatagaatgcattgtattaagggatttttctgcttgcattagactgggaaatgctttttaatgtgctattgtgttattaaagaatatgatcccagggaagcaagagtgagagaaaatgaaatgagacagggaaggagggtaaggcaacataaggatgtgtcatagagctggttactgcttggtatcaagtagcaactgattgctcaatctccccgaattgtcttataaagcagcagagagaatccccttttatgcccatctttcatttcatgagattcagacctgggaaatattttgctattaaaggtatattttgcatacccctctgtaactttcaccattattgatttcacagtttgggttgtaggaattgtagaaattgctctattgctgttaccactctgtataacctgcaaacttaagtaccttaaattccctgtgtatatggtgtaggtttttcagttccaatgtggaaaagggggttggccatagttcatagccttgttagagtctataacaactcttaatgattggaagtgtaaaataaataagaacaagcattcagtacatttaagaaatttttttctttttcagtgtcatattcttttcttctttcctattattttctttagtgtttattccttattttctgcatacgttttagaaacataatcactgtatagcaaaatagctaattatgaggtgtcatacaatgatactgctcttctcttccctcctctctctagttcctgaatccttaatcattcccttttcttctgacttcccttcctgaaaactttagtccaaacctgggagaagcaagagaaaaggaagtgagatgggaagaagggatagtagcagtggcctgaaagggtatattggagcccaactggagcagtggcctagcatggggtgctagagccaaagtggggtgaggagggtatccacatgaagggggatataatttgagatgtcagagtctgaaagggttgaggatgacttttgtataggggtgaaggggagtgtagagccatagggtgttagtgttcagatggggtgaagtgggcatagcagggggtggcagcagtaggtgcaggttttttgagcttgagcacagtgagaagaatgtccttattggcagggaggagctgtggtggcaatgaaagattggttatttatagatattgatcaactaagtaaatcaattaaggataacaggagccaaatttctcactatcagaaaaagtagctaaaatgtagaccaggccgggcgcggtggctcatgcctgtaatcccaacactttgggaggccaaggcgggtggatcacctgaggtcatgagttcaagaccagcctggccaacatgacgaaaccccgtctctactaaaaaatagaaaaattagctcggtgtggtggcatgcacctgtagtctcagctactcaggagactgaggcaggagaatcgcttgaacccaggaggtgggggtggcagtgagccaagattgtgccatagcactccagcctgggcaacaagcaagactccgtctgaaaaataaaataagataagaaaagataaagaccagggagaaaaggtgaatgaactctgggttttggattgtaattggagatacccacgtgaactcatggtttttagtatatattggaatatatatataatatatawtatatatatatatggcattcagttaactgagagggccttagagcagtaatatcccaatagcaataagcacacctaatgcccatatcttggtttccaagtacttttctccgataaaaggaacaaagcctccttggagaaatggctgaatttaggggtgaggcagagaaagtatcaaatgagccttgaacatgttcttgtgccagaaagcagggaggttcttaaagaattatagcaacacatcaaaaaggatacaaaagccagctttgaagagattcccattagccaaatatgggatgaattgagtgtcaaaataatgataataatggatataaccaacccattgaatgaaatagaaacccatgagktcattgtgtcaatggttttttttttttaaaggccaggtgccatggttcatgcctataatcccagcacttcgggaggctgaggagggaagatcacatgagcccaggagtttgagaccagcctgggcaacatggcaaaacaccgtctctacaaaaattttaaaaaattagccgggcatggtggtgcatgcctgtggtctcagctactttaggaggctgaggtgggaggatcgcttgggcccagaaggttaaggctgcagtgagctgggattgctccactgcactgcagcttgggcgacagaatgaaaccctgtctccaaaataaaatatttttagaaagagtaagttgaaaatttgatgagtatattggcataatgtcaatatggttcccatgagatactttaattataaggggaaaaaggtaactttaaagtgaggaatccaggcaaacactactgtgatcaaatgagcaaagttaacctcaccagtgatgggagaaatcaaaattgtgtgccatttgataggaaacaataagaacatggctccacttctatgatattactgccaaagatagataacctgaatctaatcatgatgaaataacaggcactactgagggacattcttcaaaatagctagcctgaagtcttcgtaagtatcagaagtcagaaagttaagactacaggtggttccagattgaaggagaataaggagacataaaaactaaatgcattgtatgactttggactggatccttatggggacatttttggggcaattggcaacagttgaatggggcctgtgcattatatgataatgttatggtattgatttctgattttcatgatttttatagttctgtaggagaatatctttgaaggaaatacacaaaaaaagtattctggggtgataaggcagtacgttgacaacttactctccaataactcatttaaaaattatttgaactgtacttgcaacttttctgtaagkttgagattgtttcaaaataaaaagggataaatatgataatctttttcttttttttgagacagaatcttgctctgtggcccaggctgtagtgcagtggcgcgatctcagctcactgcaaactccaccttgcaggttcaagcaattctcctgtcccagctccccgagtaggagagtattttgtattgggtgtgtcatgcccagctaattttttttttttttttttttagtagagttggggtttcaccatgttggccaggcaggtctcaaactcctggcctaaagtgatccgcccacctcggcttcccaaagtcctgggattacaggtgtgagccacctcactgagctgataatsaacttgaatgaactttgattaatagtgagtactcctccaattacctatttattttgaattgtttaagagaatatgtttttcttagcttacattaaaaatctccaattatttttattaaaagatcacttttgaatgttttagttttatttcatattttgttttgtttttttgagacaaggtctcgctttctcacccaggctggaatgcagtggcctgatcttggctcactgcaacctctgtctccgggttcaagcaattctcctgcctcagcctcctgagtagctgggaatacaggtgtatgacaccatacttggctaatttttatattttttgtagaaatggggtttyaccttgttggccaggctggtctcaaaytcctgacctcaagtgatccacccaccttggcctcccaaagtgctggcattacagtcgtgagccactgcacccagccttcatgttcattttaaaggttaaattataatcagtacaaacatacgtaactcatctaatttcattttaaatgatatttggttcctactcagattataagctaaagttttttaagcaattatgtctttattggttatataaatttacagtcttttaaagctgtgtaaatattgccacttaatatagtttcactttttatttgcataacaataataacaatattaaaagctaacacaaagtgctgggcgctttgccaaatatttaacatgttataatttatgtaatccatataatattcttttgaggtatgtactattattatcccaattttacatatgaggaaatgaggccctgataagaaactagtccaaatttatatagttatgtggggcagctggggttagagcccggctcctgtgttcaaaatcttaatcactgttcagttatgcacagtgaaaaatgcatggataacttaagtcctatagagattgaaaagaatgaaaaaaactcagttaaatttaggaattatatactgaaattgtttccttttctgtctataagaaaattcagacataggttttgtatttggtgtgtgacactaatatttattgccttagtaacatccattcttgccttttatgtaatatcacacttttaatgtacagacttaaagagaaattatttagttggtgctgtaccagagcagtagctccgttattgagactaatatattcagttcatatgttgtggacctattatgtattcatgcaaaagtaacgtttcctctagtagtaccaaattgtttaaattggtgatgattataatttttgagacaaggtcttgctatgtcacccaggctggagtacagtggtatgatcatagtgtactgcagccttgaactcttgggcttaagcaatcctcctgcctcagcctcccaagaagttgggaccacaggcacrcaccaccatgcccggctaattttttttattttttgtagagactgggtctcactgtgtttcccaggctggtctcgaattcctggtcttaagcaatcttcccaccttggcttccgaaagcattgggattataggcatgagcacaatgcctagcagcagtaagttttaacaaaggaagaaaagaggcacaacattctgaagagtgattttaagaatgatttgcrtaataattataaactaaatatatgattcctttgtttaactgctctaaactgtgatcctgtaggtccagataagactacaaggacatgctgtgggagaaaaagatatatagcaatctttgtagttycttttgggggaggatatttttccccaaagagttcagctgcaagaggtagtgtatctgaggcacctattaaaatataaagctctgtattgttgatgttattgtcttgtctaaggtcttatgtagcttgtttgctgcagaactaccaattacaacagccattcattatcatgttgcaaaataaaacagttcaaaaatataaattagcactttttcagcttttttacgtagtaaaatatttttaaaaatattttgttcttttcagttcacttcactaagaatatatctgcactgctaatttggttctgcgttcttcagttattataatattgcctttaaccaatatatttgctgtttattaccaattgaagttgatattttatcttccyttttggacaagttaactttttgagagacgagtacaactattaatatttgctcagcaaatacggtcaaaacaaagtatagggaagccgccaaccagaatcatgtttgtttagtttcgcaacygtgagtcacattttggttctaacactaaatggattatctttcctttttttttgaacattacatctgagttcacacctctgagcattcttacaatattattagattttcctctgcattttggacggtgaatttgagaagattttagaaaaaaatttgggactgaaaaattcatataatgaacttatgattctttaaagcagagactgaataaatatgaagtataacttgaatagtctcattcaaatctcaaattttgttacactttttatgttatagaaacaattgtagttccaaataattatctaaaaattttgctaaaataacttctggttagttggttaaatttaaataacttgtgttaagttggttaaatttctgttaaagtgtattcgttgagttattcattattagtaaaaattggttatggtgatgtaatgttctctacagtattccctcagaattttttgatagtattggttaatgttcactcttacaaagcccctttgatagtgctttatttctttataattatacctttgcacttttgtggttctgatgaggttatggaattataatagtatgatgtcctatcttatgaaaataggctgaactatagctgaaagaagtatgataacagagctgtagcaagaatctttcacatgattttgataggctgtaaaactgttagtagactttcgtttcagagacaatgtctattttagattaatctttgtcagttacctaccactgtaggtaattcaaattcaattgattttctgaccttgtaacaaagaaataccatacactagttttttcaatataaaattaattttttgagtcttagctactgtggtatagtgctagaactttttgaaaagacaacagaggaatgtatttggcgtttgtattacttttttgaaataagcttgattttagagaattgaaaatgtacctggaggaayatatgctattctggaaaccaacaaagagtagttattccagtggtagaatttttcagtaactgatcaggcagttaattatttgaataaatcctcatgttgaattttcttagttctgcactgttaaatgtagtttttccaaaagttgcatcttctaaagtagatgtgaaaatgtatgatttatttttgaaaagatttctgcattgtgaaataaatgtaattactatttattacatttttactattactatttattacaataattatgtgtaaattcagtgctgtgccaaatattggtaatattctagtcatttttaakttaataaaaagtcatttcagccaagtgtggtgcctcattcctattttcccagccctttgggaggctgaggcaggaggatcacttgaggccaagagtttgagactagcctggcagcctgggcaacaaagcaagaccccatctcaacagaaaccaataatttttaaattaaccttgtgtggtggcatgcacctgtgcacctgtaatcccagcactttggaaggccaaggcaagaggatcgcttgaggcaaggagttcaaagccagcctagtcaacatagcgagactctgtctctacaaaaggaaagtaaaaaaattagccaggcatggtggtacgtgcctgtaatcccagctatttgggaggctgaggcaggaggatcacttgaacccaaaagttcaaagttgcagtgagtcatgatcctgccaccgcactccacctggggtgacagagcaagaccctgtctcaaaaaaaaaaaaaaaagtgattttatagcctttgtttgtataacatttcctcctaaaattaaaactgtcttctgatttatgtagttacctcttcttagggctttaatatttactttgccagtgtgactcagtatgtttttgagtaaagtgggagggaatatctcattactgttgaggattcaaaataattgtttcttaaatagctttattgtttttcaaaaattacatacttatttataaatcaaacaatatataaaaattcagagaaaaaaggtaaaagtccaccttgacattattctagctttcagatggytttttcggaatgtaggtacagcagtgtatccatacaatgttatataaataggctataataaggcattattctgcaacttttaaaatgttttagaactttcctttaaaatgaaataaaatagcaatttacacacacacacagaaatgttgctgagttttagtatttcactagcttagaggtaaaatgttaaccgtgtggaatttttttttaaaaggaggatgatgtttcataactagtatatatgtgtataatataggttttaatactttttttagtgcatgctgtgtattaagtgatgtaagaaatgctaacgaaagtattcagattctaccatctaatacagaacactagtacaatagaagttttcttatttatttgttcctttaataatatgagttgaattagttgagactatgtattaagcttgtattgctgagttaggaatacaaagatagaatggtttggatttgtttatagtaggcaactgttggaggtacctgaatagaaaagtgacatgatgaaatatattaggaaatttaatctggcagttctgtgtcatttaaattgaagtaggaagagacagtatggtctgatgatgattacatgggctttagaattagagaggttaggattcatattccaactgtgtcactagctccttagtcttgattaagttggtcttgattaagttacatatcttttttaagtaatgatatctttgtctcttttatggtataataattcctacctcttagagctgttgtaaagatatttaatgagaacttactatatgccaatctctgtgctaaatgtttacatgcattatctcatttatataagattgtctgttttcccaccttctggtatggttgagttttaaaggaggaaggattagaagagtttttcagatgcttagatacatagggaaatgaatgtgggagggtattccaagcagaagaaactagatatacagattggaagtgtaaaagaacgtataaaggaacatgatgtgttggaagaaagatgagcctgtttatgagagagtgcgtaagagatgggcattgatagtggaaagttagcttgagccagattatcaagagttttgtatatctttctgaagagtttgggtattactttgtaaagcagatagcacaaattcagttgtttatggggaaccaggcaggtaagataaaatgaatgaattggacttggtaaagactgtgataaactgaaaattgcaaatcacatatgccattttacctagatgtcctttcctctgttctagctgagttttgctatgtagaaatttgggcccagtgttgccacattttctaatttttaaaagtgaaaccagatatttttaaatgtgaaattttcctattttcaaaactaacttaaaaaaattaaaaactcccatgtaggaaaaaaaattcaatctttattctttttttttttttttttttttgagatggagtctcactctgtcgcccaggctggagtgcagtggcgcgatctcagctcactgcaacttctgtcttctgggttcaagcgattgtcctgcctcagcctcccgagtagctgggattacaggcatgcgccaccacacccagttaatttttgtattttttwaaaaaaatatatatatatttattatactttaagttctagggtacatgtgcacaacatgcaagtttgttacatatgtatacatgtgccatgttggtgtgctgcagccattaactcgtcatttacattaggtatatctcctaatgttatccctcccgcctccccacttgccccagcccacgacaggccctggtgtgtggtgttcccaaccctgtgtccaagtgttctcattgttcgattcccacctgtgagcgagaacacggggtgtttggttttctgtccttgcgatagtttgctcagaatgatggtttccagcttcatccatgtccctacaaaggacatgaactcacccttttttatggctgcatagtattccatgstgtatakgtgccacattttcttaatccagtctatcattgatgggcatttgggttgcttccaagtctttgctattgtgaatagtgccacagtaaacatacgtgtgcatgtgtctttatagaagcatgatttataatcctttgggtatatacccagtaatgggatggctgggtcaaatggtatttctagttctagatccttgaggaattgccacactgtcttccacaatggttgaactagtttatagwcccaccaacagtggaaaagtgttcctgtttctccacatcctctccagcacctgttgtttcctgacttctaatgatcaccattctaactggtgtgagatggtatctcattgtggttttgatttgcatttctctgatggccagtgatgatgagcattttttcatgtgtctgttggctgcataaatgtcttcttttgagaagtgtcagttcatatccttcgcccactttttgatggggttgtttgttttttttcttgtaaatttgtttgagttctttgtagattctggatattagccctttgtcagatgggtagattgcaaaaattttctctcattctgtaggttgcctgttcaccctgatggtagtttcttttgctgtgcagaagctctttagtttaattagatcccatttgtcaattttggcttttgttgccattgcttttggtgttttagacatgaagtccttgcccatgcctatgtcctgaatggtattgcctaggttttcttctagggtttttatggttttgggtctaacatttaagtctttaatccatcttgaattaatttttgtataaggtgtaaggaagggatccagtttcagctttctacatatggctagccagttttcccagcaccgtttattaaatagggaatcctttccccattgcttgtttttgtcaggtttgtcaaagatcagatggttgtagatgtgtggtattatttccgagggctctgttctgttccatgggtctatatctctgttttggtaccagtaccatgctattttggttactgtagccttgtagtatagtttgaagtcaggtagcatgatgcctccagctttgttcttttggcttaggattgacttggcaatgcgggctctttttttggttccgtctgaactttaaagtagttttttccaattctgtgaagaaagtcattggtagcttgatggtgatggcattgaatctataaattaccttgggcagtatggccattttcacaatatttattcttcctatccatgagcatggaatgttcttccatttgtttgtgtccttttttattttgttgagcagtggtttgtagttctccttgaagaggtccttcacatcccttgtaagttggattcctaggtattttattctctttgaagcaattgtgaatgggagttcactcatgatttggctctctgtttgtctgttattggtgtataggaatgcttgtgatttttgcacattgcttttgtttcctgacactttgctgaagttgcgtatcagcttaaggagattttgggctgagatgatggggtgttctaaatatacgatcatgtcatgtctgcaaacagggacaatttgacttcctcttttcctaattgagtaccctttatttctttctcctgcctgattgccctggccagaacttccaacactatgttgaataggagtggtgagagagggcatccctgtcttgtgccagttttcaaagggaatgcttccagtttttrcccattcagtattatattggttgtgggttttgtcataaatagctcttattattttgagatacatcccatcaatacctagtttattgagagtttttagcatgaagggctgttgaagtttgttgaaggccttttctgcatctattgagataatcatgtggtttttatctttggttctgtttatatgatggattacgtttattgatttgcatatgttgaaccagctttgcatcccagggatgaagcccacttgatcatggcggataagctttttgatgtgctgctggattcagtttgccagtattttattgaggattttcgcatcgatgttcatcagggatattggtctaaaattctctttttttgttgtgtctctgccaggctttggtatcaggatgatgctggcctcataaaatgagttagggaggattccctctttttctattgattggaatagtttcagaaggaatggtaccagctcctcattgtacctctgatagaattcggctgtgaatccatctggtcctggactttttttggttggtaggctattaattattgcctcaatttcagagcctgttattggtctattcagggattcaacttcttcctgrtttagtcttgggagggtgtatgtgttcaggaatttatccattttttctagattttctagtttatttgtgcagagatgtttatagtgttctctgatggtactttgtatttctgtgggatcggtggtgataacccctttatcattttttattgcatctatttgattcttccctctttgcttctttattagtcttgctagtggtctatcaattttgttgatcttttcaaaaaaccagctcctggattcattgattttttgaagggttttttgtgtctctatctccttcagttctgctctgaccttagttatttcttaccttctgctagcttttgaatgtgtttgctcttgcttctctagttcttttaattgttatgttagggtgtcaattttagatctttcctgctttctcttgtaggcatttagtgctgtaaatttccctctacacactgctttaaatgtgtcccagagattctggtatgttgtgtccttgttctcattggtttcaaagaacatctttatttctgccttcatttcattatgtacccagtagtcattcaggagcaggttgtttagtttccatgtactcgagcggttttgagtgagtttgttaatcctgagttctagtttgattgcactgtggtctgagagacagtttgttataatttctgttcttttacatttgctgaggagtgctttacttccaactatgtggtcaattttggaataagtgtgatgtggtgctgagaagaatgtatattctgttgatttggggtggagagttctgtagatgtctattaggtctgcttggtgcagagctgagttcaattcctgggtaaccttgttaactttctgtctcgttgatctgtctaatgttgacagtggggtgttaaagtctcccttattattgtgtgggagtctaagtctcttcgtaggtctctaaggatttgctttatgaatctgggtgctcctgtattgggtgcatatatatttaggatagttagctcttcttgttggattgatccctttaccattatgtaatggccttctttgtctcttctgatctttgttggtttaaagtctgttttatcagagactaggattgcaactcctgcttttgttttccatttgcttggtagatcttcctccatccctttattttgagcctatgtgtgtctctgcacgtgagatgggtctcctgaatacagcacactgatgggtcttgactctttatccaatttgccagtctgtgtcttttaattggagcatttagcccatttacatttaatgttaatattgttatgtgtgaatttgatcctgtcattatgatgttagctggttattttgcttgttggttgatgtagtttcttcctagcatcaatggtttttacaatttgtcatgtttttgcagtggctggtaccggttgttcctttccatgtttagtgcttccttcaggagctcttgtagggcaggcctggtggtgacaaaatctctcagcatttgcttgtctgtaaaggattttatttctccttcacctgtgaagcttagtttggctggttatgaaattctgggttgaaaattcttttctttaagaatgctgaatattggcccccactctcttctggcttttagagtttctgccgagagatccactgttagtctgatgggcttccctttatgggtaacccaacctttctctctggctgccctcaacattttttccttcatttcaactttggtgaatctgacaattatgtgtcttggagttsctcttctggaggactatctttgtggcgttctatgtatttcctgaatttgaatgttggcctgccttgctaggttggggaagttctcctggataacatsctgaagagtgttttccaacttggttccattctccctgtcactttcaggtacgccaatcagacgtagatttggtcttttcacattgtcccatatttcttggaggctttgttcatttctttttactcttttttctctaagcttctcttytgacttcattcatttgatcttccatcactgataccgtttcttccagttgattgaatcagctactgaagcttatgcatgcgtcacatagttctcrtgccatggttttcagctccatcaggtcatttaaggtcttctctatgctgtttattctagttagcaattcgtccaatcttttttcaaggttttcaacttctttgcgatgggttcgaacatcctcctttagctcggagaagtttgttattaccgatcttctgaagccttctctcaactcgtcaaagtcattctctgtctagctttgttctgttgctggcaaggagctgtgttcctttgaaggagaagaggcactctgatttttagaattttcagcttttctgccctggtttctgcccatctttgtggttttatctacctttggtctttgatgatgatgacgtacrgatggggttttggtgtggatgtcctttctgtttgtttcttttccttttaacagtcaggaccctcagctgcaggtctgttggagtttgctggaggtccactccagaccctgtttacctgrgtatcaccagcagaggctgcagaactgcaaatattgcagaatggcaaatgttgctgcctgatcctccctctggaagcttcatctcagaggggcatctggccatatgaggtgtcagtcggcccttactgggaggtgcctcccagttaggctacttgggggtcaaggacccacttgaggaggcagtctgtctgttctgagatctcaaactccatgctgggagaaccactactctcttcaaagctgtcagacagggatgtttaagtctgcagaagtttctgctgccttttgttcaactatgccctgcccccagaggtggaatctacagaggcaggcaggcctccttgagctgtggtgggctccacccagtttgagcttcctggcagctttgcttacctgctcaagcctcagcaatggcgggtgcccctcccccagcctggctgctgccttgcagttcgatctcagagtgctgtgctggcagtgagcaaggctccgtgggcgtggaaccctccaagccaggcaygggatataatctcctggtgtgctgtttgctaagatcgttggaaaagcacagtattagggtgggagtgacctgattttccaggtgccatctgtctccgcttcccttggctaggaaagggaattccctgacctcttgcacttcctgggtgaggcgatgcctcgccctgctttggcttatggtccatgggctgcacccactgtctgacaagccccagtgaaatgaacccggtacctcagttggaaatgcagaaatcacccrtcttctgcattgctcaccctgggagctgtagactggagctgttcctattcggccatcttggaacctcctctcccaatttttgtatttttagtagaggtggcatttcactatgttggccaggctggtctccaactcctgacctcaggtgattgcccgcctcagcctcctcccatagtgctgggattacaggcgtgagccaccatgcccagctttaatctttattctttatttagcctataagttatcagtttatgatatctgttgtacataactgggagccataaaatctttttaataacaagtatggtgacatggcttgccagatttaattttcatatggatcatactggtctcagtgtagagattggatggtgaaattaaagaatgaacataggatggctgttgtaatagaaaaagcgagagcagargagtgactaacctaaaaagtggcattagagctrgaagtgggagatggattgaatagataatttcagtgcagtgattcctaatattttcactttcatggagcagtgtggatttactgtttggaaatatttttatcttacaagtaagctgtgtttattagtaatcatattaccataaaaatgtaattgtcagttataagttcctataggcataaggtaactagtgtaacccttattgacttgatgaaattctagttcatggtaaaaagaaatataaagaaaatcctgaagttgtagttagcctttgcaactttattgtaattataactacaatagggaaaagtgaacgtgcacacttcttagttaccactcaaaatcaatctagccaaaaaaaatgtggggggagggaataactcacctagaagtttgacagaccatagtatactttgaatcaagagaacacatattttccaagtgttcagcgtcaccaattatcagggaagtgcacatcaaatccacagtgagataccatcttaccccacatagaatggctgttattaaaaatacaaaaaataacagatgcttgcaaggatgcagagagaaggtaactcttacacactaataatgggaatgtaaattagtacaaccactattgaaaacartatggagatttctcaaaaaactaaaatagaactaccatttgatccagcaatctcactactaggtgtttatccacaggaaaataaatctctatgtcaaagggatcctgcacttggatgtttatcattagcactatttacaatagcaaaaatatggaatcaacccaagtgtccacctacagacaaatggatttttaaaatgtggtatataggccaggcacggtggctcatgcctttactcccagcactttgggaggccgaggaaggaggatcacctgaggtcaggggttgaccagcctggccaacatggtgaaacaccgtctctactaaaaaaaaaaaaaaaaatttagcygggcatggtggcaggcgcttgtagtcccagctacttgggaggctgaggcaggagaatggcgtgaacccgggaggcggagcttgcagtgagctgagatcttgccactgcactccagcctgggcgacaaagagagactccgtctaaaaaaaaaaaaaaaaaattacccaggcatggtggcgtgcacttgtagtcccagctacccaggagtttgaggcaggagaatcgcttgaaccctgggaagaagaggttgcagttagcagagatcatgccattaccgtccagcctgggcaacaagaacgaaactacttctcaaaaaaaaaaaaaaagtggtacatatatacacaatgaaatactattcggccataagaatgaatgaaatcttgtcacttgcagcaacatgggtgcagctggaggtcatcrtattaagcaagataagccaagcacagaaagacagataccacatgttctcactcaaaggtagaagctaaaaaagttgatctcatggaaatagtaaaatgatggataccagaggctgggaggagtacatgagtaggaaggtggggtaaagagaggttgatgatagaagaaataaaccttaatattccatagcagagtggggtgatgatagttagcaacaatgtattgtatatttcaaattagctataagagaggacttgaaatgttaccaacacatagaaatgataaatactcaggatgatgagcacctcaaataccctgacttgatcattacacattctatgcatgtgacaaatattcacatgtacccaataaatatgtaaaatattttggatcaacaaaaaaagtatatatattttctaatcaatgcattgttatcagtctcaaatactttggtttcaggacccttttctatttttaaaaattacagcagacccttaaagagcatttgtttatttgagtcacacctattcatatttactgtattagaaattaaaacttaaatgaagggcctttggtgagtagagttcatcaaaaaagtgacatttaaattgagatctgaagtttgcaaagtatattctttctatcagtgatttttagtcagtttaacaattgagaggccgggcacggtggctcacacctgtaatcccagcactttgggaggccaaggtgagcagatcacttgaggtcaggagttcgagactagcctggccaacatggtgaaaccccatctcttctaaaaatacaaaaatcagctgggtgtggtattgggcacctgtaatcccagctactcgggaggctgaggcaggagaagcgcttgaacccaggaggcagaggttgcagtgagcctagatcgtgccactgcactccagcctggccaacagagtaagactcagtctgaaaaaaaaaattgaatcataatcatatctcaataacctctccagattggaaaatgtgaagtccaaactagtcatagaaaatctaaaaaactttgattaacattctttaacaataataataaataatatttatttggtagttactgtatgctaaaagtattctgtgttaagtaagaggtttataaacttatttaatcctcattatagtgacataagatgatattattatcctcattttacaaatgaaagaagtgacatttagaagagctaattaacttgactagttaagtgggcagaatttggatccagaacttgaaatttttatagcaataaataaatatgggaacagaaagcaataaagcaagttctatattatataatatagctcttatttatagtgattactataacttacactaacttatatgaagttattagtataacttagttgcttaaaatattaacatgctgaagttattgtcttaaaaatgcttttaggttaagctttttaaaatgtgaatctctataggaggtgaaattctggtatggataggattcagtacagttgtatttgcagtagcatgtcatttaaattttccactaggctataggagataactggtagcctaatataaattattcacctttttctttccaatttcacctccagctgaatttcatttgatttgagtatttttagatttagctttattttgcatatgttagtgagctagaataaaagaaagacatattaatctcttcccaggagccctaattctttatatcttctctattgtaatgatttgtactattgtgaaaatgtaaatttttagagttttgcagtctaagatttgcagttcagctatttaaggcagcaactgccacattatagaactgacatttattaaggatcttttatgtaccagacatgttgaaatccattgtctaaatcatcacaacaaacctataaaggtaattattatatctattttacagatgcaaaaagatgcccagaaaagttaaataacttgctcaaattcttacagctagttatatgcagagccaggttttaaattcaaggctatttgattttaaggagaggagttctgtaacattatttaaaatctataagtagttcagaccaggcacgatggctcacatctgtaatcccagcactttgggaggccaaggcaggtggatcacttgaggccaggagtttgagaccagcctgggcaacrtggcaaaaccctgcctctactaaaaatacaaaaattagccaggcatggtggcacacacctgtaatcccagctactctggaggccaaggcatgagaattgcttaaacctgggaggtggaggttgcagtgagcaagccgagatcatgccacagcactccagcctgggcgacagagcaagactgtctcaaaaataaaaataaattaaaaaaatatatgtatagtagtatacatacaaaatatatgtagttcagtcaataaatacttgtcccttgggagatgatattcaccaaacttatagttgacaagaaattggtatttaagatagctaaagaatgctaacaactcaattataaaaagaaaactcaataagatatggacaaaagatgtgaacaaacacatcacaawagattatatacaaatggatattaaacacatgaaaaaacattcaatcattagtcatcagggaaatgtaaattaaaaccacaacgagataatactacattcccaccataattactaaaatttagaagccaatgtccatcaagacatagagcattcagaagtctcagacatacattgtcattgggaatataaatggtataaccactttggaaaaaggtccatacatacacttaccctatgaccgagaaattctcctaagtatttatgcaagccaaatgaaagtgcatttcaacaatgtcaacaaaaaaacctgtataaaaatattcaaagcagttttggtcataatagtcccaaactagaaacatcctagttgtacacggataggagaatggctaaacaaactggtatattcatacaatggactactattcagcaatagcaataaactattgatacataaaaagaacatgaatgtatctcaaaaataattcgttggccaggcatggtggctcatgcctataatcccagcactttgggaggccaaggtgggaggatcacttgagcccaggagttcgaaaccagcctggccaccatgggagaccttgtctctaccagcaacaacaaaaattagccaaatgtggtggcatgcgcctgtagtcccagctacttgggaggctgaggcaggaggatcacctgagcccaggaggtcgaggctgcagtgagccaagattgtgtgcgactgcctgggcaatagaggaagaccctgtctcaaaagtaatcataaccataataatatgctgagtgaaaaaaaaaaccttactgaaaagtacatattgtataatttcattgtatgaagttctaaaataggcaaaatttgttaatggttaaaaaaatcagaacaatggttgcctatagaggggattgacaagggcatgagggaactttctgggataatggtaaggttctattttgattattttcttattttcagttttgaattgttcattggaagtgtgtaaagttcaactgaggttgtgctttgaggctttaactttgctgaactctcttattgtctctgttaatttttgtgtagattcttaaagattttctacatacaagatcatgctatctgtgaatagagagaatagttttacttactcctttccaatctagatgccatttgttttatttgcccaactggcctttctcaatcacctgtgcagtgtgttctttttttttttttttttaacttcccacactaccccgacatatgcagtacgttcctactctacccaaattaggtatagttaagtgccttctgggtatgtccatttacatatctttttagcccatcaaactcagcatgtccaagactgaactcttttcccatcaaagtcctcctcctccagagtcccctgtcttggaaatgacatcacattcaactaattgtacagccagaaaactgagaattatctttgacttctccattttctttgtttctttttttttttaaataatttcaacttttattttagattcaggggtacatatgtagacttgttacatgggtatattgtgtggtgctgatgtttggggtatgattgatcctgtcacccatatagtgaggatagtactcaatagttagtttttcagtctttgccccctccctcctttctctctctggtaatccccagtgtctaatattgccatctttgtgtccatgtgtatccagtgtttagttcccacttgtaagtgagaacatgtggtgtttggttttctgtttctgcattaattcacttaggatagtggtctccaggtgcatccatgatttcattctttttttatggctgtgtagtattccatggtgtatatataccatgttttctttttttctgagttttaattttttttccttcttttaacaaatttttatttccataggtttttggggaacagatggtatttgattacatgggtaagttccttagtggtgatttgtgagatgttggtgtacccatcacctgagcagtatacactgaacccaatttgtagtcttgtattcctcacccacttcccactctttccccccaagtccccaaagttcatcgaatccttcttatccctttgcatcctcatagtttagctcccgcttatgagtgagaacataacgatgtttggttttccattcctgagttaattcggttagaatactagtgtccaatcccatccaggttgctgcgagtgccattaattcattcctttttatggctgcgtgtattccatcttatgtatatactacagtttctttatccactcattgattgatgggcagggcatttgggctggttccacatttttgcagttgcaggtttatagcgctgccgtaaacatgcatgtgcaagtttcttttttgtgtaatgacttctttacctctgggtagatacccagcagtgggattgctgaaatggtagttctacttttgttctttaaggagtctccacactgtttttcatagtggctgtactagtttacattcccaccagcaatgtagaaatgttcccttttcactgcattgatgccaacatctatttttgtattattattttttgataatggccattcttgcaggagtaaggtggtattgcattgtggttttgatttgcatttttctgataatttatggtgagcattttttcatgtttgtttgtcatttgtatatcttcttttgagaattgtctattcatgtccttagcccactttttgatgggatttttttttcttgctaatttgtttgagttcctygtagactctggatattagtcctttgtcggatgtatagatcgtgaagattttctcccactctgtgggttgtctgtttactctgctgtttcttttgctgtgcaaaagctctttagtttaattaagttccacctatttatctttgtttttgttgcatttgcttttgggttgttggtcatgaaatctttgcctggaagggtttttccaatgttgtcttctagaatttttatagttttaggtcttagatttaagtccttaatccatcttgaggttttttgtatttttttagctggagtttcactcttgtcactcaggctggagtgcaatggcacaatctccattcactgcagcctccccttcctggatgcaagtgattctcctgcctcagcctcccaagtagctggtattacaggtgcctgccatcatgcctggctaatttttaatttttagtagaaatggggtttcatcattgttggccaggctggtctcgaactcctgatctcaggtgatccacccacctcggtctcccaaagtgttgggattacaggcgtgagccaccacacctggtcaatcttgagctgacttttgtgtaaggtgagagatgaggatccagtttcattctcctacatgtggcttgtcaattatcccagcaccatttgttgagtagggtgtcctttcctcactttatgtttttgtttgtttcgtcraagattagttggctgtaagtatttgggtttatttctgggttctctattctgttccattagtctttgtgcctatttttataccagcaccatgctgttttggtgactgtgaccttatgtttgaaatcaggtaatgtggtgcctccaaatttgtactttttgcttagtccagctttggctatgtgggctcttttttggttccatatgaattttagggtttttttttctagttttgtaaagaatgatggtggtattttgatgggaattgcattgaatttatagcttgcttttggcagtatggtcattttcacaatattgattctacccatccatgaacatgggatgtgtttccatttgtttgtgtcatctatgatttctttcgccagtgttttgtagttttccttgcaggggtctttcacctccttggttaggtatattcctaagtattttattgttttcccagctattgtaaaagcggctgagttsttgatttgattctcaccttggtcactgttggtgtatagtagagctattgatttgtgtacattaattttgtatcctaaagcttagctgaattcattaatcagttctaggagctttttggaggagtctttagggttttctaggtatacagtcatatcatcagatgcaaacagcgacagtttgacttcctctttaccaatttagataccttttatttctttgtctcgtctgattgctctagctaggacttccagtactattttgaatagaagttatctaccacattttctttatccagtccactgttgatcagtgcctagattgatcccatgtctttgctattgtgaatagtgctgcagtaaacatatgagtgcatgtgtgtttttggtggaatgatttattttcttttggatatatacctggtaatgttggggagtctaatagtaattctatttttaattcttttttttttttttgagacagagtctcactctgttgcccagattggagggcagtggcacaattttggctcaccacaacctctgccttccaggttcaagcgattctcatgtctcagcctcctgagtagtggtgactacaggcacacaccaccacatctggctaatttttatatttttcgcaatgttggccaggctggtctcgaacttctgacctcgggtaatctgcccacctcggcctcccaaagtgctgggattgcaggcgtaaaccactgagcccggcctctatttttaattctttgagaaatctccaagctgctttccacagtggctgaattaaattaccaccagtagtgtgcaagtgtgttttttttttctctgcagtctcaccagcatctgttttttcttttttctttttttttttttttttaactttttaatagtagccattctgattggtgtgaaatggcacttcattgtagttttggtttgcatttctctgatgattagygatgttgagtattttttcatgtttgctggctgtttgtatgtcttcttttgagaagtgtctgtttgcatttttgcccattttttaatggggttatttgttttttgtttgttgaattgtttaagttctttatagattctggatattagccctttgtcagatgcgtagattgagaatatttactcccattctgtaggttgtctgtttattcagttgatagtttcttttgctgtgtaaaagccctctagcttaattaggtctcacttgccaatttttgtttttgttgcaaatatttttgaggacttagtcataaattctttcccaaggccagcatccagaatggtgttttctaggttttcttatagatgattcttatagtttgagatgttatatttaaatctttaatccatcttgagttatttttgcatatggtgaaaggtagtggtccagtttcatttttctgcatatctctaaccagctacccagcaccatttattgaatagggagtcctttccccattgcttatttttgttgactttgtcaaagatcagatggctatagacgtgctccattttctttactcatcatatttaacccatcaccaactcctgatggttctgctttctaattatctcttgaaccaatgtaaaacttatctgccaccaccaccttggccaaactaccatcgtctcttgccaggattattgcacttgcgtaactggttcccccagaaaccactcttgactttctcttctctgttcttcactttttttttggtcagatctttctgaaaagaaatatgattatatcactgccctgctgaatgccttctaatgaggtcctgttcaagttcagcatggcttggccctgcttgcctctcactggtctttgtataaaaatccaagtatggtctacatggccctgcagaatatagcccttacctacctccccagacattgttgccctgcctttcttttgcttccttgaattagacatctattgaactgtaaaagggcwgggatcatacaccaatgcatactcaagacctgacacatggtagataccaataagtaccagttgagtaaataaaaattatgtgccaaggtggagatggatatgttcattatctcaatagtggtgatggtttcatgtatgtcaaaactcacgtcaaacttaacatgtgtcaaaacttaacaattatatgctttaaataggtacaatttattgcatgtcaattttttctcagtaaagctgctaaacagaaaacatgttcctttttcgagtcttggcacattctttttgtcttgtcttttttacccttctttgcttacctaattcctgcttatccttcagtttttgcttcagtgtattttgtygggccttcctaatcccactaggttaggtatccctgttatatgtcctatactttccttgagaacatttgtcataattatatataataattatatgcaattatgtaatgtttaatgtcttctctttccttataatccttcataattatagaaaatgtgcctttcttcttcattaatgtatcctaggggtatattataggcacttaatatttgttggctaaattaacaaatgaaatatatattcatttatttattttgcaaacatccatcaagccataccatgaaccaggtattattgtaggttctggagttaccacagtgaataaaacagacttttatctcagccctcatggaacttatacttaaaggttgacatagaccatttttaagtatatataaatatataacttttaagtatatatatattaactcaataatcagatggtagtaaatactatggtgaaaaataaggcagagaagtgggggaaataagtagtgytgaggcatatggagaatttgtctcattgtccatagagacatatgtggattagaacctgggcactgagggatgacctggaagctctggactccttggagtgacagggcatagaagacattatgaaattagttctgaaagtctcaaggcatagtgaagccgtgaatgttgagcaaggggaagatcaggagtcatgctggaattacagagaatcctgggttccttctgttcatcttgcaaatggcaatgtggaagtttaggtgatgttatctaggtcacataaaggtctgggtctttccctggattattgttgatagatttattaagtactgatcatgggcaagatcttgtgggataaatgaaagtaatataccagacttcattttctcgctgctctcaagaaactcactatctggtcgacaagacaaacatgtagaaaaataattatgatataaaacaatgtaataagagtaatagtagaaatgtaaatgtgctaaaggatcacagaaggaaagaataattgcaaagagttaagggtataggggcagaaaggggagctggaaggtggatagaggaaagataaaatttcaacgagcagaaatcgtagtaaatgcattctaagcaaatgaacatctctatttggatgcctttcttctgcctcaaactcagcatgctcggtcatatggtaattgtgttcaactttttaaggaactggcaaactgttttccacagcacctgcaccattttacatactactagcaatgttacaagggttcctgtttctcctgatgctcgtcaatacttcatagtttctggtgtttttattacagccatcctagtggatgtgaaatggtatctcaatgtggttatttgcattttcttaatgattgatgtaactatgttttcaaaatggttattgcctattcatgtatcttctttttttcttttctttttcttttttttttttttttttttaagagatagagtctcactttgttacccaggctggaatgcagtagtgtgatcagagctcattgcagcctcgaactcctgggctcaaacagtcctcctgccttagcctcctgagtagctaggactacaggtgtacaccaccatgccctgctaatatttaaatttttttgtagagatgtggtcttgctatgtttcctgggctgatctttgaaccctggcctcaagtggtccttccactttggcctcccaaagctggagttataggtgtgagccaccatgcccagagtatatgttccttcttgtcccttttatatggtagtttaaaagttaatggattaatttttgtttcaacgtaatttatagggaaaaatgaacaaagtattgttttataaagaatgtgataaacttgaaatagatttattatgaagatagatgttatgttttaatataaacaaatatttaactctgtgttctgtacttccatgtggatgcaatgggtaatgagcctgttatagataaatgaaagcaagatttaactcatatactacagttatgtatgttctttcatccttatctccatgatttgatttggttaccttaatgtattttgttaggaaggttttaaaaagctataaatcagtcccttgatagtgctttgtaacatgtatgccaatatgtgaaattactttcatccatcagttataaatttaacaatggtatagtgtttatgtatgccttatatgagcataatcattccataaagatttgtgctaaattgtatattcagttgatgacatttatcatgaagcctgaaaacgtagtatgattttcagttagtacttactattggtagattattttactgtgtttgtacatgtgacaatcatgtttttgtttttcttttagttttagagacaaggtcttgctctgttgaccaggctagcgtgatgtggtacgatcctagcccactgcagcctcaaactcctagactcaagcagccctcctgctttagtatcagttaggactatagatgtgccaccatgccctgctaattaaaaaaaaaaaaattgtagaggtggagtcttactatattgcccaggctggtctcaaactcctggcctcaagaagtccttgcgtcttggctttctaaagtgctgggcttacaaggcatgggccaccatgcccagccacaattattaatatgtattttgaagagttttgttgttgttattcccttaagcagctgtgatcttatggtgtgttgatacaaattgaaggaagaaaaaaattagtatgaatattataggacaagcactataagaaaaagtgtctgtatttggtatattataaagggttcagtgtctacctttgaggaatgaatattagctatccgagggaggctatcactgtgtatagctttgtctgctccttttagagaaacttcatgatgctctagaatatgcagttagttacaaagctttggatctcacaaaagcctgaatacatctttgattggttatacattaaaagaaatagcccacagcatggtgccagacaagtgtagagcccaaccaatttgatccttaagcagggagaagaattctattcactattaagaggttagattataaaatgtagcaattatttcagcctaaattggtttacagcttttttttttttcaatgaaacttctcttcaaattgtgtggcaagaagacagttttcattttgatgaccttttttgcattgtgtttttcttcaagtcctcccaccctaccctttggcctactttatttagtgttcaaatctgaatcataatgtgcatctggagggatcctgaatcatgtgattgaagtgtctcatcatttatgaacactctttgaaggcctaattttgatgtagtatttggttatatcatgaataaatgtgttccctctcttgatggctttatgggtttgtgcatatgtaacattattttttctctttttatccatatacaatttttttgtgtttttaaattacaaaatgaaacaaagaatgacagccacattgggccttgacagagatcctttcacttgaaggaccactcctgtaatgaatgattttgatttaagtgaatattcatatatttctctgagtctcatttgtatgaaatgacagactgcaaaccactttgtttgattacaatcccttcaccttcattatcttttatgtctatttaaactctggatttgccatatccatcttgaccctcccccacatctctctgtttttattttttttattgcaattttcctcttttctgtgggcattcacagattgtttttggagttcattaaaaaggaagtgtgttgtctgggtagaaaattacatttgcatgcttgagagaggcctaagggcttttgtggggtttggcatggatcttgtgttttttgggggtgtgggtgatgagaaaagggaagagtaagaagaagggatttttagaaaggggaaaaataagaaatgttgagattatttctcctatccccattttttcctttccatattatatatgtccaactggtttcttccttttttttttttttttttttgcatgtgtaaaccacttaactaacaatggaacagattaagagatctttcttagaactgtatttgaatgtacagttgtgttctgcaaagcagaaaacgttttctatatggtaattctacatttacaagtgaagctgcaagttgataaacatatctgtctgtctatctcttttcctttgtggtaattggagggaattttatagaaaattgtctcttgaattagtatgacattttatttaaattagtatctacgtagaagtttagccatgttttgatttaraatttcccactttcagaatttagatttttaggtataatgtttagcccttttaaaagttgatagtgctagccgggcatgatggtgaatgcctgttggtcccagctactcaggaagctgagtcaggagttctcctgagcctgagaggcagaggttgcagtgagccaatattgtaccaccgcactccagcctgggcaacagagtgagaccctgtttaaaaaaaaaaaaaaagttgataatgctaatcttttcttttattaaagatgatgtcacttgttattcagaacatatcatttttgtccattgggacgtggggaaaccatagagcatttataataacagaactgtatttctcagccttgaaaacttagaattcagttagattcacagttaataacagaaatgtgggtaatgtaggaccaaggatggtcatgtggtgagtcaggagtggactgggtaatcagggagttactttgactgtactataaagcatattcataggaaagtaagttgatttatagagctggccaatggagcttatagtcaatatgagtacgtacgtatacaattgtgtgtgtgtgtgtagtctataaagtctggaaacaactttggaaggctgaggcgggtggatcmcttgaggccaggagttcgagaccagcctggccaacatggtgaaaccctgtctctactaaaaatacaaaaattagccaggsgtggtaatgtacacctgtaatcccagctactcaggaggctgaggcacgagaattgcttgaacyggggaagcggaggttgcagtgagccaagattgcmccactgcactccagcctgggtgagagcaagactctgtctcaaaaaaaaaaaaaaaaaaaaaaaaaaaagtctagaaacagatacttgtattttatacttttttttttttcaaatcagttaagtttttgatgacatgatatttgcttttgttttcaractatggttacaacatggtaggtatctgtataaacraatagttataagtgctgaaaaaagctggactacatcatcagctttttattctctattggatattcccattagcataaaaacatacttttatttcttagtaaaaaatattctcttaattctaccagctattgtcctatctctttactgtcttttgtagcaatatttcaagagttatctatacttgttaactccaatttctgtcctcccattttctcttaaatctgttccaacaagtgtttactatgccagatccattctcatcagagccacctctgcattgccagttgtcacttctcagtccttttcttacttgaatatcagcagtttttggtatagttgatcactgtcatccttgattcattttcttcatgaggcttttagggtaccacactctcctagtttttctcctaccttgttagcagctccatctcagtctcctttgcttgttcttcctgttctcttttttccttgaaatctaaaaatagatagtatttttaaaaatatcacacaataaaagtgacttttttcttttgatgtacagttctgtgaattttaacagatgtataaacttaagtaagctataccatagccaggatatgaacagttccatcaccccaaaaaactccctcccattgtagttacactcttaacacttggcagccactgatctgttctccatcattatagttttggtttttttttaagaatgttatataaatggaaatatatagtgtgttacctttctagatggctttttttactcagcataatgsctttgatatattcctctaagttgttgcctgtatctatagtttattctttctttttgctgggtagtattctgttatataaatgtactacaaattgtttatcctgttaaaggatatttgggttgtttctaatttttggcagttatgaatggagctgctataaatgttgataaccagtttttttttttttttgttaacgtaacttttcatttctctagggagaaatcccaggagtgggattgctgggtaatatggtaagtaagtgtatatttaacttaagaaactgacaaatgcttttccagagcgcctgtaccattttgtattcacgccagcaaagcatgagagttctggttctgcatcttcatcagcacttggtattgtcaatattttttattttactcattttcactggtatgtagtaatatttcataatgattttaatttgcgtttttctaagagctaatgatgctgaacattttttcatgtacttatttgccatttgtatattctcttcagagtagtacccacatcttttgcctatttttaaattgacttgttcatattcttattttgagtttttagagttcgttttctatcctagatgcaagtcctttattggatatgtgtcttgcaaatattttctcccagtctgtggcttgtttcttcaatattttaatagtgtctttgtcagagcaagagtttttaatgttaatgaaatccaacttaccagtttcttcttttatggagtctgcttttggttacatgtataaaaactctttgmctaatcccaggtcacaaagatatcctgctgtgttttattctaaacagtttaaacatttttgtacaaaatgtgaggtttagattgaggtttgtttattcattttgcttattgatgttcaatgtttagtgttcagtgtccagtcctatatattgaaaagactgtcctcgcttcattgaattgattttatttcttttgcaaaatcgattggccatatttgtgtggagacagggtctcaygctgttgtccagcctagagtccagtrgcacgatcatagctcacttgcagcctcaaactcctgggctcaagcaaacctcctgtctcaacctcccaaggagctgggacacaacagttgtgcaccatcatggctggcaattttttctttttttttttttctagagacaagatctcgtgatactgaccttgctggtctcgaactcctggcctcaaatgatcctcctgcctcagcctcccaaagtgctgggattacaggcttgaaccaccatgcctggctgctttatagtatttcttaaagttcatttgattcctctaactttattcttccctttcagaattattttagctcttccagttcctttggctttctgtataaattttaaaattagcttgtctatattttaaaatatctgagattttgactgatattgcattaaacctatatatcaagtttaggaaaattgaaatcttcactatattgagtcttcaatctgtgaacacagtatatctctctatttatttaggtcttcctggatttctttcatcactgttttatagttttcagtctatagatgcctacatgttttgttagacttatacctaaatattttacttttttgaagttattataattgttttttttttwaatttatgtttgtatttgtatattgctagcataaagaaatatgtttggtttttttatgatgatcttgtaactgagtccttgctaactgcacttttttgtaaattccttgggagtttctaggtagacaatcatgttatctttgaataaggatagttttatatcttcctttccaatctgtatatttttattacattttcttcttgtgttgcaccagctaagattttcagtacagtgttcaataggaatggggagagtgtacatcattgccttattcccgatattagaaaggaggcattgagtctttcaccatttagtattttgttagatggaggatttttgtagataccctttaccaggttgaagaaatttacttctattccaggtttgctaagagttttgttgttgctgttgtttttagtcatgaacagttgttgtattttgtcaaatgctttcttctgtgtcaaattgtatgatcatgttttttattctttagactgttaatatggtggattacataaattacttttcaaatattgaaacagctttgcattcacagaagaaagcccactttgttgtggtatattattctttgtatatgtttctggacttggtatgctaatattttgttgagagtttttgtgtctatgttcatgaaaaatattggtctgtgttttcttttcttcttctttttttttttttttttttgagacagagtctcactctgtcgcccaggctggagtgcagtagcacaatctcagctcactgcaacctctgcctcccaggtrtaagcgatcctcccacttcagcctcctgagtagctgggaccataggcatgcaccacacccagctaatttttttttttttttttggtagagacagggtttcaccatgttgcccaggctagtctcaaactcctgggctcgtgtgacccgctcacctcggcctcccaaagtgctgggattataggtatgagccaccatgtccagcagtctatagttttcttccttgtgttttcttttttttttaaatactgttgttgtctggctttagtacagaacagtgttgggatcatgaaacgagtttagaagtattcctctttcttttttctgaatgaaattttataaaattggtattatttcttttttaaatatttggaagaatttgcctgtgaaaccatctgtcactggagatttatttttcagaaagtttttggccacctattcaatttctcttgtaaatatacaactattggccaggcaccatggctcatacctgtaatcccagttgcttgagtccaggagtttgagaccagcctgggcaatgtggcaaaactccatctctacaaaaaatacaaaaaattagccaggcatggtggcatgtacctgtggtccaagctactagggagaccaaggtgggaggatcttctgagcctgggaggtcaagactgcagtgagccatgattgtgccactgtactctagcctgggtgacagagtaagaccttaactcaaaataacaacaaaaaacaaaaagactattcagatatctgtttaatctttggtgaatgttggtagtttgagtttgtgagaaattagttgatttcattaaagttgtccaatttgtatgtgtagttatctctaataattctttttatttattaatttttttgagacagggcctcactttgtcacctaggctggagtgcagtggtgtgatctcggctcactgcagcctcagcttccctgggctcaagtgatcctctcaccttgttctcctgagtagctaggaccacagacatgcacaaccatggctggctaatttttgcatgtttttgtagagatgaagtttcaccatgttgccttggctggcttagaactgctaggctcaaacaatacacccacctctcatatagtaatataagacaaagcagactttgaacacacaaaaaacaatgcagataaagaagaatattatgtcataataaaagggtcagctagtaattccacagtggctcatgcctgtaatcccagccaccgtgggattactgccagacccttttattattacatgatattcttttttatctgtgttgttttttgtgtgcgtgttcaaggtctactttgtctcatactactataaccattccagttttattttgattagtgtttacatggtaatatattttccatgtttaaacttttaatcgttttagtctacctatatcattgtatttgaagtgagktttttgtagtcagctggtttttgataaatcttacggattatgttgatagttgttgttttagtaggcagtctatctggttgggttcagaccccaagtttcaacctggctgctatggcctataattccaatgaatgtcacttctgtttattatatrctgaattggacagatctacatgttctctacttgggctggggccaggagttcataaaccagtttatgggcttgctctcctgagttcttcatctctgtgatctccctagtactttctggttccctgaggcttcccttttctgttctctcaccagaaacttagaacagttacccctttctgatgtatacttgcatatctaggtccaagcagcaggaaaacagaaaaagacagagtgagaattggtctcatcctcttagaactactgctctaccaaaagagaggaaagtctccctttttcagaattttgacttctgatgattcccgttgctactggtgctgcagctgctgctgctttcactgccatcacgacaggattgcccggaggttggggtatgagtaaatggagaaaagaaagtggaaaaaatgggggatttttcacactctctctgagtattaggagttctttttcccaccctttgagaggcttttcctggatctttctctgtatgcaccccaatactcactactgggcttttgaatgtgttgaattcagtctgggtatactagagggaaaaaaaaaggataaactcactgctggttcagtggtacttcaaattctggtctcctttcccagtctgtctgctactaatgacttttcagcatcttcaaatactactgcatacattctttccaagtttgaaagctgccttcagtgggagagagtaaagtgtgcttactccatcttatccatctctagaagcttaatctttttaacctatttatgtctttatattttaagtgggtttgttgtaggcagtgtatgatcagatcttgcttttttatccaatgtaataatttctgccttttttattgggctgtttaggctgcttacatttaacatggttgttgatatggttgtgtttaaatctaccatcttgctatttgttgcctgtttgtcatctgttctttgttctcttcttatttttctgcctccttttttattatcttttgtgattccattttatctcctttgttggcatattagctgtatctttttgtgcatatttgagagtgtatagtatataccagaggtcagcaaactttttctataaatgttcagatagcctaaatattttaggttttgtagatcacactatctgttggaactacaattctgccattgttgcacaaaagcagccatagacaatagataaatgaataactgtggctgtatcccaataaaactttattcacagaaacaggtggcaggtcagatctggcctgcaggctgtagtttgccaacctttggttgtacctttagcaccgtctactttcaagtgatattgtactatttcactaatagtattagtaccttatcacagcacacttccattctcctctaccagcctttgtgctaatgttttcacacattttacttttatacaaaatgtaaaccttaaaatacattgttattgtttttcttttaatagttgtattttcaggagatttaaataataaatgaagtcatttgaatttatctacattgctactgtttccagtgttcttcatttttatgtgcaaattcatatttttcatttggtattatttccttctgcctgaaggacttcatttaaaatttttgctgttgctgggcaggatgtctcacacctgtaatcctagaattttgggaggctgaggtgggaggatcacttgagttcaggagtttgagaccagcctgggcaacaaagcaagaccctgtctctaccaaaaaaaaaaaaaaaaaaaaaaaatcgaagaaagcaaaagaaggaaagaaaagaaaaagaaaagaaaaaattagctgggcatggtggcatatacctgtagtctcagctactcaggaggctcaaacaggagggaggattgcctgagcccaggagtttgaagccaggcatggtggctcataccataatcccagcactttgggtgggaagattgcttgagactgtctctacaaaaaaaaaaaaaaaagagagagagagggagggagaggggagggagagaggagggaaggagagagggagaggggcagagagagagagagagggagggaggaggagagagagagagaaaaaaaaagaaaagaaaagaaagagaaattagccaccatggtagcaggcgtctgtagtcccagctagtaaggaggctgaggtgggaagatcacttgagcccagaggtcaaggctgctatgtactgtgattgtgccatggcaccacagcctgggtaacagagtgagactgttgtctcttaaaaaacggaaaaaagggccggtgtggtggctcacacctgtaatctcagcactttgggaggccgaggcaggcggaccatttgaggtcaggattttgagaccagcctggccagtgtggtgaacccccgtctctactaaaaatacaaaaattagccgggcatggtggcaggtgcctgtaatcccagctacgaggctggaaaatcacttaaacccaggaggcggaggttgcagtgagctgagatcactccattgcactccagcctgggcaatagagcaagactcggtctcaaaaaaaaaaaaaaagaaaaagaaaaagaaaaacgaaatttctactattgawgaattatttcagcttttcataagtccttgtcatccacacgtgagttaatgttagtgaggataggagctggttgccaggagaatcactcatgagattagtgggttggaaccttcactctacctgaccccctgatctcccctggggaggggagaggggctgcattttgagctaatcaccagtggccaatgatttaattaatcatgcctgtataatgaagcctgtatcctcatgtcccatagtcagccctgcggaacctgcttatttgaaaagttgaccctccatatgtgtgggttgcaaatctcatgaatactctattttgtttttcttcctttctttttttttttttttttttgagatggagtttcactcttgtctcccaggctggagtgcaatggcgtggtcttggctcactgcaacctccttctcctgggttcaggcgattctcctgcctcagcctccggagtagctgggtctacaggcacacaccaccatacccggctaatttttgtatttttagtagacatggggattttgccatgttggccaggctggtctcgaactcctgacctcaagtgatccacctgcctcggcctcccaaagtgctgggattacaggtgtgagccaccgtgcccagcctttcttttcatttttaaaaaattttcatcaatactgtattttctatttacatttggttgaaaaaaaaatccttgtataagttgacccatgttgttcaatcccatgttgttaggggtcacttgtgcatgttttctatttatggagatacatatttaggcagtttcatagaaatgagattggtaagaaagtaaaccccagtattggaggaactgcttccaaccctttccaccgttatcaccctaattcaggccaatgtgatctctcccgtgaattctttacagtagccatgtaactggcctccttgttcctacccttgcctcagtatagtatgttctcaacacagcagccaggatgatagtagtctgcttagaatgctgcaaaagttcctcatttcacttagagtgaaagccaaattccatacaatagtttacaagactccaactaatctgtcacccttccctgtgttactgctctaacttctcttttactgtcccactagctcatcctgcaccaatcataatgtcctccttgctattctttgaacatgccaggcatgttcctgtctttggatctttatattgtctattgcctcagcttgtaaagtttttgactcagatattcacatgggcaaatccctcatcttcttcaagtttttgctgagtttttaccttcttgtgaggcaggcctaccctgtccaccatatttaaatttacaatttaccttctagccctttatacccaaccttgatctactttttttttctatagcagttgtcttctaatatactgcaatttacttattttttgtttattgcctttcttctaaaatagaaggtccacaagggctagataaatatttttaaaaatctgtttggattagatgctgtggcttatgcctgcaatcccaatgctttgggaggccacggcaggaggatcacttgaagccaggagttcaaaactagcctgggcaacatagcaagaccctaaaaaaattagctgggcatggtggtgtgtgcttggagttccagctacttgggaggctgaggcaggaggatcacttggcctcaatgagctatgattgcacctttgccctctagcctggccgacacagtgagactctgtgtctaaaaaataaaaaaatctgaaggcatcagaaagtaccaaggcaatgagaatttgtgagggtaagatctggtagaagggagaagctaagagaggtgagcccaacatttaggaccactcaaggtgattgctgtttacaaaattagcaaggataagaggctgagaaactgaatagggctttcagcagtcttatggggctagaagggcaaaatgtggagagctgctaaggaggagagcccctggtaaacaccccaggctttttattggaaccctgaagaattatatataccctaggagtaggggtgagccaaaaatagactagtattcacaagggctgaaacctaatttttatcatctcgatcctgcttaaagcaatcttcctttagcttaattgcctgtcaaataagaagagtaaatttttggaggaaggtaacgtgttccagagcctcaggttatttctacagttttccatatacaataactgaaactcagtaaaaaataaccagttatgcaaactgacaagatttgactaaacaccaagagggaaaacaaaaaaagacaagagaaacaggcccaggaaatcctgatattgtacttatcagatgtatacgttaacgtcattaaagaagaccttccatgtctgtagtaggagcaaaaaaaagggataaaaagttaaagaaaacccaaatgggccggrtgcggtggctcacacttgtaatcccagttgcttttattttcgctatgaaattttgtaaccatgataaattatattttatatattatgaatttgatgtattgtttaatatatgaaataaattatggatttaagattaatgtagctggctgaaaggaagtgttagttttttatgacctgttgtgaacttcaatatttcaaggttttctaaataataaaaagccctaccaagacttcacacattgaggctggrcacagtggctcacgcctgtaatcctagcactttgggaggctgaggcaggtggatcccttgagctcaggagttcgagaccagcctgggcaacatggcgaaactccatcgctaccaaaaatagaaaaattagccaggcgtgatggtgcatgcctgtggtcctagctacttgggagactgaggtgagaggatcacttgagtctgggaggtagaggttgcagtgagcctagatcacaccactgcactccagcctgggtgacagagtgagacaccatctcaaaaaaaaaagacttcacacattgagaagtccctccaagttggacagctgtacaactaaaaaatcctgaaaattttctaccattaggaagtaggtgaatgggaggagtagatgtgtccaatggacaatgagaattggtttgttctgatamtggaagattaaaagtcaaagaaaaaaaatggcttatagtcttcagttttcttatcaggattattaaattcactaatcttaattcttagtagacatgtgtctctttgaaaatrraagactttttcagaagtaatcaagaaatgtcagagtataattggaggctgtaaatcacacagttcaagctgttaagacattccataagcatagataacgaagtctaagatttgaccaataattgcagtcagttgtttatataaagctaaaccattagaagatttcagtgtgacataatctgttttttaagacaaaacacataacattaagtttatcatcttaaccatttttaagttcagtagtgttaagtatattcacattgttatgcagcagttctctagaactttttcatcttgcaaaacagaaactccatacccrttaaacactaatttcctctcctccctacctcatcccttagcaaccccttttctgctttctgtttctatgactgatgcagaaaaattggaacccacatgcactgtgagtgggaatgtaaaatggtatttttacattatggaaacagtatgaaggttcctcaaaaaaaaaaaaaacagaattaccgtatgatctagcaatcccatttctgagtatatatccaaaagaattcaaagcagaatttaaaaataatcccatgttcattgtagcattattcacaatagacaagaggtggacacaacccaaatgtccactgatgaatgaatagatagaggaaaggtgttatatacatacaatgatgtgtaatgcaggctttaaaaagaaagaaatcctttcatatgctacaacatggatgagccttgaggacattgtgctaagcgaaatagccagccactaattgacaaatattgtatgattctattcatatgaagtatctcacatagaagtggctggccattacaggtgtgagccactgcacctgaccgctagagactatttctgttctgtttttcttcccagctcaggttttgcttgccttccagtatctttcagcatcatgcttttttccaatstaaaccaaaaagaaggaaatgattctgtttacatatgcactgttttcctgggattaccctctgctgctttttccagtctggatggaaattttctcttgaactctgctctacagcttcctgtcctttgaagccttgaaactgttataaaaactaactggcatcagacacaaaagattattcattaacttttctcttcaagacctacagccctttccaagcctgagtctaacatttttaaaggactcatctttttcctttctctttarcaaacattttagaatacatttggagtatggatagtttttaaacaattgctttatatgccatatttagtttaaaagttatttatttatattaatgtaaattgtatttatttttatacttttattttcactagttttgcttctaggcaaaaagcaaaatgctcatggataggaagaatcagtatcgtgaaaatggccatactgcccaaggtaatttatagattcaatgccatcaccatcaagctaccagtgactttcttcacagaattggaaaaaactactttaaagttcatatggaaccaaaaaagagcccgcatcgccaagacaatcctaagccaaaagaacaaagctggaggcatcatgctacctgacttcaaactatactacaaggctacagtaaccaaaacagcatggtactggtaccaaaacagagatatagacccatggaacagaacagagccctcggaaataataccacacatctacaaccatctgatctttgacaaacctgacaaaaacaagcaatggggaaaggattccctatttaataaacggtgctgggaaaactggctagccatatgtagaaagctgaaactggatcccttccttacaccttatacaaaaattaattcaagatggattaaagacttaaatgttagacccaaaaccataaaaaccctagaagaaaacctaggcaataccattcaggacataggcatggtcaaggacttcatgtctaaaacaccaaaagcaatggcaacaaaacscaaaattgacaaatgggatctaattaaactaaagagcttctgcacagcaaaagaaactaccatcagagtgaacaggcaacctacagaatgagagaaaatttttgcaatctacccatctgacaaagggctaatatccagaatctacaaagaactcaaacaaatttacaagataaaaacaaccccatcaaaaagtgggcaaaggatatgaatggacacttctcaaaagaagacatttatgcagccaacagacacatgaaaaaatgctcatcatcactggccatcagagaaatgcaaatcaaaaccacaatgagaaaccatctcacaccagttagaatggcaatcattaaaaagtcaggaaacaacaggtgctgtagaggatgtggagaaacaggaacacttttccactgttggtgggactgtaaactagttcaaccattgtggcagacagtgtggcgattcctcaaggatcaagaactagaaataccatttgacccagccatcctattactgggtatatacccaaaagattataaatcatgctgctataaagacacatgcacacatatgtttattgtggcactattcacagtagcaaagacttggaaccaacccaaatgtccatcaatgatagactggattaagaaaatgtggcacatatacaccatggaatactatgcagccataaaaaaggatgagttcatgtcctttgtagggacatggatgaggctggaaaccatcattctcagcaaactatcacaaggacaaaaaaaccaaacaccacatgttctcacttataggtgggaattgaacaatgagaacatttggacacaggaaggggaacatcacacactggggcctgttgtggggtgcggggagtggggagggatagcattaggagatataccaaatgcaaatgacgagttaatgggtgcagcacaccaacatggcacatgtatacatatgtaacaaacctgcatgttgtgcacatgtaccctagaacttaaagtataataaaaaaaaagaaaaaaaattattttcccgtaggcacattataaatggtggttcaatgtctcaaactcctaagtcttttttaacttgaatcacagtgctatttaatttataagtgacagtagctatatccttgtttttagggcacagggacacatttcccatgatttattctagtattgcatagagaaaagtactgtgcctacagtgtcccagtaatttgtttaactttcaatgctaccagcatagaatcatagactgtatgaactagamgggacttcagagataaaatagttttaactgcttattttatgagggagaaaattgagagccagggaagctattataaatgacatctctttgagtagcatcttctcaccgcacatcagtgaaatttgcatgtttttttcttattttttgttgtataaatttaatgtatacaacatgatgttttcatatacaagtacatatataaatatatagtgatattcaattacatatatacatagtgaaattattataaaattataaaatgtttgtaaaattatatattattatatmatttattattataaaattctaaaattttttgatctttctgcttagaatacctgatcaactccttagtatccgtcaagtttcagttattcagtgagactttgtgtcagctgccctgccccagcatataaactggtcactccaatctttatgttctctccatacattgtataattgtatataacttttatatcacttgttagctactaattgtaagaagtcactagacagctctatacttcagtttggtcatccataaaataataataatartagtactaccttttagtagctactatcatcattaattaattgtgattgtgatttttttttttttttttttttttgagacagagtcttgctttgtctcccaggctggagttcagtggcccagtcttggctcactgcaacctccacctcttgagtttaagtgattctcgtgcctcagcctcccgagtagctggggctatgggtacacaccaccgtgcccarctaattttttgtatttttagtggggactgggtttcgccatgttggcgaggctggtttcaaattccggagcttaagtggtccacccacctcagcctcccaaagtgctagaattacagrcatgagccacagcacccggctgtgattttgatttaaatgcctgacttccccaccactgctctgtgagttcattggctcaccaggggcaagaatattatatattattcatctttataagcattatatgttttttattaaactttttattttgagataattataaatttatatgcaatcctaagaaataatgtaaagagatcccaaatgccctttacctaatttcccccaatgataacaccttcaaactatagtagaatattacaaccaggatattgacattgatatatttaagattcaaaatgtttacatcaccacgagaatccatcccattgttactttatagctatactcatttccatctggtattactctctccatcaacatcctaatccctgccaaccactaatctgttctcctataattttaccatttcaaaaatgtaaatgttacatagatggaatagtataatgtagctttgggggattgtctcttttcactcagcataattctctggagattttaagttgcatggtgctgttgtgtgttatcaattgcatgtttttttattgttgagtagtattccatggtatgaatgtacactacagtttaactgttcacccactgaaggacatctgaatgacttccagtttttagctgaatatgaattatgaataaagctgctttcaasaggtttatgtgttcagttttaattttcctgaatgcccaggagtgcaattgctaagtcatttgttagttgtatgtttagttttttaagacactctgaatctgttttccagttcactgtaccattttacatttccaccaacaacttacaagtgattcggtttttctgcattctcatcagtgtttggtggtgttgctatttttttttattttagccattctgataggtgtgttgtgatatctcattgtggttttaatttgtttttccctagtggcctgttatgttgaacatctttttatttgccatctgtctatcctttttggtgagatgtctcttcatgtcttttgcccatttgctaattgcgttgtttggtttttgggttttgtgtgtgtgtgtgtgtgtgtgtgtgtgttttaagtgttctttgtatattataaatagtgttcctttgtttgataattagtttgcaaatattttctcccagtctgtagcttgtcctttcatcctattaataggttctttaatagagcaagagtttgtaattttgacgaactccagtttacagtatttctttttatgatgctgggcatggtggcccacgcctgtaatcccaacactttgggaggccaaggcatgtggatcacttgaggtcaggagttcgagaccagcctggccaacatggcgaaaccctgtctctactaaaaatacaaaaattagccgggcatggtggcaggcacctgtaattccagctactcaggaggctgaggcaggagaatcacttgaacccgggaggcggagrttgcagtgagctgagatcacactgstgcactgcagcctgggtgacagagcagaactccatctcaaaaaaaaaaaaaatttccttttatggattatgtttttggtgtcaagtctagggactcttagcccttgatcctgaagatttttttctattcttctaaaacttttataactttacatttaatctgtggttcattttgagttcatttttgtgtaaggtgtgaagtttaagtcaaagtttattacttgtattattttttgccgtggacatttagttgtatcatttgttcaaaagactttattttctctccattgtattgcttttgtacctttgtaaaaaatcaggattatagcaaggttgaaggaagcaggtaaatatatgaaagtcaattgctttcctatatgtcagcaatgaacaactggaatttgaaatttaaaataacactatttatattaggacttctccccaccaaaaaaagaaagagaaacatatacrtaactcttaaaaaaaaatgcaagatctggctgggcatggtggctcacgcctgtaatcccagcactttgggaggctgaggcgggcggatcacgaggtcaggatatcgagaccatcctggctaacatggtgaaacctcgtctctattaaaatacaaaaaattagccaggggtggtggcgggcgcctgtagtcccagctactcgggaggctgaggcaggagaatggcatgaactcaggaggcagagcttgcagtgagctgagattgcgcaattgcgcttcagcctgggcaacagcgagactctgtctcaaaaaaaaaaaaaaaaaaaaaaaaccaagatgtatgtgaggaaaagtataaaactctgatgaaagaaatcaaagaagacctaaataaggggaaagatgtttcatgttcgtggataggaagactcaatattatcaagttgtcagtaggcgaatgggtaaataatctgtggtatttccagacaatgagatattttttggtgctaaaaagagctgtcaagccatgagaagacatgcaggaactttgaatgcatattaagtgaaagaaatcagtataaaaaggctacatactgtatgattccaagtatatgacatttgggaaaaggtaaaactttagacagtaaaaaaaagaagaaaaacctagtggttgccagaggtttrtggagtagtagcagggaaaggatgaataagtggagcactagggatatttgaggcagtgaaactattctgtatgatactgtaatagtagatacatggcattatgcatttatcaaactcatagacctatacaacataaaggatggaccctaatattaacaaatgtactttaaaacaaataaatattagctggcacgtttatgtgagtctatttttggattccctgttccattgatttatgtgcctctccctccagtgctacatagttttaattactatatctctgtaacaactcttaaaatagtgggccaggggcggtggcatacacctgtaatcccagcactttgggaggccaaagcgggaggatcgcttgaggccaggagttcaagaccagcctgggcaacataatgagaccctgtctctacaaaaattaaacaaacaaaaaactagctgggcatggtgtgtgcctgtggtcacagctatttgggaggctggaggtgggaggattgcttgagcccagggagttgaggctgcagtgagctgtgatgacagactaagacagtgtcaaagaaagaaagagagagaaagaaagagtgtagactgtttctttctaccttattcttctttttccgtatttaagtgcctttgactttccatataaattttagaataatcttgtctatgttgtctatgtctgcaaaaaaatctttccagaattttgatgggaattacattaatggcatttagaaagaattgacatttttactatattgagtcttctaatccatgaacatggaatgtctcttcatttatttagatctatgttttctttcaccagtagtattttatagtttccagcataaaagttctgtatatgttttgttagatttwtattatactccctcgtcttttcttcttttttcagtgactctaaatagtattaagtttttagtttgggtttctatatgttcattactagtatatagaaatacagtttatttttcatatgttcatcttatgtcatgtgacctgactgaactcactgattcaccactgctttgtacagtaagagtggkgagggctcaagcctgtaatcctagcacttyaggaggctgaggcggaaggatggcttgaggccaagagtttgagaccagcctgggcaacaaagcaagaccccatctctaaaaaaaaaatttttttttttaaattagcctggcatcgtggtgtgcacctgtaggcccagctacccaggaggatcccttaaacctgggagatcaagtatgcagtgaactatgatggcagcatggcactccagcctaggtgacagaatgagaccctgtctcttttaaaaaaaaaaaaaaagtgagagcagaatcttgccttgttccctatcttagcgtaaagcatttaatctttcaccattaagtatgttagctgtaggttttttgtagatgctctgtatcaaattgaggaatttaatgtgtattaaattttgtccaaatacttttcctgtgtcaactgatatgattatatgattattgggtgatttttttttagcctgttaatatgatggagcgcattagttgatttycaaatattatatcagctttgcagccctggactgaattctacttggtcatggtgtactattctttttatatatcrttgacttctgagtgctcatgttttgttaaggatttttgtctcatatttatgagggatatttgtccttagttttcttacttgatactgtctttggttttggtatcagggtaaaggtagtttaataaagtgatttggcagctggtcacagtgtcttgtgcctgtaatcccagctactcgggagaacgaggtggtagcattgcttgagcccaggagttccaggccatagtgagctgtgatcgtgctactgcactccaggatagttgacagagtgagaccccatctcttaaaacaagttgttgttgtttttctaataaaatgatttggggagtgttctcttctcttacatttctataagcaattatgtagaattgatataaattyattttttttttcctttttgtggagaacagagtctcactatgttgtccaggtaggtgttgaactcctgagctcaagctatcctcctgcttctgcctctctaagtgctgggattacaggtgtgagccactgtgcccagcattgattcatttttgaacatttggtaggattctccagtaaaataatttgggcacaaggatttcccttgggagttttgagattatggattcaattttcttgatagtgttagggctgtttcagttaatctgtttcttactggatgagttttggtagtttgtgctttctaaggaattggttttttttcttttcatctgtgtccttaaatgtgtgtgcgtagagttgttcatagtatttacttattattcttttgaagtctgcagggctggtagtaatattccttgtttcattcctcatgttggtattgtgtcttctcttttttcctttgtcattcttgctgaaggtttatcaattttatttattttttcagtgaaccagatttttgtttcattgattttttttttttcagtttcatggatttcttctctttacctttattacttcctcctttctgcttggtttatttcaattttcctagatttttcaggtggaacttatgttaatttgagatttttttttcctttaaaattttttttaaatttaattaattatttttgagacaaggtctcgctctgtcacccaagctggagtgcagcggtgcaatcaaggctcactgtaacctcaagctcctgggttcaagcaatcctcccacctcagtcttcagagtagctaggggtgcaagctcttgccaccatgcccagctaatttttaaaatttttttgtagagataagatattgctatgctgcccaagctgatctcaaactcctggcctcaagcgattctcctgccttggcctcccaaaatgctgggattataggcatgagccattgtgccggccttcctttttttttttttttgtgaaacggagttttgcttttgttagccaggctggagtgcaatgacgcratctcggctccgcctcccaggattaagagattctcctgcctcagcctcccgagtagctgggattacaggcgcttgccaccatgcccggctaatttttgtatttttagtagagacagggtttcaccatgttagccagggtggtctcaaactcctgacctcgtgattccccctgcgttggcctcccaaattgctgggattataggcgtggccttttgtttttttttgttttttttgatgtaaagcagttcctgctataaatttccctctcagcattgctctacctgcattccacaaatttttgtctgttatattttcatttttattcagtttaatatatattcttcattttccttgagacttctttgacccctggattatttagaagtatgttgtttaatttccaagtgttgggtgattttcctgttacctttctgttattgacttctagtttgattgtttaaaaaaatatggtcagataacacactctgtattattttcattcttttaaattcattgaaatttgcctcattacctggaaatggtctattttggcatatgtttcacaagtatgtgaaaaacaatgtttattctgctttgctggaggagatgttttataaatatcgattgaattctcttggttgatggcattgttgagttcttctatatatttattccttgttgattttctgtatagttgttctgtcagttgctgagagaggtattaactgtattgtggatttgtctgtatcttttttcaggtcagtcagattttgcttcacatgttttgcagcatgttggttcatacaaatttaggattgctgtgtcttctgggttaattgactctatcattatgtaatgtccctcactttctgataattttatttgctctaaagtccctctggtaatataactactactttcttttgattaatgttttcatgatacatctttttcctttcttttacaatcttacctgtattgttatatttgaagtgagctccttctagacaggatatacttgggtcatgtttttaaaatatctgctctaccaatctcttgtcttttagttggtatatttagaccattttcatttaatgtatgttttgacatgtctttcattttattttttgttttctgtttattgctgatttctgtttctgttttcttttgcctttctttttctgtgggttgttacttgaacattttttagaattcgattttgatctatctatagcatttgtagtgtatctctttttacagtttttatataatagctattctaggttttatgttctgtatacataatttaatcatagtatactgatgttgatattttaccacttcaagtgaagtatagaaaccttacttttctttatatctctttactttctccatttataattggcttaaatattttctctacatacatttagaagcagatcagacartgttataatttttttttccaagtgtcaaatacaatttagaaaactcaattggagaaggaaaacctatttaatttactcatatttttgtttactgccttttttcttcttggtgttttgagatatcttcttttatcatttcccctctgtttgggaaacttcctttagctactgttttagggtagacagcagatttgttttaatgtcttgattttgccttcatttctgaagggtttttgtttttgtttttgctggagatagaatttggggtttatagttgttttctttcaacacttgaaaaaactgtgttatttcttctggcctgcctggtttctgatgagaaatctgctaccatttgaattgttttctcctgtaggtgttatttctcttgctgcttttaaggtctggggttttgtttacttgtttggttttcttgtctttagttttcagaagtttaactatgatgtatcttgacgtggatttctttgggtataatcctctttggggtttattcagcttcttgaatctgtagctttatgtcttttgccaaatttggggagttttcagacattatttcaagtattttttcagctctgccctcttttttctgcttctgggattccagtgagattagatcttttgttgtagtctgacaggtccctgagactctggtgtggttttctgttttgttttgttttagtctattctctgtttttcagattaggtaatttctgttattctgtcttcaagtttaccgatttctctgtttcgtccatctgctgctgagtccatacatttttttatttcagttattgtattcttctgttttaaaatttccactttgttcttctttgtatcttctgtttctctgctgagagattctattttttcatttctttcacatacagttgtcattgctcattgaaatgtttttataatggatactttaaaatctttgtgacaaaattctatatccctgtcactttggtgttgatatctacttattgtctttttttattcaagttgagattttctttgttcttggtgtatcgagtgattttaaacctggacatttggggcattatattataagactctggattttatttaaacttccgttttagctggtttcctctgatactcttgtggcagaggtaggaagggagcagcctcattattgctaggtggaggtagaagtcctggttctccactcaggcccctccatgcttagagaattaggaatccttcattactgttccttgcatggcctctactgacaccagaggtggaagggtgktggcctcgttaccactgggtagtgaaagtcctgattttccactgggcttcatctgacaccactgcagcagggagaggaggacatagggggcaccttgttatagcctgacagatayagaaggctccccactcagccttggtgggggtttggtttcagtgttctctgtgctgtttgtctggagtagaactgttattgtctaaaagtgcctttgtcttcctaggctgccctttagttagagagagcaggcttttttgttggggttggattttttgtgtttttctgtgttttttggtctgcatctgttggcatttcttggttgcaggcttmttcacacctccaactctgagatatatgaaacaaaaagaaaacccagggaaatcctcactgtgtcattccttgggtcctgaagttcctaaccagtctgccttctgccctccacctttcagagtctttttatgtttgttttgtatataatgtccagggtttgttggatgtattcatgggaagaataggaaaaaatatatctactccatcttcccagaagaagttactaatggctgttatataagttttaactgtcattacttgtcattgagtgtttactatatgtttagcactagtctgagtgttttgcatacatttgtttatttaatccttgcaatgacatgaaatgcagattattatcaccattttacatatgaagaagctgtggtactgaaaggtcaagcagctttctcaagacatatagctgttgagtgacagagtcagcctttgaacccaggtctgattccagagccagttttctttaacacttgataatactgtttctctgggtattagcctcaatatactgatattatttaaaactattaaataagttaatgagtaagacagaatgtaattaattgtgtactatagataataggtgccaaacaggttagcagagtgagaaatcagtataatttgagatcatcaaggaagatatttggagttcatgagatttgaactgtttaagagagattaatggaatttggatagacagagaaagacaaggattaggaaaaggaagcatcaagaatgattcttggtcaggtgtggtggctcatgcctctaatcccagcactttaagaggctgaggtgaggggatcacttgagccccgtcatttagaccagactgggcaacatagtgagaccctgtctctacaaaggaaaaattagctgggtgtggtgacacatacccatagtcctagctacttgagaggctgaggcagaagtgagcccagaaattcagggccacagtgagctatgattgtgccactgcactccagcctaggcaacagcaagaccctgtctcaaaaaaaaaaaaaaaaagaagaagaaaaaaaaagattcctatctataaatgagtggataaagaaagaggtttggggtgaagaagaatcaagttttatacacattaagtctaagtccctgcggaaaatccaagtgataatgaagttggttacatgggtttggactagacttgtggtcattgatgccatgggatcatgagagaggataaaaggagacagcgatttaagacagaatcctgaggaacattaaagtgataggcagaggaataagagcctacagagaggactgttgagtagaagccaatgaataaggaaaactgactactgtatgagaaaaaataatccaaagagttgaattaagacgaaaggtgggccgggtgctgtggctcacgcctgtaatccgaacactttgggaggctgagacgagcagatcacgaggtcaggagatcgagaccatcctggctaacatggtgaaaccctgtctctactaaaaaaatacaaaaaattaactgggcaaggtggcgggcgcctgtagtcccagctactcgggaggctaaggcaggagaatggcgtgaacccgggcggtggagcttgcagtgagccgagatcgcgccaccacactccagcctggggacagagcgagactccgtctcaaaaaaaaaaaagatgaaaagtgataggatccagagcagaggtggaagaattacccttaactaggagcgaaacatctattttgacaagaagaaaagtgaaaggagggctggggatgaagaatagtgtataggtttagaagctttgggggaggttggaagttcgagagtagtggagaatgaaatagcccctgtgggctgggcatggcgactcacacttacaatcccagcactttgagaggccaaggcaggaggatcacttgagcccaggagttcgacaccagcctgggcaacatagggagacccccatgtctacaaaaaaaaaaagaaagaaaaactagccaggcatggtagcatgtacctgtggtcccagctactcaggaaggatgctgaggcaggaggactgcttgagcccaggaggtcaaggctgcactgagccatggtcacaccattgcactctccagcctgggcaacagagcaataccttgaaagaagaagtagcccctgtggagtaagatagagaactgaatatggaaaccattggaatgatatgagaaattgagagtgtgtttgaggttgatagctataattaatgtattagtgtcaatttgcagtgttgtgtggtttttgttgttgttgttgttttttcgccctgtcacccaggctggagtgtggtggyggctcactgcgacctccccctccggggttcaagtgattctcctgcctcagcctctcgagtagctgagactacaagcatgtgccaccacgcccagttaatttttgtagttttagtagagatggggtttcaccatgttggccaggctagtctagaatgcctgacctcaagtgatccacccacctcggcctcccatagtgctgggattacaggtgtgagcagttgcgcctggcttgtatgggttttgatagcaatgttcagcaactgtggttgaatttagaaagaacaggcaattgggttcatctagacttagggttttgccattgggtaaaatgaaaggatggttgtgcaaagtagaactgaagtgagtaaaagagagtggatgtgataaagataattttgtcggtagaacaatgggaaattactgttggcttctgatttctctgggaggtgtaagatgagatcatcagaagagatgtgaaaatgagaagttttgggattgtaagtcattactaccagactgtgctaggtttggagatacaaaggtaaatgataatcataagacaaaactcctactgttgggtaacttatagttagtgtgacaaaatttaagacagctrctgacgatgagtgaaagaaagtcagagtttctcagagaaactgagattggaaaccatgaatttgtaacagcatacattgacaagtttgtaatatttctttagcatgcttctaaggcctgaggaaacttaactagttgaccrtccttaccccgcaagataatagcacttgaaataaggctgcatagtcatcttaggtatctttaaagaaggaatttttgaaattgaattttaatgctcagaaaagagtaaagtgcagtgtctgaagggatgggcccgagtatttccgagcttaaatacagtagcataaagggtggattttataattatttcacagagacttctatgatacaatgaccttttactgcagtgtgaggaaggtctggaataagaacaagggggttgggatgctgatgagaaactagagtgaggtaagcaggactataaacttggggaaaagaatgggtggaaaaaaatggtcttaagcccagattaagattttctcaaatcatggtaagtgctagagaatcatgtcatttccctgtttaaaattcttgggtgggtttctgttgaacctgttggctgcttttcttccagtttcagttaaaatgtcatctctttaggccattcttaaccataccatctaaaatggtcactctgttctccttccctgtctacacccctgaatatacatgacattttaattcttttattgtactaacataggaagaagttattttgtctactcatttattgcctgctcctctctattataagctccatgaggacagggccctgtttctcttatttactactgtgttttcagtacctaaaacagtgtctagtacatagtagtgctcaataaatattggataagtgattaattcgtccaataaaataattttttcttttcttttcttttcttttytttttttttttttgagacaggttctctgtcacccaggctggagtgcagtggcttcatctcagctcactgcaacctccacctcccaggctcaggtgatcctaccacctcagcctccagagtagctgggactacaggcatgcaccagcacacttggctaattttttgtattttttgtagagatggggtttcaccatgttgcccaggctgatctcaaactcctggactcacacctctgcctgcctcggtatcccgaagtactgggattataggcctgggccacctcgccccaccaaaaatcaataaaattttccctgagtttatttttcttagtactcaggaaattagtatcaaaataagtgattaaattaaagtattcctcacttttgtggctctctgcatcatctaaaaattactgttacatttagcaatgtgatagacatttaaatactttctcactttgcttattgtttttgaggagaaaaataatcatcttggacyacagtttatttcttaatgattgtctggcaatgcgtgtggagttagttgtactttaaagcatttaagtacaaatcttcaaatgtgagtatcatgatagggatattgatttaaagtggtagttatagatttacaacaagaattttttttttcaaggcagggtcttgctctgttgcccaggctggagtgcagtggcatgatctcggctccctgcaagctctgcctgcctgcaagctctgcctctctgcaagctctgcctcccaggttcaagtgattctcacacctccaccttccacatgaacaactaccaaaaccactatatgacctattttcagatgcaaccctcaaataatctggacctgaatgattgacacctgctttttcatacaaactgatatagattgacttgccattctcttttattaaagctactgaatattttctgccatctttgctgaatttaaacaaggccacttaagttacagtaaccagtctctgtaccactttatgctcatacaacccaaccctattggtttaaactagtgtaggagatgattgaggatgacctccttgttacttttttttgaaacaaggtctctctctgttaaccaggctagagtgcagtggcataatatggctcactgcagcctcaatctcccaggctcaagccatcctcccacctcatctcccaggtagctgggactacaagtatgtactatcatgcctggctaatttttttatttttagtagacagggtttcactatgttgccagggctggtctcaaactcctaggctcaagcagtcctcccactttggcctcccaacgttctgggattataggtgtgagccactgtgaccggcctccctgttattttatgaagtgaatttaactgggcaaccatgtaaccagggagagttatataggatttgatttctctattctgaatgatctgataatgatcctctatctagagttgaaggagtttctcaaccagtgactggatacaaacactcttgctacattttcatcttcagttgttgctctgccttcaccctaacactccactgttttataccttgctccttctgattcgggtcttggttgtgagggttagttatcaagcttataaaaattccttttttctgtcttttgagcttcctttcaccctcatacaaataggctgccttctgtgtaggttcctgctgtggatcccaactattgcataataaaatgacttgaccttgaattcttcaaagtttaaaatgttttgactacgtgtgttacctttggcttattgtaaacagcctaccctaaatatagttacttaaagttcttttgtgttttttatctgtgttcttcctctcttatccaagatgggtatggacaggggtgaggagcaaatgtaacatagtgtcctgaatttctaacctatcctttggaattctttatgttgccaatcggtatatccttgctgaccatactgaataatatcatcctttaaaaaaaaacaaaagtcctagacagtaaactggaaggtagtcaaataatttttttaattcctcaaggtaattgcttatcattttcggaggttatactgtttggccattggtttttcctgccataccttactgccttcagttgttctctggcctcataggagggctttcttctgcagtttaacattactaaaaagaagctgtgtaaatagagcaggaagtggtttggttttgtttttttaatcacagtctgctatctatacttccagcttcagactctacttgtgttattaatgaagcatttgctagtaaggaggagaaaagagaatgtacttgtgttattaatgaagcatttgctagaaggaggagaaaagagattgctcatgaagcattcctcaggatgaaaaaactgacaaccgtatcgatagctcaggtgctgattaaaatctcctatattctcyagggagaaaagtctggggaattgcaaccagtkccttatttccaattttataagttatgaaagcaatgaaactcattgctgtaatatacggcattttgttgaacagagtgatacaggattgattaatgtttggctacaaaaagaaaagatatagagccctctccccctccccctccctctctgtctcgctgtccctctctccatggtctccctctgatgcccagccgaggctggactgtactgccgccatctcggctcactgcaacctccctgcctgattctcctgcctcagcctgcgagtgcctgggattgcgggcgcgcgccaccacgcctgactggtttttgctggagtgcagtggcgtgatctcggctcgctacaacctccacctcccagccgcctgccttggcctcccaaagtgccaagattgcagcctctgcccggccgccaccccgtctgggaagtgaggagtgtctctgcctggccgcccatcgtctgggatgtgaggagcccctctgcctggccgcccagcctgggaagtgaggagcgcctcttcccagccgccatcccgtctgggaagtgacgagcgtctctgcctggccgcccatcgtctgggatgtgaggagcccctctgcctggccgaccagcctgggaagtgaggagcgcctcttcccggccgccatcccgtctgggaagtgacgagcgtctctgcccggccgcccatcgtctgagatgtggggagcgcctctgccccgcgccccgtctgggatgtgaggagcgcctctgcccggccgcgaccccgtctgggaactgaggagtgtctctgcccgaccgccaccccgtctggaaggtgaggagcgtctctgcccggccgccccgtctgagaagtgaggagcccctccgcccagcagccgcccagtctgggaagtgaggagcccctccgcccggcagccaccccgtctgggaaatgaggagcgtctccacccggccagccgccccatccaggagggaggtggggggcagcccccgcccccgcccggcagccacctcgcccgggaggtggggggcacctctgcctggctgccccrtctgggaagtgaggagcccctctgcccggcggccaccccgtctgggaggtgtacccaacagctcactgggaaccggccatgatgacgatggcggttttgttgaatagaaaagggggaaatgtggggaaaagaaagagaaatcrgattgttactgtgtctgtgtggaaagaggtggacatgggagactccattttgttctgtactgagagaaattcttctgccttgggatgctgttgatctatgaccttaccccyaaccccgtgctctctgaaacatgtgctgtgtccactaagggttaaatggattaagggcagtgcaagatgtgctttgttaaacagatgcttgaaggcagcatgctcattaagagtcatcaccactccctaatctcaagtaccaagggacacaaacactgcggaaggccgcagggtcctctgcctaggaaaaccagagacccttgttcacatgtttatctgctgaccttccctccactattgtcctatgaccctgccaaatccctctccgagaaacacccaagaatgatcaataaatactaaaaaaaaaaaaaaaagatacagagtacaaacatgctgtgtgcaagacttgaccagctgtcatttgaaaaagcagaactatatattattttttctatcaattattgaaaaaggaagtattgaagtctccactaaaatagcgaatttacccgtgtcttctttaattctgttagtttttgcttcatgtattttgaagctctgttattaaatacatgtgcatttatgataattattttcttcctattgatcctttttatcattataaaatgtccttcatctctggtatacattccttgtcttacaatttattttattttatattaatataaccatactagcttctttacaattatattgagacagtagacataagcccactttgtaccaggcaaactagttactctccttataatgcttgtggtgcttttttcccccatgaatgatcttctccccaaccttccatgccgaaggatagttatttaggttgatttcttccatgaagctgacatcacatgatcccctgaactttcttgattttggacttgcacattatatttaaggattgtgtttaattatgtattgtcactgctcaaatttagcacattgttcaaaagatgttgtttgattgtttgcttgaatggttggccaagtgaatgaacagatagtttctaaaatcattttgggagaacttataaactacatatgtggaaggtgaggaaaagtagaagttgtagaacattagactaagcaaggttcaacattaagtgatcaggatggtttctttaacagattctgggaaatcaggaggagcataatttttaggagaaagatgatgagttcagtttgggacaaattgagtttgaagtgacttcttgaggggatgtccagcaggcagttggaaatataggtctggtgcctagatttttggagttattcttttgggtattaccagcaaaaagcaatcattgacatattttaagctatcttaattcttaccatcattttatcttctgtagataatcatgacagcctcctaactaatctttctgcttctgttccagtttctctctttcaatccattctccacacttctaaaagaatgatctttctaaaacatagatctgatcatgacatttccttatttaaaataaccttttagcctggtgcattggcatgtacctgcagtcccagttacttaggaggctgaggtgggaggattgcttgagcccaggagtttgaggccagcctaggcaacacagcaagaccctgtctctaaaaaataaataaataaaatttaaatggctcttccttgtcttcagaatgaaaattctttacctgtttcctttataatctcatccctccctacctcttcaatatcatctctgccattctcttttttataatctaaccttcagccatataggaccatttataattccatgtataaaccacattacagtgctggtgatagaggtgggtgttgatactactaatcatagcaatattttttcaacaagtgttagaattgtgcccgtcattactctaagcagtttatatgtaataaaaaatagctaacacttaacacctatcatgtagcagcactttttaagagctttacagttttccacatctacgagggttgtcttcttagaatcaattaagcattcagactcgcaagcctataataggccacacttgacatcagtctactcaaaagtacataggacaggagccaaagcttgctagcaagacattcattttcagtgagaccttgtagcacttcatagaactgtctacacagttgtccatgagctactctttgccttcgtttccctgggtgatgctctggtacaaaggaatgagatccacattggatagatttatgagttgtcctgtgtataaatcctcacattccccaggagctagtatctcttgtagcaattccataggcatagtagtcagagtccccttaagggtcatgctaaattacaagagttactacacttagggaagcccacagatttggcttccaactaggtatttataagtcttccagttcttaccaatcaggagtcatttttaatcataaagttgttcaggaacatagccgacattttacctttatcagattttcaggggaacatagttagaaattgaatcaaaagtcaaaatctcatataaaacagtttccctttacctacatacatattaactcattgatttctcactacaatgaaataaagtagttactattattattccattttacagataagtatacttatttgtacttcaggtacagacaagttatgtaacctgctgaagatcacaaaactaattataaagatggcagaacatgatgaatctcaaaataactatgctgggtaaaagaagcataacwacatactgtgtggcttcatttatgtaaaattctgagaaatgaaaattaatgtatagtgacagatcagttgttgtctggaatggggaacagggagccagggccatgaagatagatttgggggtgatagataggttcactgtcttgtttgtgaagatagtttcgtgagtgcatacatgtgtcaaaacttaacaaattgtaccctttaaatatgtgcaattatggtgtgtcaattataccttaataaatcagctttaaaaaaatcctgtaatatgaacccaggcagtatgactccagcatgtgcaatttcaatcattatgttaggcagaatactagttctccaaagatgtcagcatacaagccatcagaacctatgaatatgttgtattacatggcaagagggaattaaggttgcagggagaataaatttactaattagctgactttgatacagagatatttacccggattatctgggcaggcccaatgcaaccacatacatccttataagtgaaagaggaaagcagtgaaagagattcaatgtcagattgatacagcgtaagatacagccattgctggcattgaaggtggaggaaggggctatgagccaaggaatacaggcaacctccagaagctggaaaggcaaggaaacagattttcccctagagcctccagaaggaatgcagccctgccaacactttgattttagcccattgagacccattttggacttctgacttccagaactgtaaaataatacatttgtgttattttaatccaccaaatttgtggtaatttgttacagcagcgataggaaactaatacactcagtgtattccgttgcatcacatactgtactatatttcttgttgccaggccttcccactgctgttttgtttctatgtataacagtctgcctcctttacccacttctggagaamctttcctggccccctcttcagtctggattagttggttcacctttgtgtttttaacttactctgtagccattctcatattgcatgtcaaataatgcagatcttagcacctatctgcctccttcctactcacatttcaaggtttaactcaaatgtcgcttctgcctggaagtttttcctgagccccctagacttggacaagtgttcctgctttgttctaccacttgctgagttttgctataacatttacttcctcaattataaatgtttacttgtctgtctctcccactagacaacattccttctcatcttagtatcctgtatacccagcttaaagggtactgtactgtaagggcttaaatgtttgatgaatgagtaaatgaatcaatcagtcagtcaccaratcgatatcttgggattgctgttggaatattacattcatcctgagcttaaaagtcaatgtttttctccatcagggtacagaaattaagataaagagctctctgtggccaccataaaaaatatgagtcctaacttgctgatcagagatttatccctttcagcattcattctctcaaatgattattaaattttagcactatttccgtagagacttgcttggttatttttctttttcttgtcgattttgcatgagaaaatgctttacctggcataatattttggcacagggaataggattctactgtgtggtccaagacttttgagcgaaagaaacttacttggctcttgatctacatgaattctttagatttttatctttcagctgccttgaaggtaagagtattttcattcaccctccaggactctgcatattcatttctgcaaaaacatcccagagctctcttcttcaccagcattcttagtcttgaaagcctcttcatgaactatagatgaactcttgaatctagacctgaattagatgggagaaggcttcctctagactttttgtttatcctacagactcccccagtgagtttgatttttataactcacagaagaaggcttttctttttcttgatgtctgtatactttctgagctatagtctgctttaattctgagaacagaccagggtaaattgagcttcagctcagaatatgactgttttataaacraatttaaacattgtttaaatacaagggcaggtgtggtggctcacatctataatcccagcactttgggaggccaaggtgggaggattgtttgagcccagaagttcaagaccagcctgggcaacatagtgatatcccatctctgccaaaaaaaattaaaaattagccaggtgtggtggtgtgcatctgtggtcccagcttgctgggaggctgaggcgggaggatcgcttgagcttgggagattgagagtgcagtgagctgtcttcatgccactgcactctagcctgtgtaacacagcgagaccttgcctaaaaaaaaaggaaaaatatagtacatagagcgtgagaattcataaatacacaattgacagtttaggtattcaaaagatgttcagggaatctttctgaagaagtagtatatgtgaggaataacattcttttttttttttttcatacgaagtctagctctgtcgcccaggatggattgcagtggctcgatcttggctcaccgcaacctctgcctcccaggttcaagtgattcttctgcctcagcctcccgagtagctgggactacaggcgcgygccaccatgcccagcaaattttttgtatttttggtagagacagggtttcaccatgttgggcgggctggtcttgaactcctgacctcgtgatctgcccacctcagcctcccaaagtgctgtgattacaggcgtgagccaccgcgtctagccaggaataaccttctttttagcaattttgttccctgcctttgggttagagcagcaaaggagttaaaagctatataagaacacaaggagatgctggccaattaatggggttgtacagtaatataattttgattcactagagttgctgacactagaggtttttcctatgaagaactgttccttaaatcccatgggtgatgtgaatgtatatacaaccctgaataaagacttaatgagaatgaatatcttctgccttggtgtttatatggaatcaggttactgtagaatgtggaaaaatggttttgctccagttcctaaacaaaatgataagcattgtcctaactgaatttgttttgacattcttgctgccccatacaggtcaagttgcaagatggaacaaaagactagagctagagggtgatatacggccttgaccaaaatgctgtaaatgtttggaatggcattcttactaggatatgaaatctttaaataaarcatgtaatgggaaatatgcattcatctccatattaaaaaggccatgttggaaataaaatatcatggagtttttaaaagatgaggattaagatcacctgaaaattagtcttttgattactatgagaatttgattatagtttttatgatatttatgcataggcatttttcrttagattatttgaggtttgactctgcttgaaatgagttttttaagtatttgaataaaggagctagctggaattataggcagaacattaacataataatattttttgaatgcttacagtatgccagacactattataagatcattatatgtaatatatattatatataaaacacatttaaatataatttcagtatattctgatgacttgattcagtgcacagaatataactcacagaagaaggcttctcagtctcaagagaagtagccaggaaatctctttcctcctggaaaagggtatgactaattttttaatactttaaaataaatctgaaaactatttcgaaggctctcaaaaataaaccattgatcatgcaatactgtggttggtcaaaaatagctacctatgtcctcttccttttgaaagaagtttattgtttactttttattcttcccctcccccactgtcctcccaacattgatataatggaacagaataatttctaaaatcagtttacaattatatgttgcccttttctctgtttgaatcaataagtcaggtggtagacattagcctctaactaccattttggcaacatatgtaccttgtatgtgtgcacattatttctccaaagaaatgcttgaggagggtgatttatttttcccaatctatgttcaaatctgtgagctgaaaaggaggcatctggactcagcacagtggctcacacatgtaattaatcccaaccctttgggaggccgaggcaggaggatcccttgagttcaggagttcaaggccagcctggacaatatagtgagatcccatctctacaaaaaataaaacattagctggacatggtaatgcatgcctgtggtcccagctacttgggaggctaagatgggaggatcgcttaagccaagccagggagatcaaggctgcagtaagctgtgattgtgctactgcactccagcgtaggtgacatagcaagaccctgtctcaaaaaaataagaaaagaaaagaaagaaagaaaaggaggcatctgatctgcagttctgaatagaatggttatccaccatgatgtgaggtaagttgttctgtaagtcttgtgtgccacagagttgttgggggaaaattaaatcactatttttttttttttttttttttttgagacagagtctcactctgtcgcccaggctggagtgcagtggtgtgatctcggctcactgcaagctccgcctcccgggttcacgccattctcctgtctcagcctcctgagtagctgggacaacaggtgcccaccaccaggcccggctaatttttttgtattttttttagtagagacaggatttcactgtgttagccaggatggtctcaatcacctgacctcatgatccacccgcctcagcctcccaaagtactgggattacagrtgtgagccaccacgcccagcctaaatcactatttttaaagtaattgttttatgcatgttagattttttaatgaattttccagacaaatgcctctcattttaccttttttatacacgaaatgtttccaaaataacgaaaataacatctcagtcttttttttttagtatttattgatcattcttgggtgtttctcagagagggggatgtggcagggtcataggataatagggagagaaggtcagcagataaacacgagaacaaaggtctctggttttcctaggcagaggttcctgtggccttcggccctgtttgtgtccctgggtacttgagattagggagtggtgatgactcttaacgagtatgctgtcttcaagtatctgtttaacaaagcacatcttgcaccacccttaatctatttaaccctgagttgacacgcacatgtttcagagagcagggggttgggggtaaggttatagattaacagcatcccaaggcagaagaatttttcttagtacagaacaaaatggagtctcctatgtctacttctttctacacagacacagtaacaatctgatctctctttcttttccccacatttcccccttttcttttcgacaaaaccgccatagtcatcatggcccattcttgatggtcgctgtctctttggagctgttggatacacttcccagatggggcagcctggcggaggcgctcctcacttcccagacggggcggccgggcagaggcgcgcctcacttcccagacggggcrgccgggcagaggcacctcacttcccagacagggtggcagctgggcagaggcgctcctcacatcccagatgatgggcggccgggcagaggcgctccccacctcccagagtaagagcggccgggcagaggcgccccccacttcccagacagggcggccgggcagaggcgctcctcatatcccagatggggcggccgggcagaggcgctcctcacttcccagatggggtggccgggcagaggcgctccccacatcccagacggggcagccgggcagaggcgctccccacctcccagacgatgggcggccaggcagaggcgctccccacctcccagagggggcggggcagaggtgctcctcacctcccagacagggcggccgggcagagacgcccctcacctcccagagggggcggccgggcagaggcgcccacttccccgacggggcggccgggcagagacgcccctcacctcccagacggggcagccggacagaggcgctcctcacctcccagacggggcggccgtgcagaggcgctcctcacctcccagacggggcggccgggcagaggcgctcctcacctcccagacggggcggcygggcagaggcgctcctcacttcccattcggggcaaccgggcagaggcgctcctcacttcccatttggggcaactgggcagaggcgctcctcacttcctcccagacggggcggccgggcagaggtgctcctcacttctcagatggggcggccaggcagaggtgctcctcacatcccagacggggcggccgggcagaggctctcctcacatcccagacaatgggcagccaggcagagacactcctcacttcctagatggggtggcggcggggcagaggtgctcctcacttccccgacgggggcagccaggcagaggcactcctcacttcccattcggggcagctgggcagaggtgctcctcacttcctcccagacagggcggccgggcagaggcgctcctcacttcccagagggggcggccaggcagaggcactcctcacttcccattcggggcagccgggcagaggcgctcctcacttcatcccagacggggcggccaggcagaggcgctcctcacttcccattcggggcggccgggcagaggcgctcctcacttcccagacggggcggcygggcagaggcacacctcacatcccagacgatgggcggccgggcagagacgctgctcacttcctagacggggtggcaggcaggcagaggctgtaatcttagcactttgggaggccaaggcaggcggctgggaggtggaggttgtagcgagccgagatcatgccactgcactccagcctgggcaacattgagcatgagtgagcgagactccgtctgcaatcccagcacctcgggaggctgaggcggggagatcacccgaggccaggagctggagaccagcctggtcaacacggtgaaaccccgtctccaccaaaaatacaaaaaccagtcaggagtggcggcgcgtgcctggcatcccaggcactcggcaggccaaggcaggagaatcaccggagcccaaggcagggaggttgcggcgagccgaagatctcagtcttttaaaatacacatctaatttccttgtaggggcacaagtgaaagaacactagaaaactaggtaaatgcaaggttatcgctgtaagtgaatacctgggcttcggaagcctcattgttcttgaactgtggtttctggtacagatggagaacagagaccactggctgctgaagctggtgctgaggggggccaatggctgttcttcggaggttaatacagggaaaaccacttgatttgccagaggagtctgggaggggagcagatggccgcaagaagggccctctagcttactcagctgctctgagaagcttagggtgacctctataatacaaacaaaccaagtagttctcagggtaatggggcagcatcatttgtattcccaaataacaatactgctcctcactttgcaatctctcgcaccctcacccagtgtttgggcaccatctgcttcttgtgaacttatataggccccaggcgtggccagttgggattgctattgaatgatatctttgggaaatgtgttctttacaaattactttcacatgagtctgataggcagctaagtagtattatgtctatttgcataattaagaaactgaggcaaagaggaattgaggggtactagaattacaactcaagcattctgattcctaatctgtttgtatcgatagtatatggagccattccagtgctcttgtttaggcagttgttacccagcttttgagaaaggctttctggaaaggaaattagttattttatagatgtcactctcattgttttaattgttctggttactgttttgctaagtgacaaaaaggagagaaagagtggctgctttacttctgctggtatactgctgtggccttccgggagacaggaattaagtgagaaggtctaatttatactatgcagtttcatcaaaaccaaatttattcaagaggaagctttctcagtcaaagaagttacttagtttatatatttgcatatcctttttaactgactataagaaaaaatattcttttcataaaccacatctcttcttttccctgctattggctgaaatgataatcattttcatgcattaacacctgcctaggggcctggtgaatcaaaagagcaatgagaaaagtggttttaattgcccaagctttactagagcctttcttgcactcagaaaaacaaaaggctttgaatggtgtcaaagggctgcactgagaagtgctttcctttagaactctaagcagatgattcactcatgtcctgatacattttcttgtacagatgagttcatgagcccaccttcattccaactatgagagcatcacagcacttgtmagtttcagttaccttgaacatttgcccaggaaaacaggcaaatgtcagagtttactgacttgttattagtgcaggactctctgtctttgtagaattacacttgctaattacctttacaaagttttgtatacaaatttaaacttcagagtcatatttaatatattgtagtccttaagaatataggctctggagccagactacctgtgttcagatcccaactttacattttacaggttgtgtgatcttagacaagttcttctatctctcttatcctagttttcttatcggaaacagggaaataacaacagaatctactttgtagggttgctttgagcatttaattagttaattagttaatacatgggaagcacttagaatactatctgtcatgtagtaagtatatccagtaaatgttggctgataaaaactgcttgtattttatatttttgaaaataggttataaaaattggcagaagcataacaggcataaatatcaattatgagccgggcatggtggctcagctcacaccttcaatctcagcactttgggaggccaaggcaggaagatcagttgagaccaggagtttgagaccagcctaggcaatatagcaagactcatctctacaaacattaaaaaaataataattagccaggtattggtggcgcatgcctgtggtctcagctgcttgggaggctgaggtgagaggatcacttgaccctgaaggtcgaagttgcagtgagccgtgatcatgccagtacattccagcctaggcgacaaagcaagaccctgtacccccaccaaataaataaataaataaataatttaaaaatctatatacatacattatggaaaataatcttggtgtttcaatattataccaaatatacaaattattgttactttgctcaccgtctcagtaaaattatttaattactggcttattttaatcacaaatcaggaattttataaacatgcttaatcctctgtgaactgtagatataaatatgtaaaagattcagtttagtgttcatttattcattcatccatacacagtcagttattaagtccttaccatgtgcctgagatgaaaatatagagatgaaaaagatatacataactcccttattcaaggaactcacaatctaaagggaaacgataaatgtgaagacaattacattgatgtcaagtactataatggagatatgactgatgaaaaatgagtgcttaggaagaagcacttaactagctgtccaaaaagatgagggaagacttcccagagtaggggctcatttgagtcaagaattagcatgagaaggaaatgagaaggtcatgcctggtataggaaacttcacatgcaaaggcataaaggataagaaaatggagaaaacagcatagtcaagaatctgcaaatagtttggtgtgtttggaatgtgggagagtggtatgaagcaagtctgaagagatagaaagaaatcatattgtaagaagtttgaactttatcttgtaatcagtggagaaccattgaatgattttaagcaattcagttcagcaaacacttttataaatgtttactctatgccagactgttaggtaacagaaatataaaatacatagttcacagtttttttttttttattatactttaagttctagggtacatgtgcacaatgtgcaggtttgttacataggtatacatgtgccatgttggtttgctgcactyattaactcgtcatttacattaggtatttctgctaatgctatcccttcccctgccctccaccccacgacaggccctgggatatgatgttccccgccctgtgtacaggtgttctcattgttcaactcccacctatgagtgagaacatgcggtgtttggttttctgtccttgtgacagtttgctcagaatgatggtttctagctgtatccatgtccctgcaaaggacatgaactcgtcctttttatggctgcataatattccgtggtgtatatgtgtcacattttcttaatccagtctatcactgatggatatttgggttggttccaagtctttgctattgtgaatagtgttgcagtaaacatacatgtgcatgtgtctttatagtagcatgatttataatcctttgggtatatactcagtagtggaatctctgggtcaaatggtatttctagttctacatccttgaggaatcgccacactgtcttccacaatggttgaactagtttacactcccaccaacagtgtaaagcattcctatttctccacatcctctccagcatctgttgtttcctgactttttaatgatcaccattctaactggtgtgagatggtatctcattgtggttttgatttgcatttctctgatgaccagtgatgatgagcattttttcatgtgtctgttggctgcctaaatgtctccttttgagaagtgtctgtgcatatcctttgcccactttttgatggggtcgttttttttcttgtaaatttgtttaagttctttgtagattccagatattagccctttgtcagatgagtagattgcaaaaattttctcccattctgtaggttgcctgttcactctgatggtagtttcttttgctgtgcagaagctctttagtttaattagakcccatttgtcaattttggcttttgttgccattgcttttggtggtttagtcatgaagtccatgcctatgtcctgaatggtattgcctaggttttcttctgtggtttttatggttttaggtctaacatttaagtctttaatccatcttgaattaatttttgtataaggtataaggaaaggatccagtttcagctttctacatatggctagccagttttcccagcaccatttattaaatagggaatcctttccccatttcttgtttttgtcaggtttgtcaaagatcagatggttgtagatgtgtggtgttatttctgaggcctctgttctgttccattggtctgtatatctgttttggtaccagtaccatattgttttggttactgtagccttgtagtatagtttgaagtcaggtagcatgatgcctccagctttgttcttttggcttaggattgtcttggcaatgcaggctcttttttggttccatatgaactttaaagtagttttttccaattctgtgaagaaagtcattggtagtttgatggggatggcattcaatctataaattactttgggcagtatggccgttttcatgatactgattcttcctatccacgagcatggaatgttcttccatttgtttgtgtcctcttttattttgtttgagcagtggtttgtagttctccttgaagaggtccttcacatcccttgtaagttggattcctaggtattttattctctttgaagcaattgtgaatgggagttcactcatgatttggctctctgtttgtctgttattkgtgtataggaatgcttgtgatttttgcacattgattttgtatcctgagactttgctgacattgcttatcagcttaagaagattttgggctgagacaatggagttttctaaatatacacccatgtcatctgcaaacagggacaatttgatttcctcttttcctaattggataccctttatttctttctcttgcctgattgccctggccagaacttccaatactatgttgaataggagttgtgagagagggcatccctgtcttgtgccagttttcaaagggaatgcttccagtttttgcccattcagtatgatattggctgtgggtttgtcataaattgctcttattattttgagatacgttacatcaatacctaatttattgagagtttttagcatgaaggctgttgaattttgttgaaggccttttctgcatctattgagataaacatgtgggttttgttgttggttctgtttgtgtgacggattatgtttattgatttgygtgtgttgaaccagccttgcatcccagggatgaagccgacttgatcatggtagataagctttttgatgtgctgctggattcggtttgccagtattttattgaggattttcacattgatgatcatcagggatattggtctaaaattctctttttttgtgtgtctctgccaggctttggtatcaggatgatgctggcctcataaaatgagttagggaggattccctgtttttctcttgattggaatagtttcagaaggaatggtaccagctcctctttgtacctctggtagagttcggctgtgaatccatctggtcctggactttttttggttggtaggatattaattattgcctcaatttcagagcctgttattggtctattcagagattcaatttcttcctggtttagtcttgggaaggtgtatgtgtccaggaatttatccatttcttctagattttctagtttatttttgtagaggtgtttatagtattctctgatggtagtttgtatttctgtgggattggtggtaatatcccttttatcattytttattgtgtctatttgattcttctctcttttcttctttactagtcttgctagcggtctatcaattttgttgatcttttcaaaaaaccagctgctggattcattggttttttgaagggttttttgtgtcactgtctccttcagttctgctctgatcttagttatttcttgccttctgctagcttttgaatgtgtttgctcttgcttctctagttcttttaattgtgatgttaaggtgtctattttagatcttcaccgctttctcttgtgggcatttagtgctataaatttccttctacacactgctttaaatgtgtcccagagattctcgtatggtgtgtcttttttctcattggtttcaaagaacatctttatttctgccttcatttagttatgtacccagtagtcattcaggagcaggttgttcagtttccatgtagttgtgcggttttgagtgagtttcttaatcctgagttctaatttgattgcactgtggtctgagaggcagtttgttgtgatttctgttcttttacatttgctgaggagtgctttacttccagctatgtggtcaattttggaataagtgcgatgtggtgctgagaagaatgtatattctgttgatttggggtggagagttctgtagatgtctattaggtctgcttggtgcggagctgagttcacagttttataggaatgacatgatattatttccccattggaaagaccttctgctcatgtttatggaagatgagtagagggaataagacttaaaggcaggaagattagttaacccaggcaagagattattatgatctcaaattgaggtggtgttaggggagttaaagtggaggaactagaatggaaaaatatttaggaggcagaatccacaggatttagtgaccttttgtatatgaatcagaaggagaagccaaggataaaccccagagcagtggctcctgcctgactctacagctccatcacttgtcactttcccgcttcctgttggctttccagtcactggtcttctttctcttctttgaacattccatgatcctctatgactcagcacttctgcatatgtgtctctgtctctttttgtctgtctgtctgtctctctcttgcctggagtcttctttaccactactctgccattctccatcctttcacctaattaattcctacttattctacagaattctggacaaaatattatttcctcaaaaactcatcccttaccacttctgtccctgaatcagttcaggtcccccgctattatatactaccctatcattttatactacttctttatagtacttaacacaattagaactcaatagccgggtgtggtggtggggacctataatcccagctactcaggagactgaggcaggagaattgcttgaacctgggaggcagaggttgcagtgagctgagatcgcaccactgcactccagcctgggtgacagagtgagaccttgtctcaaaaacaaaaaaaaagaagcacattgagttgaaagaaatgctataaatttatttttcctagtttttaaagcccaacattgtttcagaatgtgaaattatgatcattttataataatttctgttaccacgactataatcatgcaataagattagggcaaatcacgtaacttctttgaaccttgttcctcatctgtgaaatgattatgtctcaggtcctttactacttcattttgagtaaaatctcactcatataaactagaatataagctccatacccataaatgttaaggctttttcacttactatgattcatttcaacagttggggcaccaagtagttttatatagaggtgatatttgagctaagccatgaagaacatagaatttccttatttggagaggggaaatttgtatatatctgtctgtcacacatgtccaaacagaaaaatggtctttagtccttttctgtttaatccaaggtggagtctagcccatgctcgggattccccagccttaatgctgggaaagaaaactgttaagtgaacaatttcagtcaattcccgtgtcctcagtttagaaggcaggagaatcagaactcttttaaaccatggatttttaagtttcttactgatcttgtggttcccagagctcttgctgcacatttaagcatgtctagctcttgcaaggaccacctgcaaagtacttggttgttaggagcctgtgaggccattttgatacatttttaaatctttcctaagtcgcacttggagcacgttgaaggcaaagaaagcatggctcatttataggatgacatgatggtgggggttcttataatagcaggtgtttatagaaggccagtgatttttctggaagcagagatgtcacagccagtgtgatatgtaatggagaagcagctgcggtacaattttattcttacagttctaaacaatctacaggtcaggtagggaagctgtctaagccatagaacggcatgaagcatctcttcttctcagggcaaggctttgctttgtgatccgaggggcaaggggtgggtaaatgcactggttgtaaaactaaacaggaactccttgaaaatgtttggtgctttatgcagggcctgctcagtgttaaagcacttgagggctgtgtgtgtgtgtgtgtgtgtgtgtgtgtgtgtgtgtgttgatagggccacaaggcaagcagctgcctgattgtccattttctttaaaaacatacacacacgcacacacacgcacacacacacacacacaaacagttatctaccaggtccaccatctctgactgctttgcatcaaaaaatggactgtaggaaggaacaaaatagcgatgttttacctttatggcccactggagtcactagtaaagcaggtaggggtgtgtgtgtgtatgtgtgcgtgcgtgtgtgtgttttaactgtggtacactaccaagtctaacattatatattgcttctctttatacctgcctattgctccccacaatttatctatatcctaatcacttgaagacctataactaataaaatagactgttttaaaagcctatatagttcttgggcacttgaatatttgataagtagaataacttcacaatgtatgtattttgtttttgtattttaggaaaatgtgaatgaaggagtatcacaaagatgatatttgggaaaacgtcttttataaagtagttgtttttcccatgagtttctaagcaatttttgtggtggttgtttctgttactgtttttgttaagagcctaccaggttccaggcactgacctaaccactttatgtgttttttttctttattttacagataaatgtgttaagaatcaaagaaagacagtcaaaactttaaataaaaaataaattcacgcctgatgaaataataagtcaaggcaacaatcatcaatgactgttaaaaccattaggtgaaaagctgacaaggaactttgtaagggagagatcaggtcaaaaacaccaaaacccactggtcattcctcaacagcatgaaaagaaagacaatcaggcgttatatgtctcctgatgtgatgcaatagaaagtatgcaacacagcctgtgaagtaatttcagcaaaaaacccaaatctcatcaagtctctagaactcacattatttttcaatattaggatgttggggaagaagggaacttgtagtttaagagacataacaacaaaattaaatgtctgcaccttgtttgcatcttgatttgaacaaacatcctgttaaagaaaaataaaaataaagagccaggcacagtggttcatgcctataatcccaggactttgggaggctgaggcaggaggatcagttgaggccaggagttcaagaccagcctggacaacacattgagaccccatctctacaaaaaataaaaaaaaaytagagatggtagcacatgcctgtagttccaacttttcaggaggctgaggtgggaggttcacttgagcccaggaggttgaggctgcagtaagccatgatcacaccactgcactccagcttgggcaacagagagagaccctgtctcaaaaaaaaaaaaaagttaattatggaaatctgaacactgaatatttgatattaaggaattacaaattttagttcttaccttttagagattcatacagaggtgtttaccaatgaaatgatatttgtgggatttgctttcaaagtaatctatggaggaggtaggaaaggagttggtaaacggtaggttaaagaaatttgtctttgtgttgataattgttgaagttaagtgatgcatacatggggactcaacatactgckgtctctgtcttttgttttttttttttttgcttgccttgttctggagtacagtgatatgatcttggctcactgtaacctcgatctcccaggctccagtgatcttcccacctcaaccccccaagtatctgggactgtggctatgggactataggcgtgcaccaccacgcctggctaattttttgtacttttcatggaggcagggtttcgccatgttgccaggctggtcttgaactcctgagctcaagtgatccacctgcctcagcctcctaaagtgctgggattacaggcatgagccgccaagcctggccctgtctctgtacttttttgtttgatagccaggctggccttgaactcctgggctcaagcagtcctcccaccttgggctcccaaagtgctgggattacaggcatgagccaccacacccagccagtaaggatttttaaaaaccaagcttctgagccccagagtttgagatcaccctgggcaacatggtgaaatcccatctctacaaaaaatgcaaaaaaattagccaggcagctgggcacagtggctcgtgcctgtaatcccagtactttgggatgctgaggcaggcggatcacgaagtcaggagatcgagaccatcctgaccaacatggtgaaaccccaactctactaaaaatacaaaaattagctgggcgtggtggygcgtgcctgtaatcccagctacttgggaggctgaggtgggagaatcacttgaaccaggaagttggaggttgtggtgagccaaaattgcgccactgcactccagcctggcgacagggtaagactccgtctcaaaaataaataaataaataaataaataaataaataaataaataaatataaaaataaaaattagccaggcatagtggcatgcacctgtagtttctgctacttggggaaattaatttgggagaattccttgagcccaggaggtcaaggttgcagcaagccgtggtcgcaccactgcactccagcctgggtaayggagcaagaccctgtctcaaaaaaaaaaaaaaacaagcttctacatgtttgcttaaattaatagattattgatggacatgtttatggctgttaggtttgcaatgggaaagaaacactacattaaacctagtctacttggctttattctcaggagtaatcagactttttaaaaaatgttgctaggttacaataaggcaaggggtatagatatttgaaagggacttcccttttaagatatatgaggggaaaaagaaactcccaacaaggaaacttacccagagccactcagagccttctgcctttcagatgggcctaggcctgaagcatgagctataccagtgttaatacagctgacagagcccaaacatttacacagctcaaatgaacatgttcccaagagcatcaatcatgagccttagccagagcctctagggagccatgtataattagctttgaaaaatattttgcagaaagtttctagttgttttaattttgatctattttgaagacaactggaatctaaattgatacttgagctctaattgtagattaacctagaggtttcaagccattaccaatgctgtaaaaactgaaattttagaattttaataaacctgatcattattttctaataatatttctagttatattgttttatagwttataattccattagttaaatgtggtattaattgcctacagtacaatattatggagaggcagtatggtataagagttaagagtttgagcttcagaaccagactgcctgggtgtgaatcctggctttgtcacttcctagcagagtgacctttgaatgagttacttaagctttctatgcttatgttttctcatacataaatatgggagtagtaatagtaatcaaaattttccagagaatcaaaactagtgggagatgatagatagatagatagatagataggatttatttcaaggaattggcctatgtgatatgggcagctgagaagtatgaaatctgcagggcaggctggaaattttggggcaggccccggtgctgcagacttgaggcagaatttgttctttatcagagaaaccttagactttcgcttgtaagacttttcagtcaattgtatgaggcccacccacataattgaggataatctgcattagataaagtcaactgattgtaaatattaaccacatctacaaattacctgcacagcaacacctagattagtgtttggttgaatagctgggtaccatagcctagtcaaattaacacataaaactaaccatcgggccaggtgcgggggctcacgcctgtaatcctagcactttgtaaggctggcggggggggggggggtggatcacgaggtcacaagttcaagaccagcctggccaagatggtgaaaccctgtctctactaaaaatacaaaaagtagccaggtgtgttggcaggcacctgtaatcccagctactcgggaggctgaggcaggagaatcacttgaacctggagggtggaggttgcagtgagctgagtttgggccactgcactcctgcctgggcgacagagtgagactccatctcaaaaaacaaacaaacaaaccaacaaacaaaaaaacttaccatcacacctactatcaaattcataaaactgtgacaattaagtgtgttaatgcatataaagaacttagaatggagcctaacacataagaagccctcataaaggctaagtaaaagacctttgctttgtaagatcagccaccatttattaaataactataatatgcaaagttctgtgtctaacattgtgggaaattcagtgatagtcactatagaaccataatgtatctgcacaggattaaaccatggagatcatttaggccagcctctcatcttaaaaatggagaagctgaggtccaatgtttttgtaaatacacaaccagcgtggtttgtttttttttttataacatagtgatgaacaatacacagagaaagccctgacctcatgagccttacatcctactaagataattattgatgactatttcagtctcaaatctaacgaatattcttactcagttttcatgcaggaagggaaggagaagttgggctcagagactgtgctgcaagccaagtgtgcctgaagcattgaacggataaagcagaaatgtttctatgtttcattttgtttgtttgkttggttggttggttgttttttgtttgtttgtttttattttgagacagaatcttgctctgtcactcaatctggagcacagtggtgtcatcatggcttattgcagcctcaacctcctgggctcaagtgatctcccacctcaacctcctgagtagctggtactacaggcatgtgccaccatgcccagctattttttttttttttttttttttagagacagggtcttgctatattgcccaggctggtcttgaactcctggcctcaagtgatcctcctgccttggccccccacagtgctgggattacaggcatgagccacctttagactcaggggcttagtaactaggcttttccacattgacattactatttagtttgaaattttaatgtagcccttctgtgagggtctttgtatcaggattcaagtcatttctcaacaatgtactacatacttctgaatggcccgagggaaattaagaatgtactttcttagcacctagttttcaaccactgtgaaacttggccattggggaagttgtctcttatcccctttacatggagagccattaataataattgcattaaaacattagtaatacatctgtaggacattttatagttttacagagtacttttgagaggtaagcagagcaagtattattatacctacttagaagatatctaaggctcagagttgtaaagtgggtggcccaagactccatagtaaatatcaggttctagctgcctaattcctagtgtaatgtgctctttgctatatattactctgctggcaatgtctggtgggtataggtctggagaggagctgcttcccaaccctacagttctcttctttagttctttttttttttctttttcttaaagagacagggtctcaccccgtgtcccaggctagagtgcagtggcaccatcatagctatctagcaacctcaaactcctggacccaagcattcctcccacctcagtcctgaagtagctaggactacaagtgtgtgccaccacacccagcttgcttatttatttacttattttattttatttttattttattttattttaccttactgtgcagtcaggtcacaaatttttttgattttttgtagatatggggttttgctatgttgctgaggctggtcttgaactcctagcctcgagcaatcctcccaccttggtctccgaaagtgctgggattacagcacctgagccatgttgcccagctttcttagttcttaagtgaaggtagtctttacctgtaattaatctttacctataattaatttgaatgtaactttttgattttgctttaaacaaatgatagtaaatatttttaaacctgcagcttgttttgstgagaaaaaacctctgtggggtttaaccaaacctggaggctatgaagttagtgaatttatttttatctttttcttgctctggaaattaatctgaatgttttcagtaatgtgtacctttctttggattagacctaaatgtggctttatgtgataatttygctaggttttatgagygtacttgtaaatttgggtcttattttaattaaccwtaactgtctgaaacttgaatcttgtaaagttttctctgcatttgttaattctgccaggtcacaatgatggctctgaaacttatatatgtaccttttattacttgacaaatatttctccaacagatataagattatttaaaatagctttcctgttcacagtgtgtagtccagataaacaggaaagtctgtgaaattagcctcacctttgttcctgtctctactataacatttggcacatcatattgtaatcatttacttatatgtgtagctgggactacaggcacgtgccaccataccggctactttttttttattttgtgtagagacagggtctcactgtgttgcccaggctggtctcccaactcctggcctcaagtaatcctctcacctgcacctcttgagccattgggattacatatgtgagccaccgcactaagcatgtctgtgggttttgataagaactttgttgtggcaccttttagaggtaatgaaatataatgaaaagaaaattaacattgaagtcagtcagacctcctggttccaaatctcaggtctgtcacatttgctagtgccttgggcaaattacttaaactttctgaacctcagtttacatacctttaaggaaaatagtactgattttataaggttgctgtgataaattattaaaagtacccaaaacagttctgctacatagcagatgcttcacaaatatcttctttttttgttagcatccctaggcctagcagttcaatacttaaggtctcattaaacttttgttgaatgacttaatgattagatgaatacatactcttttcaaagaagaagaatcatatttaaagtaaagaatagccaggcatggtggctcacgcctgtaatcccagcactttgggaggctgagccaaagcggattgcttgagccctggagttcaagaccagcctgggcaacatggtaaaaccccgtctgcactaaaaatacaaaaatgagtcactgtgcctggctcgtttttcattagcctttcctttattttcctgtatttttgcacttgaggctgagagtgggaggatcacytgagcccaggagacagaggccgaagtgagccaagattgcaccactgcactccagcctcggtggcagagcaagaccccagagataaaaataataataaagcataattaatattatagaattgatttkctattgattttatcttttaattttgttacgttaaaaatgggttctccctacatttcaaaattattgttactgtgtgcctagtgagtagaggtgtaacactacatagtttcattgcacctagctgtgcctttcatgtcttaaatttcttgccttttatgtattccacgtgaaattttatgttttaaagaagaattattttccttagtcttctttgatcttccttctgtccttcctcatggcattttggattctctttcatttgtgacatctaccttactctagattatacagatattatttgtagacttgtctttgcctaccacctagagctgaaaatctactacaggggtccttaacttatttaggattccttattagtctttctgagactatgatgatagctatgaactatccccacccccagaaaaatgtatacacstacaaactaaagttttcatatcagtgtgagttcaggaggttcacgaactccagggtgaggactctttctatattgtgtgtttcttcagagcagtaactgaatttcattgacctctgtgtctgtggcaaagcctatcatgtaygtgtgtaggagatacccaatacataatttatgaattgatgaatttacatgtaaaatgagaatctaagtttattactctagaatctctaaacacagtttcttttgtgtttccttaggctttcatctgagtggcacagtaactgagctggccactgcctctgaaccagcagtgacttataaagttgcaatcagttttgatcgatgcaaaatcacctcagtgacatgtggctgtgggaacaaggacatattctactgtgcccatgtggtagcactctcactctacaggatccgtaaaccagaccaagtcaaattgcgtcttcctatctccgaaacccttttccagatgaatagggaccagctacaaaagtttattcaatatttaatcacggcacaccacactgaagttcttcctactgcacagaaactggcagatgagattctatcctccaactcagaaatcaaccaagtgaatggtaattgtacaacttttttattgaaaaaaaaggtctttttcatcaccactgtcaccaaagcaaccctcttacctctactttgttgctttattgcatgttaagaggttgggatatttctgcagttgcaatcacttaactttaatcatttcattctatccaaacaactgtgtttaactctaagtttcttaaaacagtccaactgtgtatctcaaaaagattttggtgaaaaagaacagagaatgatagtattatatattggtctagtttatggactttgtcgatgcagaccctgtccctaggagcctgaagtgttaaaacagtaaaagaaagcacaaaataatttgtatcattcagtgaattgagatggatatgagaattcccttgatatttcaggaccctacattagcatcagagttatcctaaggagcatgtgttagcattgtgcttatgaactatatattgggggtgcattaatggagaaagagtttatgttcactcattcattcaacaaatatttattaagtaccatgtgcagggaatagtgctgattgttgagggtctaaaacagacatggttcttaaagtagcttataacctagtagcaacaacagacaggtctgaaacaaatgcttgtttttataatgaaaccagattgtagaagcctaatcatagaaaaccattgaaaattttaaagaaggggccaggcacagtggctcacgcctgtgatcccagcactttgggaggtcaaggtgggtggatcacttgaggtcaggagttcaagaccagcctagtgaacatggtgaaaccctgtctctattaaaaatacaaaaatcatccaggcatgatggtgcatgcctgtaatcccagctactttggaggctgaggcgggagaattgcttgaacctgggaggtggaggctgcagtgagccgagatcacgccactgcactccagcctgggtgacagagcaagattccatctcaaaaaaaaaaaaaaaaaaaatttaagaagaagagttaataagccagttttcattttgctttttagatcccactgtgttccaagcatcatgcaaaggactttattattttttttattttttattatactttaagttctggggtacatgtgcacgaggtgtaggtttgttacataggtatacatgtgccatgttggtttgctgcacccattaactcatcatttacattaggtatttctcctaatgctatccttcccctgccctccaccccgcgacagcccccggggtgtgatgttccccgccctgtgtccaagtgttctcattgttcaattcccacctatgagtgagaacatgcagtgttttgttctccatccacagaggactttatatatattaattcatttaggtttcaaaactactttgtggggtataataatttctactttataaataaggaagttatttataacctaggttcatttgacataagaattttttgaatttctctaaagttttttgagtttccctaaactacctttctcttttggatgataactgatacagtttggatttgtgtccctgctcaaatgtcatatccagttgtaatctcccatgttggaggaggggccttgtgggaggtgaatggatcatgggggcagatttccccctctctgttctcctgataatgagtgagttttcacaagatccagttactgaaaagtgtgtaagcacctgccccttctctctcttcctccggctccagccatgtaaaatgtgcctgcttcccttttgccttccaccatgattgtaatgttcctgaggcctcccaagccatgcttcctgtacagcctgcagaaccatgagccaattaaacctcttttttaaaaataaatyaccgattctcaggtatttttttatagcagtgcaagaatgtaccaatacagaaaattggtactgggaagtcaggcattgccataaagatacctgaaaatgtggaagcagcttttgaactggttagaaaagtggcagaggttagaaaagtgtagagggcttagaagaagacaggaggatgaaggaaagtttggagcttcctagagacttgttaaattgttgtgaccaaaatgctgatagtgatattgacaatgaagtccaggctgagatggtctcagatgaagatggggtgctttttgggaactggagcaaagatgtttgaggcattgtgcccctgcccttgggatctgtggaactttgaacttgagagtgatgatttggggcatctggcagaagaaatttctgtgcagcagtgttgaagatgtagcctgactgcttctagcaacctcagctcatattcatgagcaaaaaaaaaaaaaaaaaaacaaacaaactaacctaaaactagaacttatatttaaaagggaaacagagtgtaaaagtttggaaaattttcagcctggccgtatggtagaaaacaattccccgtttcaggggaggaatacaagctggctgcagaaatttgcttaagtaaagccaagacaatgaggaaaatgtctcaaaagcatttcagacaccttcatggcagcccctcccatcacaggcccagagayctaggagggaagaatggtttcataggccaggcccagggctccgctaccctgctccttaggacactgctccctgcatcccagccactccagctctggctgtggctaaaagggccccagatatgtcttaggccgcagctccagagggtgcaagccataagccttggcggcttccacatggtgttaagcacagaggtcaagagttgaggcttgggagcctctgcctagatttcagaggatgtatggaaatgcctggatgtccaggcaggagtctgctgcaggggcagagccttcatggagaacctctactagggcagtgtggaggggaaatgtgggttggagcccccacacagattccccactggagcactgcctactggagctgagaagggggctactgtcctccagatcccaggatggtatatccaccaacagcttatactgtgcacctggaaaagccacaggcactcaacaccagcccttgaaagcagctgtgggagctgagctctcagggggtggagctgctcaaggccttaggtgcctacccattgcatcactgtcacgtggatgtgagacatggagccaaaggggattattttggagatttaaggtttagtgactgccctgctgggttttggacttggttggggcctgtaggccctctcttttggctgatttctcccttttgaaatggtaggtgtatttacccaatgcctatacttccattgtatcttggaagtaacttgtttttgattttaccggctcataagtggaagagacttgccttgtctcagatgagactttggatggtggacttttgagttaatgctgaaatgagttaagacttgggggactgttgagaagggtgattgtattttgcaatgtgagaaggatatgagatttagaaggggccaggggcagaatgatatggtttggatttgtgtccccacccaaatctcatattgaatttgtaatccccactgttggagaagggcctgatgggaggtgattggatcattggggtggatttatcccttgctgttctcatgatagtgagtgagttctcatgagatctggttatttaaaagtgtgtaggccaggcgcagaggctcacacctgtaatctcagtactttgggaagccaaggtgtgtggattgcttgcacacaggagtttgagaccagcccgggaaacatggcaaaaccctgtctccacaaaaaattcaaaaattagctgggcattgtggtgcatccctgtagtccctactactcgggaggctgaggtgggaggatggcttgagcccaggaggcagagattgcagtgaaccaaaattgcaccgctgcactccagcctggtggtagaaccagactttgtctcaaaataataaataaatataaataaaagtgtgtagcacctcccacttctctctcttcctcctgcaccagccatgtaagacatgtctgcttcccgtttgtcttgtaagtttcctgaggcctccccagacatgtttcctgcacatcttgtggaacagtgagccaattaaacttttctttataaattacccagtttcagttatttctttatagcagtgcaagaacagactaatacaataacttagctactagtgtgaaagaggcaatgagaccaggtgggtggcctgtataatagagtagtctacatgccaaaggacctgtctttcccagttgttcaacagagccaatcaagtcttacaaacaacctcagaaagaacagtcagagctgggcatggtggctaacgcttgtaatcccaacactttgggaggtcaaggcaagaggattgccagagtccaggagatgaaaacagcctgaacaacatagtgagacctcatctctacaaaaaagcaaaaaattagctaggcatggtagtgtgcgcttgtggtcccagctactcaggaagctgaggcaggagaattgcttgagcccaggatgtcaaggctgcaatgaacagtgatcatgctactgtcctcaacagagtaagactctgtctcaaaaaaaaaaattaaaagaataaagaaagaacagtcagacaggcttctaggaactcttgctcactagcaaaaatgttacgttgctttatactcaaagttgcagtgtttacataataactgagctctctctatttgagtgatactgtcaaaaagtagctctccatatctcttcttatcccacacagagaggctgttctacgctgacctcctttttgagacctgagttctgcccccatcccccaggcctgtagcaccagagagaagaatagctctgtaccctgacagctgggctatggcctgcttttgtgcctcattcccactatcttttcccccagaattatttccaagctctcttgcctcttcttgaattggctgccttggttcaggacctgtattggcctgtctttttcaccacaactgtcaccaaaacaaccctcttccctcattactactgtgctgaagaaacctacattcctcattacacttcccattcccatatcttaatttttgtctgaaattaggctgccacaatcaacttgagatgtgattctcagccttccccaggaactactacttctgtatacatgtttatcccatacttatattagctttctacaacaggttccatagtattctacaggcyctttcctgatctatttctgtaaccagtactggtataagcaatgatacaaaaagrggagacatcacagagataaaatggactggactgaagatccaagtgtattggatgagtgaggactgaataagaagaagacatagaactgagttccaacatgtctagctaggatggcactgatggttttgataatgatgttgccattcattagagaacaaaagaggagaaatgaatttaggaggaagatagatttaagtttgagatacttctaggacatttagataaagatttctttttttttttcttttttttttttaattgatcattcttgggtgtttctcacagagggggatttggcagggtcataggacaatagtggagggaaggtcagcagataaacaagtgaacaaaggtctctggttttcctaggcagaggaccctgcggccttccgcagcgtttgtgtccctgggtacttgagattagggagtgtgatgactcttaatgagcatgctgccttcaagcatctgtttaacaaagcacatcttgcatcgcccttaatccatttaactctgagtggacacagcacatgtttcagagagcacagggttggggataaggtcacagatcaacaggatcccaaggcagaagaatttttcttagtacagaacaaaatgaaaagtctcccatgtctacttctttctacacagacacggcaaccatccgatttctcaatcttttccccacctttcccccctttctattccacaaagccgccattgtcatcctggcccgttctcaatgagctgttgggtacacctcccagacggggtggtggccgggcagaggggctcctcactttccagacgatgggtggccaggcagagacgctcctcacttcccagacggggtggcggccgggcagaggctgcaatctcggcactttgggaggycaaggcaggcggctgggaggtggaggttgtagcaagccgagatcacgccactgcactccagcctgggtgccattgagcactgagtgaaccagactccgtctgcaatcccggcacctcgggaggccgaggctggcggatcactcgcggttaggagctggagaccagcccggccaacacagcgaaaccccgtctccaccaaaaaaatacgaaaaccagtcaggcgtggcggcgcgcgcctgcaattgcaggcactccgcaggctgaggcaggagaatcaggcagggaggttgcagtgagctgagatggcagcagtatagtccagcttcggcttggcgtgagagggagaccgtggaaagagagggagagggagaccatggggagagggagaccatggggagagggagaccatggggagagggagagggagagggagagggagagggagctagataaagatttctgataaacagttgaatatatggacctggaactgagggagaaagtcagaatttttgaaataaaaaattttagataaaaatgatgtttaaaatcatatttctgttccctgctaaatctttaaacacttagaacattttccttctcctttctctttaaccccattcctcaccaaaacaaacctaaaacagcaggaataaaattcctaaaactgctagctgcctgcttttaatcttaagaacagatccaagctttgctctgctccctacttccctgaaaccatttcttgtattagtccctatatgtgtttgtagctagacattgccttgacttttttaggtgggttactcagatttgactatccttccagctctgcctccagcactactctatgccctatttgtgatttgctctggtaactccataccccaagattctctggggtacagcatcctggccaggacttcagttcctcttatccagaaagaaagattgaggaaggaggcagaacaagatggcagaatagaaggctacaccaattgttccctacctcctcacatgaggacaccaatctaagaaccatctacacacaaaaaaagtacccacataagaaccaaaaatcaggtgagcactcayaatatctggttttaacttcatattgctaaaagaggcactgaggaagtaggaaaaacagtcttgaatcaccagtgccacacctccccaatcgcccagcagtcatagcatggtgtggaaagcattttggtgcactgggaaaacagaaattgcagcatttctgaggcattaaactcagtgctgccctattataacagaaaacaaaaccagaccaaactcagctgacacctccccatagagggagcatttaaaccagccctagccaaagaggaattgccagtcccagcagtccaaacttgagttccagcaagcctcccctctgtgggctaaagtgctctggggccttaaataaactcgaaaggcagtctaggccgcaaggactgcaactcctaggcaagtcctaatgctgaactgggcccagagacagtggactgtggggagacatgtgacctactgagacaccagctggggtagctgagggagtgatggcatcacccttcccttaaccccaggcagttcagcttatggctccaaaagagaccccgtccctttgctcgaggagaggagagggaagagtggggatgagtttgtcttgcatcttggataccagctcagccacaccaggatagggcaccagtcagagtcatgaagccccctttccaggccctagctccctgtactacatttcttgacacaccttgggccagaaaggaacctgctgcctttgaagggaagaaactagtcctgacaggattcattgcctgctagctgaagagcactgggggccctgaataaccagcagtgatactcatgtactacattgagaaccttgggtgagactctgaaacttgctggcttaaggtgagtctcaggacattcccagctgtggtggctatggggcaagatgccttccacttgagaaaagtgaaagtaaaagcaaaggggactttgtcttgcaccttaggtaccagctcagccacagggtctagagcaccaagtgacctcttggggtcctttattccaggacttggctcttggatggcttttctagacctgccctgggccactggggagtgcactgccctgaagggtgagtcgcaagctgggcagcattcaccacaagctgactggagaggccttgggccttaaatggtagtctggcggtactcctcgtgggcctgtggcaatggtggccatgggaggctcctctgcctttggaaaggggcaggaagagtggaagtgtcatgcgcgtccatgtgaagagwccaccaaacaggctttgtgtaagcaacaaggctgtttatttcacctgggtgcaggcgggctgagtccgaaaagatagtcagtgaagggagataggggtggggccgttttataagatttgggtaggtagtggaaaattacaatcaaagggggttgttctctggctggcaggggtgggggtcacaaggtgctcaatgggggagcttttgagccaggatgagccaggagaaggaatttcacaaggtaatgtcatcatttaaggcagggaccggccattttcacttcttttgtggtggaatgtcatcagttaaggcaggaaccagccattttcacttcttttgtgattcttcacttgcttcgggccatctggacctatacgttcaggtcacaggggatacgatggcttagcttgggctcagaggcctgacaggaaggactatgtcttgtggtttgagtgccagctcagccacagtacaatggaacagcaggtgaacagctaaggtttttttactctagtccctggctcctggatggcacctctggacacacccagagtctggaggaaccccccatcctgaagagaaggacacagacctggctggctttgccacctgctgattggagcctcagggccttgagtgaacacagatggtagccagggagtggttacagcaaaccttgggtgagacctagtttggtgctggcttcagatttgaccaagcacagtcctggtggtggtggccacaagggtacttatgtcacaccactaccagctccaggtagctcagaacagagaaagaccccattagtttgggagaaactaagggaagagaacaagagtctctgcctgtggttgcccagagaattcttccagatcttgttctagaccaccaaggtagtacctctatgggtctgcaagaaccacagcattactggggttggggtgaccactaaagcagatacagcttagatcacaatacccaagtcctttcaaatatctggaaagccttcccaagaaggacaggtgttgcgggaagtcagggaccccaaacggagggactggctgaagccatgacagaagaacttggattgtgaagattttatggacatttattagttccccaaattaatagttttgtaatttcttatgcctgtctttactgcaatctctaaacataaattgtaaagatttcatggacacttatcacttccccaatcaatacccttgtgctttcctatgcctgtctttgctttaatctcttaatcctgtcagccaagaaggatgtatgtcgcctcaggaccctgtgataattgcattaactgcacagattgtacagcatgtgtgtttgtacaatatgaaatcagagcaccttgaaaaaagaacaggataacagcaattgttcagggaataagagagataaccttaaactctgaccgccagtgagcagggcagaacagagccatatttctcttctttcaaaagcaaatgggagaaatatcgctgaattctttttctcagcatggaacgtccctgagaaagaggatgtgcacctaggggtaggtctctgaactggcccccccggggcgtacctgtctcttatggttgagactgcaggggtgaaataaactccagtctcccatagcgctcccaggcttattaggaagaggaaattcccacctaataaattttggtcagaccagttgatctcaaaaccctgtctcctgataagatgttatcaatgacaatggtgcccaaaacttcattagcaattttaatttcgcctcagtcctgtggtcctgtgatctcgccctgcctccacttgccttgtgatagtctattaccctgttaagtacttgatgtctgtcacccacatctattcgcacactccctccccgtttgaaaatccctaataaaaacttgctggtttttgtggcttgtggggcatcacggatcctaccaaygtgtgatatctcccccagacgcccagctttaaaatttctctcttttgtactctgtccctttatttctcaagccagccgacgcttaggaaaatagaaaagaacctacgtgattattggggcaggttccccartagacaggtacaaacaagcccaggctgagaagactacaacaaatacctaactcttcaatgcccagacactgacgaacatctacaagcatcaacaccattcaggaaaacatgacctcatcaaatgaactaaaggtaccaggaaccaatcctggagaaacacagatgtgtgacctttcagaaagaattcaaaatagctgttttgaggaaactcaaagaaattcaagataacacagagaaggagtttagaattctatcagataaatttaacaaagacattgaaataatccaaaagaagcaaaaattctggagctgaaaaatgcaattggcatacagaagaatgcatcagagtcttttaatagcagaactgatcaagcagaagaaggaattagtgaacttgaagacaggctatttgaaaattcacagtcagaggagacgaaaaaaagaataaaatgagtgatacatacctacaagatctagaatatagcttcaagggacaaatctaagagttattgggcttagagacgacgtagagaaagaaactggaggtagagagtttattcaaagggattatatcagagaatttcccaaacctagaggaagatatatcaatatccaagtacaggtaggttatagaacaccaagcatatttaacccaaagaagactacttcaagacatttaataatcaaactcccaaaggtcaaggataaagaaaggatcctaaaagcagcaagagaaaaagtaacatacaatggagtctggcagcagacttctcagtggaaactctacaggccaggagctagtggcatgacatgtttaaagtgaaggaaaaaaactttgatcctaaagtagtatgtttggcaaaaatacccttcaaacatgaaggagaaataaagactttcccagacaaacaaaaactgagggttttcatcaacaccagactggcctacaagaaatgctaaaagagagtacttctatcagtataaaaaggatgttaatgaacaataagaaatcatatgaaggtacagaactcactggtgatagtaagtagacagaagaacacagaatattataacattgtaaccgtgatgtgtaaactactcttaagtagaaagactaaactatgaaccaatcacaaataataactacaactttcaagacatagcataataarataaaagtagtaacaacaaaaagttaagaagcaggggcacgaagttaagttgtagagtttttattaggtttcttttggctcgtttgtttgcttatttaaacagtgtaagttgttatcagtttaaaataatgggttataagatagtatttgcaagcctcatggtaacttcaagccaaaaaaaaaaaaaaatacaacagctacacaaaaagttaaaagtaagaaactaaatcatatcaccagagaaagttaccttcactaaaggaaaacaggaaggaaagaaggaagagaagaccacagaacaaccagaaaacaaataacaaaatggcaggactaagtccttacttatcaataacaacactgaatgtaaatagactaaactctccaataaaaagacataaagtggctggatggattaaaaaaaaattagacccagtgatctgttacctacaagaaacacacttcacttataaagacaaacatagactgaaaattaagggattgaaaaaggtatttcatgtcaatggaaacaaaaaggagcaggagtagctatacttttatcagacaaaatagatttcaagacaaaaactaaaagaagagacaaagaaggtcatgatataatgataaaggagttagttcagtaagagaatataacaattgtaaatacatatacacccaacactggagcacccaaatatatagagcaaatactattacagctaaatagagagacctcagtgtagtaatagctggagacttcagcaccccgctatcagcatcggacacatcttccagacagaaaatcaacaaagaaacattggatttaatctgcactatagaccaaatgcaactaatagatatttacgaacatttcagccagcagctgcagaatacacattcttttcctcagcacatggattattctcaaagatagaccacatgttaagttacaaaacaagtcttaaaacagtcaaaaaaaattgaaataagcatcttctctgaccacaatggaataaaactagaaatcaataacaagaggaattttggaaactatrcaaatacatggaaattaaacattatgctcctggatgaccagtgggtcaataaagaaattaagaggaaattgaaaattttcttaaaaccaatgataatggaaacacagcatactaaaacctatgggatacagcaaaagcagtactaagagggaaatgtatagctataagtacctacatcaaaaagaagaaaaacttcaaataaacaatctaatgatgcatcttaaagaactagaaaagcaagagcaaaccaaacccaaatttaatagaagaaaataaataataaagatcagagcagaaataaattgaaatgaaaacaatacaaaaaaaatcaataaaacaaaaggttggttttttgaaaagttaaacaaaattgacaaacctttagccatactaagaaaaaaagagagatgacccaaataaataaaatcagagatgaaaaaggagacattacagctgataccacagaaattcaaaggatcattagtggctactgtgaacaactatatgccagtaaatcagaaaatctaaaagcaatgaacaaatttcaagactcatataacctatcaagactgaaccatgaagaaacccaaaacttgaacagaccaataacaagtaacaaattcaaagccataataaaaaaagtcacccagtaatgaaaagcctgagacccagctgaattctaccaaacatttaaagaaggattaataccaatcttattcaaactattctgaaaatagaggaggaagaaatacttccaaactcattctacaaggcaaatattaccctgataccaaaaccagacaaagacatatcaaaaaaataaaactacaggccaatatctctgatgaatattcatgcaaaaaatcctcaacaaaatactagcaaactgaattcaacaatacattaaaaagatcatttatcatgaccaagtgggatttatccctgagatgcaaggatggttcaatatatggaaatcaatcaatatgatacatcatatcagcagaataaaggataaaaaccatatgatcatttcaattgatgctgaaaaagcacttgataaaatccaacatctcttcatgataaaaatgctttaaaaatgggtacagaaggaacatacctcaacataataaaagacatatatggcagacccacagctaatatcatattgaatggggaaaaactgaaaacctttcctctaagatctggaacgtgacaaggatgccccatgttaccactgttattcaacataatgctgaaggtcctagctagagcaagcaaagaagagagagaaataaggggcatttaaattggaaaggaagaagtcaaattatcctcgtttgcagatgatatgatcttatatttggaaaaacctaaagactccaccaaaaaactattagaattgatgaacaaattcagtaaaattgcaggatacaaaatcaacatacaaaaatcagcaggccgggcgcagtggctcatgtctgtaatcccatcactttgggaggctgaggcaggcagatcacctaaggtcaggagtttgagacaagcctggccaacatggtgaaactctacctctactaaaaatacaaaaattacccaggcgtgatggtgggcaccagtaatcccagctacttgggaagctgaggcaggagaatygcttgaacccaggaggcagaggttgcagtgagctaagatcgtgccactgcaactccagccagggcaacaacagtgagactccaccaaaaaaaaaaaaaaaaaaaaaaaattcagtagcaattgtatatgcgaacagtgaacaatctaaaaaataaatttaaaaagtaatcccatttacaatggccacaaataaaattaaatacctaggagttaaccaagaaagtgaaagatctctataatgaaaactataaaacactgatgaaagaaattgaagaagacaccaaaaaatggaaagatattccatgttcatggattggaaaaatcaatattgttaaaatattcatactactcaatctacagattcaatgtaatccctatcaaaataccaatgacattcttcacagaaatagaaaacacaattctaaaattgttttttgctatgtgaaaccacaaaagacctggaataaccaaagctatcctaagcaaaaagaacaaaactggagttattacttgacttcacattatactacagagctatagtaaccaaaatagcatggtactgtcataaaatagacacacagaccaatggaacagaatagaaaacctagaaacaaatccacacacgtacactgaactcatttgttacaaaggtgccaagaacatacactggggaaaagacagttttttcaataaatggatgctaggaaactggatatccatatgcagaagaaatgaaactagacccctatctctagccatatacaaaaatcagataaaaatggattaaagacttaaatctaagacctgaaactatgaaactactacaagaaaacattggggaaactctctaggacactggactgggcaaagatttcttgagtaataacccacaagcacaggcaaccaaagcaaaaatggataaatgggatcacatcaagttaaaaagcttctgtacagaaaggaaataattgacaaagtgaagagacaaaccacagaatgggagaaaatattagcaaactacccatctgacaaggacttaataacaagaatatataaggagcttaattcaataggaaaaaatctaataatctgatgttaaaatgggcaatagatctgaacagacatttctcaaaagacgacatacaagtggcaaatgagtatatgaaaaggtactcaatatcatttgtcatcagagaaatgcaaatcaaaaccacaatgacatatcatctcacctcagtaaaaatggcttatatccaaaagacaggcaataagaagtgctggtgaggatgtggagaaaagggaaccctcgtacactgttggtggcaaagtaaattagtacaaccactatggagaacagtttgaaagttcctcaaaaaactaaacagagctaccatatgattcagcaatcctactgctttccaaagaaaaggaaatcagtatatcagagagaggtctgcacttgcatgtttgtttgttgcagcattgttcacaaagcaagatttggaaccatcctaagtgtccatcagcagacgaatggataaagaaaatgtggtacttatacacagtggagtactatgcagcaataaaaaagaatgagatcagctgggtgcagtggctcacacctgtagtcctagcactttgggaggtcgaagcaggcagattgcttgagctcaggagttcaagaccagcctgggcaacatggcaaaactcttatctctacaaaaattacaaaaaagtagccagatgttggtggcatgcacctgtagtctcaactactggggaggctgaggcaagagaattgcttgagcttaggaggttaaggctgcagtgagccatgatcatgccactgcactccagcctgggtgacagagtgagaccctatctcaaaaaaaaaaaaaaaaaaaaaaaagagattctgtcatttgcaacaacatggatggaattggaggttattatgctaggtgaaataacccaggcacagaaagacaaacatcatcacatgttctcacttgtttgtgagatctaaaaatcaaaacaattgagctcatagagatagagtagaaggatggttatgagaggctgggaagggtagtggggggatgtcagggaggtggggatggttaatgtgtacaaaacatagttagaatgaaaaagacctagtatttgatagcacaacaggacgattatagtcaataagtaatttaattgtacatttttaaatcactgaaagagtataattggattgtaacacaaagaataaatacttgaggtaatggataccccattttccatgttgtgattattatgcattgcatgtctctatcaaaacatctcatgtaccccataaatatatatacctactatctacccacaaaaattaaaattaaaaaagaaagattgaataccaagagaaaagtaagataacttgagaagtcaggtcaggaaccatgttttgctaatttctgagtgtccctcaccaagcacgatacctgtaaaataatcaatgttctataagtgtttgttgattgaaaacatccttgaataaacaggtgatgaaagaggagccaatgtaggaattaacaaagtaatgggaaaaaaactagcaagttattatcaaagaagatgtagcattgagtttcaaaaagtgaatggtcaacagtgtggaatactgtggaagatagaactaacaaacatggaaagacaatttgggggaaatacraactatgcagaaagaataaaactttgaaaaattattagtatcagaaataaaaagatattgcaacctatgaaataacaactagatactacaaaaacaaatgcaaagaacagaaaaaaatcatgaatattacaaatttgatggcagaaaattttaaaactcaatagaattgttggaacataaaattcctatggagaacagcccttgctgccaccaacatggagactttgtaccatgtcccgttctttgtgctcgaatgtcctaacctgaagctgaagaagccaccctggctgcccatgccgttggccatgactgygtatgctctggtggtggcgtcttacttcctcatcaccagaggaataatttatgatgttattgttgaacctccaagtgttggttctgtgactgatgaacatgggcatcagaggccagtagctttcttggcctacaaagtaaatggacagtatattatggaaggacttgcatccagcttcctgtttacagtgggaggtttaggtttcataatcctggactgatcgaatgcaccaaatatcccaaaactcaatagatttcttcttctagtcattggattcgtgtgtgtcttattgaggtttttcatagctactcaagtattcatgagaatgaaactgccagtctatctgatgggttagactgcatttgagaagaaatcagtggatactggatttgctcctatcaaagaagttttaaaggctgtaccagtcctctaatatgaaatgtggaaaagaatgaagagcaacagtaaaagaaatatgtactgaaaaaacaggaagcatattgaagcttggcctagaatttattcttggtattaaagagacaagtttatcacagtatttttttttcctgctgacctwttgctatgccagcgatgttgagtggcattttcttcttagtttttcatttcttaaagaaaatatactctatatctacaactataatatcaaataaagtgattattttttgcaacccacttaaaaaattcctatggagtagaacaaaaagagagatgaaaaagaggaggaaaaatgtatcaaaaattaaaacgagtcctcaaattccagtgtttaactaataggggttaataggggtttcagaaatagaaaacagaggtaaggaattcaccaatgaaataattgaacaaaattttctagaatgaaacgtgaatttcttttttttttttttggagacggagtctcactctgtcgtccaggctggagtgcagtggcacgatcttggctcactgcaagctccgcctcccgggttcacaccattctcctacttcagcctccccagtagctgggactccaggcgcccaccaccacgcccggctaattttttgtatttttagtagagacggggtgtcaccgtgttagccaggatggtctcgatctgctgaccttgtgatccacccacctcggcctcccaaagtgctgggattacaggcatgagccattgtgcctggcccaaaaacatgaatttctaaagtgaaaagattctgactgggtgggatggttcacgccagtaattccagcactctgggaggtcaaagcaggaggatcgcatgagcccaggagttcaagaccagcctgggcaacaaagtaaggtccccatctctacaaaaaaaaaatcaaaaagattagctgggcatggtggtgtgtgcctgtagtcccagctgctcaggaggccgaggcaaggccagaggattgcttgagcccaggagtttgaggctgcagcaagctacaatggcaccactgcactccagcctggaagacaaagatcctgtctcagaaaaaaaaaaaaaaaaaaaaaaaaaaagacatacaacagcaacaaaacagtgagaggattccactaaatgccaagaaagggaaaagaataatcttttcaataagcgatgttggatcaactaaaaatcaactttccagttgaaacttgatttctacctgataccattcagaaaaatcagttgtggatggattgtggatataaatgtgaaaagtagaagagtaaaacctaaaagataagagaacaccttcatgtccttgaggtagagaaaaatttcttgagtaggaaaagaccaataaattggaatacattaatttttttttttttgagacggagtttcgctctcgttgcccagactggagtgcaatggcatgatttcagctcaccgtacattaaaatttttaaattaccacttatcagccaggcaccgtggctcacacctgtaatcccagcactttgggaggctggggcaggcagatcacctgcggtcaggagttcaagaccagcctggccagcatggtgaaatcccatctctactaaaaatacaaaaattagccaggcatggtagtgtgcaccacctgtaatcccagccacttgggaggctgaggcaggagaatggcttggaccctggaggcggaggttgcagtgagctgagatcacaccactgcactccagcctgggcaatagagtaagactccatctcaaaaaaaaaaaaargaaaaaaaaaaaaaaagaaaaattgcttccttagacttaataaccccctcaggacaggtctcattatataagcctcaatgcttacgtggaggctgaacccacacaatggtttgtttcataattatttataaaagacatcctttctatcttatcttcacttgtcaccatttctcttattagttttagtccttaggaaaaaattcagactataatgttaaagtatcatttacattgactaggtctaatttactgttactaaagataagtggtttcatactcatctctttctgtgaaaagactaaaatattctaaccagtgaacatataagggcattttaatttaatttgatttttaaactaaagaaaggagttttagaaaagatgctgcctgggagttagtgagagatagctgaagaagccagtttgtgaactccacacctagtttatctacttaaatgatttgtgcccttgtttattccttaatgctgtcctctactgtgacctttgaatattgacatttcttatagattaatcttacattttctcctcttcttattttatatgatctctgtaggcaatctcagttacatccttgtcttcaaatattatctacattccaagacacacaaatgtatttctttctttctttctttctttcttttttttttttgaggcagggtcttactctctcacctaggctggaatgcagtggcacaatcacagctcactgcagcctcagtctccctgggctcaggtgatcctcccacctcagcctcccaagtagctgggactacaggctcatgtcaccatgcttggctaatttttgtatttttttatagagacagggtctcactgtgttgcccaggctggtcttgaactcttggtctcaagcaacacacccaccttggcctcccaaagtgctaggattacaggcatgagccactgtgcccaacctcacacatgtatttcttcagcccatatcttttgagcgttagactctatatccaactatttaatgtcataaaggcatcccaagatcaacatacccaaatgtgattttattatcttcttccccaaatttatttatcctcctgtattcaccatatagcaccaccatctagccatggaatcatgatgaaaaccttgtagttactcctaacacctttgccttttgtgtattccacatgcaatatattgcaagatatgttaattttacctctgaaatatatttcataattttctacttctccctattaaatcaaaccactataatctctcacgtaaattgctatagtagccaatctaactgatctttcaatttccactattaatcccctctattccattcttcacaccaccatccttcagtggcctcctattactgttaggatcgagtccaaatttctgtggcatacaaaactttgcatgatctggcttttgcctgcattttcacatgatattccctctccttgagagaatatcctcctttcccatactatttctatcctccctcccttattatagttgtatttaattaccaatttatgacataatgttttttttgaacaaaaagtacacagtatttcttccactctctgccaggctaactcctatttattcttcaagtgtcagcttaaatgtcactttctcagagaagccttctttgactcttcttcctttccacacaaaaatgtgtacatgtgattatttgcttcaggtctctctccccaactataagctccgtatctgctttgtttaccattatatatccagtatttggcacaggcacaggttctgtacatatcaagctctctataaatattggctgaataaatgaaaatgtcttagaaatgaaaatgaaaatgtcttagaaaattctccatgggggggaatactatacagccataaaaaatgaagagttcatgtcctttgtagggacatggatgaaactggaaaccatcattctcagcaaactatcgcaaggacaaaaaaccaaacaccacatgttctcactcataggtgggtattgaacaatgagaacacatggacacaggaaggggaacatcacactccggggactgttgtggggtggggggaggggggagggatagcattaggagatatacctaatactaaatgacgagttaatggatgcagcacagcaacatggcacatgtatacatatataacaaacctgcacattgtgcacatgtaccctaaaacttaaagtataataataataaaattagaattaaaaaaaaagaaaattctccatggggtctcttgccagttcattctcttcccaaatgactttgcttgcctcagcaatcacaccaactccttgtagtttgttacctcgatgccccaaatattaactcacttccttttttgctgctgtcacccattttagcagctcagtttctcctggggtccattgtaggccagcaaacatttgtacaatttactttcctttctctcctatcaaataaacaaacccttttgaagtttaggtgaagttgtactgttagtaactctcaaggttttgcctcttcctagccctatcccagcagttttccatagatatacactaggtatttataaactgtgccttatttcttccacagctactgccgttatcatcacctgggtgccaaatgttctccacttttttccataccccttcaaacccttagaggagagggtgtcagtccacacttccagccagttgtttaaggccgactgccctaaaagactagatcctgttcctgctttttcatatcctaacttaaccaccccagggtcagaattggtattcaaaccatctctgccctctgctgctggagcaccattgctgttcattccaaccccaatccttagctccaaggtactcaacaacccagtccttggtttaacctggtttatctcagttttatctctatggatctcctgaaaaccagaattgttaggagttagactccataacctgcatttttcacagaaaccccaagtaattattttgtatattaatatctgagaatcactgtactggtaagaactctaattatcctcactgtgggaaaaatgcattattctgactaattccatattctctgtagcagaataagctgagaaaatatgggatttggctatcttcagatacaccatcagttacagcttcaggggacctaaaaccaactagtgaatccagcggtatgagactgaaggccaaagtatagccttgtagtaaagagacaggctttggaaagagaccartatatatatcctggctgatatactttacatctaagttaccttgtctaaactttagtttcttcattttaaaattaggagaataatatggcctcatagagttgttatgaaggttccttggaatttattcgataaatatttattgagcacctactatatggcaggcacctttctatgtgttgtgaatataccagcaaacaaaaacttttgccctcaaggagcatacattctaatgggtatatgtataaaaagtgcctctagcatacagaaagaactcaataaattcttgttacttacaaatatttaaggataaggagtatatttgttttcttttgccacttttgggatataaaagaagcataggacacaatatatgcctatgtggtgcttagtgagatatgtatttgttcattctataaatattaactcagtgctgtgatgagcctgacactgtgaagtacaaaaatgaatccctatttttaaaaaatttcaatttagttgggaatatatgagaaatgcaaaattctaatgtaaaacaaggtgcaagagaagtaataataaagtgctatgaagaacatttaaggaacgtaataataaagtactatgtagaatgttaattagtaagtgaatgaatatcaggagaatacaaatacaaaaaatagagttattgcctttatatgctgagcacatgagcgtaataagatgggcatactttcggcaggtggcaatggagtatatggctaattcagtgagaaggttaaaaaagaaatctgttgccaagtaaactggcaatacatgaacctcagcagtgttagcctytctgtacactaattttatgatttctttttttttttttctgagacagagtctcactctgtcgcccaggctggagtgcagtggcgcaatctcggctcactgcaagctccgccttccgggttcacaccattctcctgcctcagcctcccaagtacctgggactacatgcacccaccaccacacccagctaattttttgtatttttagtagagactgtgttagccaggatggtctcgatctcctgacctcatgatccgcccgcctcagcctcccaaagtgctgggattacagrtgtgagccactgcgccttcctatggtttctgtttctcattgcggccctgactctggagctgaagtaatattaacaatgagaacggttgggttttttggtcaaagaacaggttagaggaaggaggaggaaaagtatgtcataagccaatgtggttgacttctgggaacagtctttctggctgaagcatatcataagtgtaggggaagacaagatgaaaaataaaagatagggcctgagcatagagggccttgaatggcatgctagggcatttggacgtaatttagtaagaatagggcatgactgaatacttttgagcagggaagtgattatgatcagaactatgtttatttggggagttctcagagcacttaaaacagaactatgatgccacccagcaatcccattactgggcatatacccaaaggagaataaatcattctaccaaaaagatacaggcactcatattcacaatagcaaagacgtggaatcaacctaggtgcccaacagcagtggattggataaagcaaatatggtacatatacatcatggaattcaatgcagctattaaaaaaagaccaaaataatttcctctgcagcaatgtggatgcagctggaggccattatcctaagtaaattaattcagaaataggaagccaaataccacatgttctcacttataagtgggagctaagcattggttacacatggtcataaagatggggacagtagacactgggaactcctcgagaggagagaaaaggaagggacaagatctgaaaaagtacctattgggtactatgctcactacctgggtgatgggatcatttttaccccaaacctcagcatcacacagtatacccatgtaacaaacctgtacgtatatcccctgaatctaaaataagagttgaaattattttttaaaaaactcggccaggtatggtgggttatgcctgtaataacactttgggaggctgaggtgggaggatctcttgagcccaggagttcgagaccagcctgggcaatatagcaagaccctatctctacaaaaaaaatttaaaaataaattagttgggcatagtggtgcatgtctttagtcccagctacttgggaagctaaggtggtaggatcacttgagcgcaggaggttgaggatgcagtgagccatgatggcaccactacactccagcctgggcaacagagtgagaccctgtctaaaacaaacaacaaaaaactatgtttagaataagacatttgaagaaaagtagcatagaatagatacaataaagtggcagatcatatgtgttaatttgtatttgtggaatgagtgamtatgtgagccctcctaattccctagagaataagatatactacaaaaaagcatagcaaaggagtagctttgttgtgctgacccaaattttatttaagcagagttctgacatagggagacgaggagtaaggcaaactgattaaacatgacatgaatttgtaacctatggcatgaccacacctatagagtattgatttatggactattgtcacttggaggtaggtttctaaaaacttgtcacagaataagttttagtaatctattgcactacatggtgaccacagttaataataatgttgtcatttttgttgtttttgagacagggtctcactctgttgcccaggcgggagtgcagtggcacgatctcggctcactgcaatgttcacctcccaggttcaagcaattctcgtgcctcagtctcccaggtagctgggattacaggcatacagcactacacccagctaatttttgtacttttggtagaggagggtttcgccatgttggtcaggctagtctcaaactcctggcctcaagtgatccacctgcctcagcctcccaaagtgctgggagtgcaggcatgagccactgcacccaaccaataatgtatatttcaaaagtactaaaatagatttttaacattcttaccacatcaaaaaaaaaaaaaaaactggtgaggtgatgggtatgttaattggcttgatcaaatcttcctataatgtatacataggtcaggctgggtgggcatggtggctcacacctgtaatcccagcactttgggaggccaaggcaggcagatcacttgaggccaggagtttgagaccagcctggccaacatggcgatgccccatctctgccaaaaatacaaaaattagccaggcatggtggcacatgcctgaaatcccagctacttgggaggctgaggcacaaaaatcacttgaacccaggaggtggaggttgcagtgagccgagatcgtgccactgcactccaacctggatgacagagtgagactctgtctcaaaaaaaaaaaaaaaagtatgcatagattaaaacattacattgtaccccatatatacacacaattatttgtcagttaaaattttttaaaaaacaaattgttacagcactctgtctataagagagtgaaagatgattcagttttcatttcacagacattttcagagtgcttgtcacattatcagcactatgctataggtgatacagctttggattcaactggggattcaactgtgagtaaggagttaacagactactaggagagagggatgtgtaaataactataactatgttttaagtggttttgtcaaggtgagctcaatatgaaaatatattttatataaatttataaaatcatatcaccctgtatgaaactctacttatgctttaggggacaattttctagtgaactttaaaaaaacagaatttttttggcctataatcccagtactttgggagactgagttgggaggattgcttgagcccaggagtttgagaccagcctgggaaacatggcaaaaccctgtctctacaaaaaattgttttaaaatagttgggcatggtggccctctcctgtggtgccacctacttgggaggctgaggtggaaggatcgatggagcctgggaggtcgaggctgccatgaaccatgatcacgctactgcactccagcagcctgggtgacagagtgagaccctgtctcaaacaaacaaaaagaacttttcatgttcaaagaatgtatttttattttaaaataatgtgtgcctagtaaggcatatttgaacttcatagaaaagcaaaaagaagaaacaaaatgtcactctcctggggaaaaaaatgcacaatttgcatattgtatatctcttctaaccttttttcccctacagtggtatctgtagatcttagatgaagctataactgagacttaagtgaacatgcaagtagcattagatcttttaatttaggctttttgaaaaattaattttatgtatttatttattttgtttaggactatacagttgacaaaacccatattaaagcagaatgacccatctctgtttgaatatgctcacaaagtgcccctccagctgaatgtgtagcatgtgaactcaggtgattcatttcactgttctcattcttcataggtgcccctgaccccacagctggggccagcattgacgatgagaactgttggcatttggatgaagaacaggtgaaagaacaagtgaagctttttctctcccagggcggttactgtggctctggaaagcaactcaactcaatgtttgccaaggtaagatatgaaaaggtgtttttcttttgttgttgacaaaagaagcttaagtcagactgggcacaccacacttcaggcttcatgcattatacctagctcacttgacatagctgaactgaatacttgaaatctagtgggagaggctgaccagacctgagcaggttgcatccaaggaggcctcccacctcaacctggtagtcctgttccttctgctctgctctctaaaagagttagtattgctggggcattttagcaaggaaactaccttccctctgcttttaatccagtgctgcctgatgaagcctgaagactagagtttcaacattgttcctaaagacacttaatattttgaaactaggggctctcacagcaggctgtttttcttttcttttttttccccttaataccttcagtgagatataattcatatactatacaattcacccatttaaagtgttaaaattcagttcagtggtttttagtatattcatagttatatgcaaccatcaccacaatcaactttaggacattttcatcacctcaaaaagaaaccctatacccttacctatccctcccttgtcctctatgtctccctccctcagccctaagaaaccactaatctactttctgtctctatagatttccctattctggactttcatatgaatggaatcattcatatagtatgtagtcttttatgattggcttccttcactcagcataatgtttttaagattcatcagtgtcatagcatgaatcagtacttcattcctttttatgtctgaacaataaatgtggatttattgttcaaaatgtggataccctacgttttatttatccattcatctgttagtgaacatttgagttgtttctaccttttggctattatgaatagtgctgctataaacattcttgtataaggttctatgtggacatatattttcatttctttcttggagtggaattgatgggtcatatggtaactctatgcttaatcatttgaagaactgccagtctgttttccaaggtggctgcatcattttacgttcctaccaacagtgtatgatgtgtcaatttctttacatcctgtccaacacttgttatctgactttttaattctagccatcctagtgggtgtgaagtggtatcttattgtgaacatcaggctttcttggtacatgcagagatcttgcttacagaacaagaggccttctttctggctcttttggatatggtgtactcagatacttcatcttcacttccccctcccccacttccttctcctcctacttttttgtgatacacaatcaccaatcccttgccacttcttatgtgtcaggttcgagaaatgctgcggatgagagattccaatggagcaaggatgctgacactaataactgagcagtttgtggctgacccacgactcacactctggaggcagcaaggaacaaacatgacagacaagtgcaggcagctctgggatgagctaggtaagttcccatcattcagagaagtgctttgttctaccatcttgccctgtggcaacagtgtttatgarcccttgccatcagtcgttgcatggatcttgctaagtccagctggtagaagacttaggttctacagaggccacccagagtaacactgaactcacttttgttgcttccacagcattgtgctttgctattgacatcaagcattctgttccagatgttaacaagtggaaacctttgttgagagaaaacctctttgcttgtcttctgtttcatggcagtaacctggctctccaaatacttatcagcctcacttttgttgcttttcccgagtctgctgttctgtatcactcccagccagacctttaagacgtagggcagtttccagtacttggacttaaccttctattcttccttcattatattcccttgataactttttttaaaatatcatagcttcagagcttacttatatggtcatttcacctttatattctttctactcatctgagttatagtcccacatgagtagatgtccactgaccatttccaatgagaaatcaaaaatgaacttgggctttctcctacaaaaaaaggctcttgtgactggcattggcaccaccattccttactttaccaaacttattgctaagcactcatttttctttcattccctacatccagtgaccaactttatttgatttctcaacctttaaaatgcaatgtagtgtccattcccccgtgaaacttttagattagattagaactgtgaccttctaatggcctcactgttctaggttctccctcatcaaggcagtcctctgtggccatcatttctctttagcattcccttgctctaagaccagttttgcaatgctaatacttcttgccctgctttcagaakcttccataccctgaactcagggtcacacactagtaagttttggctctaacactggaagcccaatctgtctgactttaaatcaaatatccctctgtaacatctccctcaattctatcttaagtccttttatttcttcaaagtgcatgttccttaagaacttgaagttagccttgggagagtcagtttcatctgaggcctgaatgtcttaatttctgaaccagtcacaggattgtgctgtgaacttgggctttacctctgggacaaaggtagttgggaggaagtaagtagagatggctcctggtgcttttgaaactcttgttatatacttgggttcattatgaaaaactcttgcttctggcattttcatatctaacaaattactgtacctaccatccaagaaaccctcagcattctgctaagacagtggttctcaaacctttcagaatcacctggagtacttgtttaaacagatcactgggccctatcccgagtttctgaattagtaggtttggagtggagcctgagaatttgcatttcaaacaaattcccaggggatgctgatgctgctgatccagagaccacactttgagaaccactgcacttagagaaggcttattaggttagacactagaacacagtgcattcatgcttcccctaactattctaagggctcccctagctattcttagggctccttacagatcacaaggcctatacacctatggagaacctaggcagggtttgtaggaactacaaatgtagagagaaatggctcactactttccatttctgaactagagaaaatgggaccgatcacacatgaagtttcatcatctccccacctacaaatctactaatgctttctatgtctctacccatatggtttgccttctcctctattaaaatccataaagtatctctgctgtcatgaaaggccaacccttacgtgtttgctctgggttctgttctatctccttttctcaagaatgttgctcctacaattatttctttgcttgggcattattaacttttttctctctacaggatcatttccatcagcatacaaatatgctctaatatcttttttttttttttgagacagagtctcactctgtcacccaggatggagtgcagtggcgcagtcttggcagtggcacagtcttggctcactgcaacctctgcctcctgggttcaagcaattcttctgccccagccccctgagtagctgggactacaggcatgcatcaccatggcccagctaatttttgtatttttagtagagatggggtttcaccatgttggccaggctggtctcaaactcctgacctcaggtgatccacccacctcggcctcccaaagtgttgagattacaggcgtgagtcaccgtgcctcacctgctctaatatctttgatctcaaattttaaaaaatactcctttgatattccaactgtcctcaccaactattaacccatttctcttctcccctttgaaataacacttctttaaaaaattatctgtggtcactctttccatttgctcccctccattctttcttgagcccactccagttgggtttccattgcccattgctgccagtctcctgaagtagctgttgtcgaaatcacaaataatttccatattgctaaatacaacagtcacttctctgttcttatcttacttcaaaacgcttagcagttttcagtatacttgaccatactcttttatttttccttccttttgtagcaacagggtctcgctatgttacccaggctggtcttgaactcctagcctcaagcaattctaccgcctccatctcccaaagtgctgggattacaggcacgagccacatgcccatactctttctgaaacactcttctcttggtttccataactgcatacccactgggtttccccactgtgttcctggtgactttcactcagtctcctttgcagacttctctgcctttcctcaacccttctaaatattgagtgccccccagcatccactttcctgtttacgttctctacctaaatgattatatattcagtcccatggctttaaatactatccagatgcagataaatcacaaatgtatgtctctagccctgatctttcccctgagctccaggctgtgtccagctgcccatcacttctaagaaacatctcaaagttaatacagacatcacagaactcttaattttcctgccaaagccttgttttccccttgttgtcgccatctcaatatatagcatcaagatgtattatcttgttgctcaatggccaggcacggtttctcacgcctgtaatcctagcactttgggaggacaaggcaggcagatcacctgaggtcaggggttcaagacaagcctggccaacatggtgaaaccctgtctctactaaaaatacaaaaaactggccgggcacagtggctcacacctgtaatcccagcactttgggaggccaaggcrggcggatcacgaggtcaggagattgagaccatcctggctgacacggtgaaaccccatctctactaaaaatacaaaaaattagccaggcatggtggtgggcgcctgtagtcccagctactcgggaggctgaggcaggagaatggcatgaacccgggaggcgagcttgcagtgagccaagaccgtgccactgcactccagcctaggcgacacaatgagactccatcttaaaaaaaatacaaaaaattaaccgggcatggtggcaggtgcctgtaatgccagttacttaggaggctgaggcaggagaatcgcttgaacctgggaggcagacattgcagtgagctgagatcatgccactgcactccagcctcggtgacagagcgagactccatcattgctcaagaagaaaatttaagggttatccttgattccctattttcttttacatccaaaccaagacctgttgatcctcagagttagaggactgaatgagataaagtgcttaacaccttaattcctagctgatgaaaagaaatcagtgatagctattattttattatatttaatatttaataattacgtaaaattttaatttccatagtagctacctttgctttgagtttttgatacttttaaaattttttgttgttgttttttgagaaagtgtctcactctgttgcccagtctggagtgcagtggtgcgatctcagctcactgcaacctctgcctcctgggttcactcaattcttctgcctcagcctcccaagtagctgagactacaggcgcgcaccaccacgcccggctaatttttctacttttgtagagacagggtttcaccatgttggccaggctggtctcaaactcctgacctcaagtgatccacctgcctcggcctcccaaagtgctgggaccatagacatgagccaccacgcccaggccaaatttatttttattgatttactttgagacaggatctcactgtcccctagrctggaatacagtggtgtgatcataactcactgcaactcaaactcctgggatcaagaaatacttccacctcagcctcccaagtagctgggattacaggcagaggctatcacactcagccaattctaattttttgtagaggtagggtctcactatgttgcccaggctgatctcaaactcctggctttgtgatcctccacctcagcctccccaagcactggtattacaagcatgagacactgtaccaagccaacacttttttttaagttgtaggaaaatatgcttctggatactgataacagtcttgtgagtgatgttttatacaggcaactagtaggattttttgctttgtctctttctcagggttgtaattgtattgaaacaaatttataaggatgtaattaataagacagaaaactcatttgtaacttataggtgaaagtacttgtgctcactttctagggatccttttttttttttttttttttttgaaacagagtctcgctctgtcgcccaggctggagtgcagtagttcaatcttggctcactgcaacctttgcctcctggactcaagagattctcttgccttggccacctgagtaactgggattataggcacacactatgatgcctggctaattttttgtatttttagtagagatggggtttcaccatgttggccaggctggtctcgaactcctgacctcaagcaatccacctgcctccgcctcccaaagcrctgggattacaggaatgagccaccgcacccggccaggatccccttcttaatatcaaaatgcctaggaaattggaactcctccaggactagaattagcaccctgtttctttacctcttaagcctctcatctcacctaatctgttttccattcctattatcctattgattttgccattcctaaggtcaccagagttcttctgaagttgccagatttagtagcttctttttttggtcctcttttttacctgtgaagattaaatatgaaaatctgtttctacactatagatgaaaagcccttcttaaactgtaaaataaatgttactataatcccctaaagagtcactgttgtaagtatcagttccttttttcttttttttttttttttgtttgagacggagtttcactcttgttgctcaggcttgagtgcaatggcgggatctcagctcactgcaacctccgcctcccagattcaaccgattctcctaccacagcctcccaagtagctgggattacaggcatgcaccaacacacctggctaattttttgtatttttagtagagacggggtttctccatggcagtcaggctggtcttgaactcccgacctcaggtgatccgcccacctcagcctcccacagggctaggattacaggagtgagccactgcacccaacacataatatagtttctttttcatggtacatttaaaaaattgaattgaaaaaatagaaatgagggttttttctttttttttttcccatcacccatgctggagtgcagtggtgtgatctcggctcactgtaacttccacctcctgggctcaaacaatcctcccacctcagcctcctgagtagctgggaccagctgggtgcataccaccatgcccagctaattttttgtatttttgggagagacagggtttcaccatgttgcccaggctggtctcaaactcctgagctcaagtgatctgccctccttggcctgccaaagtgctgggattataagtgtgagccacagcacccagccagaaattaattttcatcttcaattaatatctgaaattgaggctaagatggcttttcaaaacattcctatttggctttgagaggctttgaaatagtgtccaaatgtacttctatccatggatgtaactacatcctaaaggatgtttatattaagacatactgcagccagccatggtggctcacgcctgtaatcccagcactttgggaggccaaggcgagtggatcacctgaggtcaggagttctaaacaaacctagccgacatggtgaaacctcatctctactaaaaatacaaaaattagccgggcatggtggcggatgcctgtaatcccagctactagggttgggggtggggtgcgagggggggcgctgaggctggagaattgcttgaactcaggaggtggaggttgcagcagtgagccaagatcgccccatctcactccagcttggggggcaagagcgagactttgtctcaaaaaaaaaaaaaaaatcccaagaaagtaatggttttaaggcatcacaagttatcagcagtttgaaaatccaagtccaaataaattatttttcttggataagcaaatacyaagattctactatgtgctaggtaatatgctagaccctttacaaaggttatctcattaaattctcacaatatccctacaaagtaggtatttttatgatctcagttttacaattgaatgatttgatgaagctcaggaagttcagctaagcaaaaaaataaaaccttttctgacttcctcgcttccaaccatgtccttgtgttaaatgcccttcctctatgctgctttcataccctgaacatatctttatcttaatacttatcatattcaaatggaattatgtttatttatctgtctccctcactagacagttcctcaagggtaggaacagtgtctgctttattcaccagcacagagccttaacataggaggctcttaataaatatttattacactgcagatttgagctcagagttcaagcctaaatctgtctttatatcacaggcacacagattgaaataagatagtcactctactttaaggaagtgttgggaaggaaaaacaagccagttctgaaaatcttagcaagttttttatattaagaaaagataatgctttggaaactttctctaccatctaaaaatgaaactgaaacattaaggcttacacacacatcaaaggagagatgttaagaatatgggttgctttattttccaggggctttatgggtgtgcataattttaaatccacactgcaaactggaggagaaatcctgctggctgcagcagctgcagaagtggagcgacctggatgtctgtcccctggaggatggaaactatggacatgagctgcccaacatcaccaatgcacttccccagagtgccattcacagcccaggtgagccaagtgtccttttaggctctttgtacctggaacttcaaaaggtgggagggtaaaccctagaacaatggtagctggatagccttttagctgtcagaattgccattctaaataagaaaagcctgtgtttttattcatcttgaaatgccgaaccttaagtaaggataagcttttatctttgacattgagttgctgtccttttccacatctagagtgtccttacagtgcccagcataatgtcctagagcctctgcgtgactcctggtctactcttctggttcttcatgtctaatgtattaaatatcttggcttcagttggggttggttttagctgagacctaacttaggggaggaacaaaagacctgtaagaagcaattttaaaaagtgtcctgaccatagcttttcttacttctgttttcctcaaatttttatacagcaaatagctgggtgggatcatcctcccatattattggtaggattcctgccccattttaagacacatccagtacagtgataccataccctccaccctttgagcccactcgcctacagacatcacttgacatcagcattcgtatcagttttagttcaactaattcagtctatttgatgttgtcaattgattattctttagcctattgagagcctttattggtagaagattttatcagacactgattttacaattggttccttttattttattttatttggagacaaggtctcactctatcccccaggctggagtgcagtggcgcgatcttggctcactgcaacctctgcctccagggttcaagcaattctcatgcctcagcctcccgagtagctgggatttcaggtgtgagagccaccacgcccrgctaatttttgtatttttagtagagatggggttttgccatgttggccagcctggtcttgaactcctgaccccaggtgatctgcccaccgtcagcctctcagaatgctgggattacaggcatgagccactgcgcctggcagttccttttatttcaaataactctattggtattttcagtctcaaggaggaaatcatgaaaatttttgtttttgtttggtcttattctgtaccataattagttgtcagtatatttaagacaactaaggtaatgaaagaggtaaaggctacaattttgccacttctttaccctttcctggcattcatctagcttccacaacacaggaagccatctctttgatagtggctttggatagcatagagagggtcaaatgcatacaaacacatgctttgttctgttgcccaggctggagtgcagtactgcgatctcggctcactgcaacctctgcctcccaggttcaagcaattctgctgcctcagcttcccgagtagttgggactacaggcgtgggccaccacacctggctaatttttgtatatttagtagatacagggtttcaccatattggccaggctggtgtcaaactcctcaagtgatctgcccgtcttggcctcccaaagtgctagtattacaggcatgagccaccgcgaccagcctggtctggcagtttcttccttgtcataatatattggttctttgttgttgttagctctcctttgaagatgttgctgcttctaaagccttctcagattgatatcaatgacatcaatcaggatgtgattgatacctctctcacatccctttacctttggggctggagaagcagttgattcctgcctattcttcatagtcatttctacataattcttcctaccttcttaaaatacccccaggtttaagtttctgccatcaaactatactgtctgccaccatcctggtttttgtcatctgtagacctctgggtcaatccctctcagtccttgaagatttttagctattggcttagtaatactactttctatcactattctgatcataattctttttttaatttctttttttgagactgggtctcactgtgtcacccacgctagagtgaagtggcgtgatctcgtctcactgcaacttctgtctcccaggcttcagtgatcctcccatctcagcctcccgagtagttgggactacaggcgcaagccaccactcacagccaaatattttttgtgagtgtattttttgtagagacagggtttcgtcatgttgcccaggctagtctcgaactcctgagctgaagcaatcctcctgccttggcctcccaaagtgctgggattataggcatgagccaccatgctgattcctatcataattcttgatgacttcagtagccacatagatgacccttccaataccctggcctctcaattatttgatctcctcttttccagtagtctcatcctctaccataacttagccattcaacctcaaaatcataccctaaaccttgacattaccaaaaactacaccctcttcataatctcaatttcatgcatcaccagttaccaccatcaatcttgctagcttcttttctttagtatcccagtttcaataattcttttacccactaggaatttttgtcttactgtgtaagacaaaatgtgttttcactctgatagcctcattttcctcctcatccacgttagagtccttggtaactcattacaatcactcctttgcatacacacttaactccctctttgtctttgatacactgatggaaaaactctaaacttagttcattccagctctaattacttggtacacttgcacagctgaatatggctggagagaaacaaccatgccgggcacagtggttcctgcctataatcccagtactttgggagaccaaggctggcagaacccttgaactcaggagttcgagaccagcctgggcaacatggtgaaatcctgtctctacaaaaaatacaaaaattagccaggtatcgtggattgcttgagcccaggaggtcaaggcttcaatgagccacggtcatgccactgcactccagcctgggcaacaaaatgagaccctgtctcaaaaaaaaaaaaaaaaaaagaaaaagaaaagaaaaggaaagaaagaaagaaagaaagaaagaaacaaccataataactggtcttattttaagtttatgaccactcatttcaagtgggtcctcagtactttctagacatctagtacatttccctagtctgtgccatctttcactcttataaattactatttcacaccatctttttcctaaaattttctgtacttcctctccttcctcagtttcaactgaggcttgcttcctgtttactaaaaataaagaagcaatcagaagagaatttccaaaactccaccaccacatctggtggtgatgggtcaaaagaaatactgttctagaaggtcagagaattactgtctttgcccatctactctgcctcttcccctgttgcagtctatgcttctaaatccaagccctccagttgttctcaagatcctattacatcacttttatctaggacatcactctaggaattaacaagaaattatttcctctctctcctgcatctccaatttttcactctccatgaattattcctgagtgtacaagcatattgttatatttcccataccaaaacaaaacaaaaaacactctcatgactccacgtgcctctctgggtggtagaaatgggtggtagagttaggaaaaatcattaaaaagaatagtacagatttgccatctccrtttcttctgttcttagtctcccttgaattcactccaagtcaggctttcaatccctaccattactgaaacagctcttgtaccggttacttatgctaactgttgctaaatctagtagttgttactaatgctaactgttgctaaatctagtagttgttctcaactgatacttgacctatccgcagtatttgacacattagtcacactctccttgaaactttgtcatttgacttccaagaaaccattctctctcggttctcagttcattgaccgttccttcgaagtgtctttactgtctctaccccatttcccaatctaaaatgccatagtgcccagggatctgtcatcagaccacctctctttctttttttttttttttttttttgagacagagttcgttgcccaggctggagtgcactggtgtggtcttggctcaccacaacctctgcctcccaggttcaagcgattctcctgcctcagcctcccgagtagctgggattacaggtgcccaccaccacgcctgactaatttttgtattttcagtagagatggggtttcactatgttagcctggctggtctcgaactcttgaccttctgatccgctcacctctgcctctcaaagtgctgggattacaggaatgagccaccgcgcctggctaccacctctctttctatacttctttgttgattgcattgttttagtaatcatttacatactaacagctcatatatgtgtatcacacacacacacacacacacacacacacacacacacatatcttgcccagacctttcctctcaactctagatatgtatatttaactgcctttttgatatctccatttatctgttaacaggcatctcagtaggattcctacccctcaagccccacgcaaacctgctcctcttgcagtcttcctgtctccatatatggcaactctcttaaaaaccttggagtcattcttaattctttactctctctcaccccagctgtaatccatgagcaaatccaatatattgcctttatctttgaaatatatccagaatccaactactgctcatcatctccactctttatttctctgccaactaccatcatctctcaaaaattattgtagtgcccacctgacttctccctcttcttctgcccttccaccttataacctattctcagtactgctgccagagttatccttttaaaatgcaagtcccatcatataccttcacagctcaaagctcttcagtggcctctcatctttctcaaaaacccaaagtcatctttttctcatggtctacatggccctccatgatctagttctctaatatgtctctgacctcatctcctgtgattctcctgcttgctcattccatccaactatactggcctcctcactcttctcaaacactccaaatatacttctaccttaggacttagtgcttgcggttccttttgcctggagaccattctatatatgaataaaacaataaccccctgcctaacaccagcttgcttttctccctaactctgctttatactttttcatagcactcttaactgtacgacatatctgatatactatatatttacttaactgtctctccctagttgaatgtaaaggtccataaagacaggaactttgtatgtcctaaacactaagaacagtacctactgtatagtaggcagaaattatttgctgatttaatcaatttaaaaatatattgggagcccagtgcccactgtgggttgagcagaccggtggattctcagttcagcagtagaggagcttagattccagccagtagaagagtcattgtgctttctgtgagggacaacatgaaggagaagcaatttcagtaaatactgtcagtgctactctaatgataatatccttcaaccatctgagcctgtacccaatgggatgtattaaattctaaagaaatgaccagattccaaggacttttcccgaatggttgaatatgttargttctttcatattcagtatgaattctctgacattccctcataatttttttgcacagaatcagtaggtacacacctcatttgggcatctctggaaatgtccgtacagtataatacttcagttcttgatcccaaaatagtttaaattgccattaatctggcaaagcatcagttaaatgactccctcatggtttcttattaccttaaatatcatttccatgatcctccctaagtctgtggtttgtggcaagatatcttccatttggtcctcctacataccacccttaagagttgagcctacatttttgtctgcagttttggtttccctgcagcccttttcctgaagggagatggcatggtaagactccagtgagaaaacaagtttgtcttttattagcatcagttttttctttttcttttttctgaggcatgatctcgctttgttactcaggctggagaccagtggcatgatctcggctcactgtggcctcaacctcctgggctcaagtgatcctcctgactcagcccctctgaatagctgggaatacaggccacgccaccatgcccggctaatctatatatatatatttatatatatatatttatatatatatatatatttatatatatatatttatatatatatatttatatatatatatatatatatatatatattttttttttttttttttttttttgagacggagtctggctctgtcgcccaggctggagtgcagtggcgcgatctcggctcactgcaagctccgccttccgggttcacgccattctcccacctcagcctccagagtagctgggactacaggcgcccgccaccatgcccggctaatttttttgtatttttagtagagacggagtttcaccatgttggtcaggatggtctcgatctcctgacctcatgatccgcccacctcagcctcccaaagctctgggattacaggcgtgagccaccgcacccggcccaatttttatattttttgtagagagcgggtttcaccacattccccagactggtctcaaactcctggactcaaacaatccgccagcctcagccttccaaagtgctgggataacaggtgcgagtcatcacacctggcctcatcagttttttcttattgggaaagaagactgtaagcctgcagatatcagtgtaataaaggtacctgaatatacagagcttcagctctttctctctctctctctcttttttttttttttgagatgggattttgctctgtcacccaggctagagtgcagtggtgtaatcttggctcactgcagcctctacctcctgagttcaagtggtcctcctgccttagcctcccaagtagctaggactataggcatgtgccaccatgctgggctaatttttaaatttttattttttgtagagacagtgtcttgctatgttgcccaggctggtcttgaactcctggcctcaagtgatcctcccactttagccacccaaagttctgggattacaggcaggagccaccatagcttcagctctatttcaactcttaatatgaatttcatgaaagtccttggtctgataagggaaagttagtatgaaacaagttacagattggccagggatattacctagcttcttctctctacctttgaccttgatagaagcagtttgtgtcttcatgactgagtggctaagcaccactactcctcttctatttcatgtagcttctggatctcaggagaaattagtcttctgtagaaggaggaagtaagccatagatctctgtgggaaggttattcctataaagagcacacacacactgaaagcttatccaagaaggaggcaacacaacagatactcagagagattgcaagtggctgctctcattgcccttccttataacctgttctcaatactgctgccagagttattcttttaaaatactattattcagccaacctcccaccctgaagaagacccagggcttaaaacttcaaattgcctgtcactgtactgctgcatgttcttctttctccagactccttatccagaccaagacgaacagtattcactagagccattgaggggcgtgaattacattggcaggatagccacctacagcgaataatcagcagtgatgtttatacagctcctgcctgccagcgggaaagtgaaagactactctttaattcccaaggccagccactgtggcttggtaagtctagccctcctctaagaactttagagccaccctcacttcatgccaggcccaaatgagccatcttcatacgtacctgcaactcaaactacaatttggacagttttcacacagatattttggggcttttattagggatatttatgtgaagcctaagccatttgcatgtatactcagttgtgatacagcaacctcaaataagaatttgcatcctgtcctctaagttttgagggggtgaaaggagttaatgcatctcaaagagcattaacaaagcaattaggcctcagttcacagcttctctgagttattgagcaacattatagtctactctgaaattacatgttttgttaaaaaagcactaatttgaattttttaaaatctcctatgctagtaagtagacacaatctgcatttgtcaccaagcagtcttccttttctcctccccaccttcctaccttcgttcatgataacaggatagagctgtttcattgtgagtttaaaccctcctctgaaatagtttcctggctttccctcaatcaacctgtccctgactttatcaaaggatacccatttcaaaagagayattctttttaaaatattcattttccaagccttacagcaatgacatacattttcattgtcttctcccaattccctgcctccatctctcacaccatatctttgtcttgctcaagattttgctgaatctagatatgcccctctctctcttgaaagcaatagccagactcaccgtgtcaccacctgaagtttcctctgatcatctttcttctcctgtgatccagcacttctgaaacgtaaatctaataagcatgtgaaagaatatacatctcattaacaaagatgcaaattaaaacaacactgagcattttttgattttcaaatggtcaggtgtttttaattaagataattagtttctggtgtgggagaggttacatggagctaggtactctcatttactacttataggagtgtaaatacttagtctttctgaagggtatttcttcttatcaaaagccttaaaatatgttcatcccatgtgatccaggaattctacatgtaggaatttatcctgagccataattaactaaggatatgcatatagctaaggggctcattacagcatggataaaaataaggtacagatgagaaaaattgggaaccatataaatgtccaacaataggggattgattagctcaatagatatacatgtattcaccagaattatatgtaatcatttttaatgttatagatgtatatttgataacatggaaaaatatttacaatgtgttattaagtggaaaggccagttacaaaacagtaagtataataccatcccatttttagtaaaaacttactaggctgggcgcagtggctcacgcctgtaatcccagcacattgagaggctgaggtgggtggatcacctgaggtcaggagtttgagaccagcctggccaacatggtgaaaccctgtctctacttaaaatactagaaattatccgggtgtggtggcacacatcggtaatcccagctactcaggaggctgaggcaggagaattgcttggacctgggaggcggaggttgcagtgagcggagatcacaccactgtactccagtctgggtgacagagtgagactccatctaaaaaaaaaaaaaaaagttactagaaaagtgtgagtaaatatacatgacactggaaagagtgattatttctgatttttattttatatttctttrtatgtattttcaaattttccrcaattctataatttttaattttatctttaagaaaaaaagcacaaaataaaccataaagcttgttatagttactcacctatttgtaagtctttggtttggtagtcttccattatccctaaggtaaattcaaactccatagaatggcattcamagctgtttacattccagactctaccttttccaggctatcttaggccacataacataattctaactacatggaactatttgccatactctgaagatggatgctattaatatattgaataatttttatgcttttacaatatgcccttgcttatgtttcctttgtcaggaatgtctttccctgtttgtctacctgtttgaaatcttacttgtccttcaaagcacagctcaaatattattttctctctgtatatatttctatcatgttacttctttttagctgctttataattacatttatgtatcatttgtgagctctttgagggcaatgaccatttcctattcatctttgtactttctttgcccagcatactccctggcatttaataggttttcaggaaatgtaggattaattaaatgaatgagacttttcccattaggcagttagttgctacctccattggtttcccatagtataatatatgtttgcaaagagaaactacattttattatcctacttgtgtgtccctttctacaccatagaccacgctgaggctgcaaggtagctctttcaagatatcacctgtgatttattcaactttttatatccttaaagataaagacacagttcctggtatacagtaggtgtcaggttgaatttgaggaactggactgaatacaaactctctttgtcaggtataaattttcctgacttgaaattttaactagaccaaaatatcttcttcttacttggtagagcatgtgcctacagcctgtgctcgagttgacgccctgcgttcccatggttatccaaaagaggccctcagactcacagtggccattattaatactctgaggttgcagcagcagcggcaactggaaatctacaagcatcagaagaaaggtatagtaattaggagccatctaacccccttaggcccaaagctgatgaggatcctcaggggatacaaggcccagaagaactagggaattccgggtcattctccttgctgtgtggaatgcctcactttatctttatgaatgtcagttttctcatctgttcatttgggaataatacctgtttgcctccctcataaggcagttagaaggctcattaagatctggtatgagaagaccatttttaaactctaaagctgtggacaggcatggtgattcacacctataatcccagcactttgggaggcccaggtaggaggattgcttgaggccaggagtttgagaccagcctgggcaacatggtgagaccctatctttacaaaaataaaataaaggccaggcatggtggcttacgcctgtaatcccagcactttgggaggccgaggcaggcaatcacctgaggtcgggagttcgagaccagcctgaccaacatggagaaaccccatctctactaaaaatacaaaaaattagctgggcgtggtggcgcgtgcctgtaatcccagctacttgggaggctgaggcagaagaatcgctggaacccaggaggcggaggttgcagtgagccgagatcacaccattgcactccagcctgggcaacaagagcagagctccgtcttaaaataaataattaattaaattaaattaaattaaatatgccaggcacagtggctcacgcctgtaatcccaggactttggtagggtgaatcgggtggatcacttgaggccaggagttcaagaccagcctggccaacatagtgaaaccccagttctatcaaaaatacaaaaattgtcaggcatagtggcacatgcctgtagtcccagctactctggaggctgaggcacgagaattgtttgaacccaggaggcggaggttgcaatgagccaagatcacgccactgcactctggcctgggcgatagagcgagactctgtctcaaaaataaatttttaaataaaattaacagggcatggtggcatgtgcctgtagtcccaactattcagaagactcaggtatctcttaaaacaaaaacctgtaaagctctatccacgtatgcactaccagcaggcaacccaaatgcagaccacgtgaccttatagctggctggtatgtttgtggccagccgtatcaacccaaggcaagacaatagagaagmttttatttgactctcagggtcaaggctggagagactgataagaagacccagrcagggacagacagcagtttgtctctatcactgtctaaaattttaacctgcttgtttccagaactgttgcagagaggaaccacaacsatcacaaacctggagggctgggtgggccaccccctggatcccatcgactgcctgtttctcactttgactgaggcctgccgcctgaatgatgatggctatctggagatgtcaggtacaggggtcagcctgaggcaaaccaagactgcccttgttggttagcatggtggctcacacctgtaatcctagcattttgggwggccaaggtgggtggattacttgagttcaagagttcaagccagcctgggcaacatggcaaaaccctgtctctacaaaatattagccaggtgtggtcagtcgcctgtaatcccagctacttcggggctgaggcagtaggatcacttgatcccaggagatcgaggctgcagtgagtcaagatcacaccactgcactgcaatctgggtgacaaagtgagaccctgtttcattaaaaaaaaaaaaaaaaaaaaaaaaaaagactgccctcgtcagcccttttctcccttccagactctgttctacctccttttgaagttttttccccctcttgtccaaactagagcaccctgagaggtttcttcatgcttgcccatttcccaccttcctttcctaccctttggtctggccttgtcctgattttgcattttaccttgccagccttccttgttccttttatttccctatcataaatgcctaaagaatgtagtccaagaagaataacaagtgatagagaaattttagcagtcagaggcgagaacctagagcagtctgaaagtgggaaagaacttccattaagaatctgtgtatcccttgcaattgcataataatattttctggtttcctttgaactttcttccacatgatggttttgtaccaattttacaaataagaaatagaggagaataatttaatagagcctcaagactctattagagtagccaagaatagatagagacaaaattgattcttttttcttttataccttcacttactgtatacatatatctactttagtatttagcatgctacattacaatttatttacaaatagttctctcttactagactgtcagctacttgaaaacagaaattatgacttctttatctttgtgttyctagcacttagtggaggacctgacatttaacaatctttcataaatacttattrgatagatgagggagaaaagaaaagaaaccaagaytttgacttttaaaccgtgcttacttcctgaaattgtgcacccactggtggagcatatgagataatagtaacataaaggttgcaaatgttacaaaagttaagagtttaactgtagggattcagatttctctgggtagagatataaggggtggccccaagccaagtgcaggctgctccttatcttccctctgatcccttgcaaagtgaatcatcatctttggtctgtttcatctgtacagtgacatttacatcttggaaacctgagtttgcacttgggtttattcattcaccactaacacatagcaatacctagaacaacaagatggtctaatccctttaaggtgttcacattctatgaaagagacagaaacaaaaacagacaattacagcattacataatgtgctagcaaaatataagattttatacttccctaactggcttagccagttcatatattaagaaggagatgggccgggcgcagtggctctcgcctgtaatcccagcactttgggaggccaaggcaggcagatcacctgaggtcaggagttggagaccagcctggccaacatggtgaaaccccatctctactaaaaatataaaaattagctgggtgtggtggtgtgtgcctgtaatcccagctactcaggaggctgaggcagatgaattgcttgaacccgggaggcggaggttgcagtaagccgataccgtgccactgctctccagcctgggagatggagcgagactccctctcaaaaaaaaaaaaaaaaaaggaggtggggctgggcatggtggcttatgcctataatcccagcattttgggaggccaaggtgggaaaatcacttgagcccaggagtttgagaccagcctgggcaacataatgagaccctatctctacaaaaaaaaattaaaaattatctgggcatggtggcatgtgcctgtagtcccagctactcaggaagctgaagtgggagggtcgcttgagcccaagaggttgaggctgcatcagtgacccatgattgcaccactacactcccgccttagcaaccaagcaagactctgtctccaaaaaaattaaaaaagaaagaagtgtgaatctttgtggctctgtgtaacctttttttcagtatattttccttactattctggggttctgattcagcttccctatgatagctgttgaccaagctgtatcccaaaggtgggagggaaagacagaagactaggccgaatacggtggctcacacctgtaatcccagcacattcggaggccgaggtaggcagatcacctgaggtcaggagtttgagtccagcctggccaacatgatgaaaccgcccctctactaaaaatacaaaaattcgacaggtgttgtggcatgctcctgtaatcccagctacttgggaggctgaggcaggaaaatcgcttgaaccggggaggcggaggctgcagtgagctgagattgcaccactgtactccagcctggacaacagagcaagactctgtctcaaaaaaaaaaaaaaaaagaaagaagactctaccaagcctaacctaaagaatttggtgccctgttgccctcagatatgaatgaaagcagaccccctgtgtaccagcatgtacctgtggctgcaggctccccaaacagcagtgagtcctacctgtcattggccctggaagttgcactgatgggcctgggtcaacagaggttaatgcctgaaggcctctacgcacaggacaaggtatgccgtaatgaggagcagctcctgagccaactccaagagctgcagctggacgatgagmtagtgcaaacactgcaaaaacaatgcatcttactgctggaaggtaagtagaaaagagtctcttgtcacggtgtctttggcccatgaccctgagctccyctctccaatagagtacaagtacaggaacatttatgacattaaaatgtagtgaatgaaggttcccatgattagcaaacatgcatgagatactggggctcaagtccaggctggcagatggaagcatacagataaataactggctggcttatcttcctccaggaggtcctttcagcggtctgggagaagtcatccaccgagagagtgttcccatgcatacctttgccaagtatttgttctcagctctgctgcctcatgatccagacctgtcctataaattagccttacgtgccatgaggtgggtagccctttcccagtccaattgcctccaccaaagcagaagtgtccagtgctctttttcattgcttatttcactttcttttctttccctctttgtcattctgttggacccgctaccaagtgtaccttaaaatggctcagatatttttatatgatctaggattcatatctggattccttgttggtgacttggttccctggcagtactcatggttgattgtctgaggaagcccctgagatgttaataaataaggagcacttaagacytgagtcttcctgttcagtggttattcaggcaagctgagaaggggtctgagcccttctgtagttcaactcagtcaaggttcccaggcacaggtccccagaagaagctgggggaagtagagataaatatgtttaccccaagacttgagaacaatgagctatgggcatcttgtttccaggctagaataggatccttggtttaggcagttaaacctctgggatgtagcagactatacagaagaagaattttagtcagactgtaaggctgggagaataccttagctaaaacaggaaattccttggcatgtatttcttatacttttagaaataaccaggctgggtacggtggctcaagcctataatcctagcactttgggaggccgaggcaggtagattgcttgagcccaggagtttgagaccagcctgggcagcatggtgaaaccccatctctacaaaaacaaaaaatacaaaaattagccaggcatgttggtgcacacctgaagtcccagctactcaagagactgaggtgggaggatcgcttgagcctgggaggtcggggctgcagtgagctgtgattatgccactacactccagcctatgcaacagagagagacactgtctcaaaaataaataaaataaacaaccctatgattctttttaaaaatgtattaacttttctctctttttacaatatatcatactattcaacccgatagctcttgaacggcctttcacatccatttgtagtggaaactattcagcgttgagtactcttaagtgcccaggcactcacctcatayagtgtatagtaccataggtttaaaaaccttcaaagctcttagttaatcctttcctctccccagttcctccccagcaaagagcaagcttctctaaggtggctcggaagcccagggtctggatggtggctgatgattcttcctgggtcttccaggttacctgttttagaaaactcagcttctgcaggcgacacatcccaccctcaccatatggtgtctgtggtgcccagccgttatcctcgctggttcacgcttggacacttggaatcacagcagtgtgaactggcctccaccatgctgactgctgccaaaggtgagcatagatagaccttaagctccagcatcacccgtctgcctgcccaaccatggcatgtcaaaggcttggcctgcagtctcctgagaaagagaagctccttgaccatttagagtgatagtggtcctcactttgattgctgccattagaaagagcacctggccaggcgcggtggctcacgcctgtaatcccagcactttgggaggccgaggcgggagatcacgaggtcaagagatcgagaccatcctggccaacatggtgaaaccccatctctactaaaaatacaaaaagtagccgggcgtggtggcgggcgcctgtagtcccagctactcgggaagctgaggcaggagaatggcgtgaggcagagcttgcagtgagccaagatcgtgccactgcactccagcctgggtgacagagcaagactccgtctcaaaaaaaaaaaaagcacctggatccaagccaaaactttaccctagttactaattgtaggataccaaatatgtaaaattaaatgatctttaaggtacttctaagtctaaccttctgtttgataaaatcacttcacctttctacgcctcagtttcaaatctataaaatggggatcattgtcaatgacctgtcagcctcccagggccactggaagatctaatgaagtgatgactaagatagagctgaactccttacagatataagagttggtgattttttttcagtgccctggtaaaagataggcagtccaaagtgattctcaggcctttaagctcacatacatcctgttagctatgcaggtttcaccacaaacagaagtgaaagtaagcccctatataagaaggagctatgataaaatgctagccaccatgagctcctgaatattttagaccaggaaactacatggattttgaagttattttttaattaaaaataactttatgtggtatcttcttattgtccccccaaaaatacatgcttattagagaaaaggtaaaagttacatataaattaatataaaaatgatcagcaaacaaatacaaaaatagaacaaagcatatgatcagacagttcacagaaaaggagatacaaatcgtttttagacaactaaaatacctggtatcacattagaaatacaaattaaaattagcctgagataacattttttactgatcttattggcaaaaaacaaatctgataatgtgcattcatgtgaggagtgtcaagtggggagtggcggtagcctgcatggagtatcagattccaagcaggataaggaggaggactacagatctaaggaaatcaatgaaccacaagcataataaacatgaagaaaactataccatggcacatcataaccaaaatgcttaaaaccaataatagaaaatctacttaaaagcaatcagagtaaaaaagatacattacaaaggacaaaaaaacaagtatgggaacagatttctcattagaaacaatgtaagccagaaaacagtgggaaaaaaaacccttaaagtactttaaaaaaaaaaaaaattatcaggccaggcacggtggctcacacctataatcctagcactttaggaggccaaggcgggcagatcacttgagatcaggagtttgagaacatcctggccaacatggtgaaacccctgtctctactaaaaatacaaaaattagctgggcgtggtagtgcacacctgtagtcccagctactcaggaggctgtggcacgaggatcgcttgaacctgggaagcagaggttgcggtgagccgagttgcaccactgaactcctgcctgggtgacagagtgagactctgtctcaaaaaaaaaaaaamcaaaaactgtcaaactagaattttataccaatgaaaatatatttcagaaacaaagatgaggccaggtgcagtggctcacacctgtagtcccagcactttaggaggccaaggcagaaggatcacttgagaccaggagtttgagactaacctgagcaacatagcaagatcctgtctttacaaaaaattttaaaaattagccaggtgtactggcaagcacccgtagtcccagctactcaggaggctaaggcagaaggactgctcaagcccaggagttaagagactacagtaagctaccatcatgacactgcactccaacctgggtgacagagcaagaccctgactcttaaaaaaaagagagatgaactaaaaatctttttcagacaaccacagttcaattagaattcgataataaaaagatattttaaaatatcttaagtttttggaaattaaaccacatacgtgtatattactcatggagcaaagaaaaaaatcacaagaaaattagaaaatcttttgactatatgaaaatgaaagcacaagtcaaaatttgtagaatgtagctaaggttttacttataaatttttagcaataaatgaaaaatgcttcaaatcagtgatctcagatttcacttttttttttttttttttttgagatggagtcttactccgttgcccaggttggaatgcagtggcgtgatctccgctcactgcaagctccaccccctaggttcatgccattctcctgcctccgcctcccgagtagctgggactacgggtgcccgccaccacgcccggctaatttttttgtatttttagtagaggtgggatttcacagtgtttgccaggatggtctcgatctcctgacctcgtgatccgcccacctcagcctcccaaagtgctgggattacaggcgttagccactgtgcccagcccagatttcactttaagaagtcagaaaaagaaaacccaaggtaagcatagggaaggaaataataaaaatgagagcagacaggtgcggtggctcatacctgtaatcccagcacttcgggaggccaaggaaggcagatcacttgaagccaggagttcgagaccagcctggctaacatggtaaaactccatctctaccaaaaatacaaaaaaaaaaaattgcgtgggcatggtggcatgcgcctataatcccagctactcgggaggctgaggtactataatcatctgaacacaggaggtggaggctgcagtcagccaagatcacaccactgccctccagcctgggcaacaaagtaagactctgtctcaaaaaaaaaaaaaaaaaaaaaaaatcagagcaaaaatcaatgaaatagagaataatcaatgaaaccaaaagctgattctttgaaaagatcaattaaggctgggcacggtggctcacgcctgtaatcccagcactgtgggagccgaggtaggtggattgcttgaggtcaggagttagagacaaggctggccaacatggcgcaaccctgtctctactaaaaaatacaaaaattagctgggcatggtggtgggtgcctgtaatcccagctactcaggaggctgaggcagggagaattgcttgaatcagggagacagaggttgcaatgagctgagatcgtgccactacactccagcctggaggacagagtaagactctatctcaaaaaaaaaaaaaaaaagaaagaatgaaaacataaatcaaatttaaatccctgtctagactgatcaagaaaaaaggagataaaaggcagaaaygaccaatatcaggaatgagaaaggtgatatcactacagattctaaagacatcaaaatggtaataggagaatattacaaacagctttatgccagtaaattcaacaacacagatgaaatggactaactccttcaaaaacaaaactgtcagagctcacttaagaataaataaaagccagggccaggctcagtggctcacgcctgtaatcccagcactttgggaggctgaggcgggcggataacctaaagttaggagttcgagaccagcctggccaacatggcaaaaccctgtctgtactaaaaatacaaaaattagccgggcatggtggcacatgcctgtaatcccagctactcaggaggctgaggcacaagaatcacttgaactgggaggcagaggttgcagtgagccgagattgcgccactgcactccagcctgggcgacagagcaagattccatctcgatcaatcaatcattcagtcattaaaggccaaagtgactcacacctgtaatcctaacactttgggaggctgaggtgggaagatcactagaggacaggagtttgagaccagcctgggcaacatagtgagaccctgtctctgcaaaaatttaaaaactagcgggacaaggtggcacccccctgtagtcccagctactcaggaggctaaagcaagaggattgcttgagcccagaagtttgaggttacagtgagctatcgtgccactgcctggatgagaaagtgagaccctatctctaaaaacataaacaggtaggtgggtcgaaaaaaaatgaaccagctatatgtccaaaagaattgcaagcaggaactcaaacagatagttgtacatttataataacattattcataatagccaaatgttcatcaacagatgaatggataaacaaaatgtggtatatatagacaatggaatattattcagccataaaaggaatgaaagtctgatacatggtacaacatgagtgaaccttgagaacatgctaagtgaaataagctagacacaaaaggataaagatcgtatgattttgacttacatgagatacctaaaatagctgcagtcgggaaatatcaatggattcaaagctagtgcatgaacatttgaaaaacaggatattcatatagtctcaaggtatctcttcacaaaatatttaccaatcataaaggaaaaatgtataactttacaatcgaaacctggccaacaccactttaatcaactgatcacagttaatatcatcagaaatgaagtaaaaaacatggattacctgataggaaacaataagaactcagcatcacttctgtgacattacagccaaaagtgcaaatgtacatctaataaggaaacatcaggaataccaaattaaaggacatactacaaaataactagcctgcaaaagtgtcaaggtcatgaatgtcaaggaaagatggggaaatttttccaaattgaagaagacttaaaggcacatgacaaactaagtgcaacacatgaacttgtataaaatctttttgctataaaagacattttggggacaattggtggaacttgaatgaggtcggtggtagatggtaggaatatatctgttaatttgctgcttttgatggttgtcttgtgggtgtaggagagtgtctttgtgggaaatacacactacaatagtcaggagtgatggggcatcaagtcacttactttcaaatggttcagagagaagaaaaaacatctctgttctattcttcaaacttttctgtaagtaaaattatttcaaaataaaggatttgttttaaattttattttttagtagagacgaggtcttcctatgttaccctagctggtcttgaactcctggcctcaagtaatcctcccaccttgggctcccaaaatgctgggattacaggtgtgagccaccacacttagccaaggaaaattattatttttatttatttttttttatttttattttttgagacagagtctcgctctgtcacccaggctgaaatgagtggcgcgatttcagctcactgcaacccctgtgcccggagttcaaatgaatctcctgcctcagcctcctgaggagctgggactacaggtgcccgccaccatgcccagctaatttttgtatttttagtagagatggggttttgccatgatagccaggctggtctcaaactcctgacctcaggtgatccactcacctcagcctcccaaagtgctgggattgcaggcatgagccaccacagaaaatttttgataaaaaagtgtgttgacaaaggtgtggagaaacctttttaaaactcaactatatgttgtctataagaaacccactttaaagacacagatagattaaaagtagagatggaaccaataacctaaatgtaagagctaaagccataaaactcttacatgaaaacataggaataagtcttcatgaccttgggtaagccaatggattcttagctatgacatcaaaagcatgaacaacaaaaaaaatatagataggtaaattagacttcatcaaaatttaaatcttttgtgcatcaaagaacattatcaagaaagtgaaaagagcagccaggcgtggtggctcacccctgtaatcccagcactttgggaggccaaggtgggcggatcacctgaggtcaggagttcgagaccagcctggccaacatggcaaaaccctgcctgtactaaaaatacaaaaattagctgggtgtggtggtacatgcctgtagtcccagctactcgggaggctgaggcaggagaatcacttgaacctggagggagaggttgcagtgagccaagatcatgccattgcactccagcctggtcaagagagtgagactccatctcaaaaagaaagaagaaaaagagaaaagagccagacatggtggctcacacccataatcccagtggcttgggaggctgaggtgggaggatcacttgagcctgggaggtcaaggctgaagtgagccatgatcacaccactgcactccagcctaggcaagagtaagaccttttctcaaaaaataggccaggtgcagtggttcatgcctataatctcagcactttgagaggccgaggcaatcatatgaggtcaggagtttgagaccaggctgaccaacatggagaaaccctgtctctacaaaaatacaaaaattagcttggcatggtggcaggcgcctgtaatctcagctactcaggaggctgaggcagaagaatcacttgaaccaggaggcagaggttgcagtgagctgagatcgtgccactgcactccagcttaggcgacagagcgagactctgcctcaaaaaaaattaattaattaaaaaataaaaataattataaaataaaatcaatcatctaagtttgcacattagtaaaatagagaaagaataaataacaatcagtttataagttaaacttccacattggggaaaatagcgaaagaagagcaatgtaaatctaagttagcagaagaaaatagataacaaaaattagagcagaaatcagtgaaattgaaagtagaaacagtaggcaaaaatcaataaaagcaagaccggttctttgaaaagatcaataaaattgataaacctttaggctaaccacgaaaaaaaaaaaagaggagatctaaattactcatatcataaatgaaagaggggccatcagtactgatccccatgaacattaaaaggataataaaaaaaaaattttgaacaactctatgcccaccaatttgataacttagataattagatggaccaatttcttgaaaaaaacaatctaccaaaactcacagaaggagaaataaataatctgaataggcctatatttgttaaagaaattgaattaataataaccttccaaaacagaaagcgccaggctcagattatttcactggtgagttctaccaaatatttaaggaataaatggtactgattctctaaagtctcttccagaaaatagaagcagaggaaacacttccttactctatgaggccagcattactctaaaaccaaaactagataaagacattacaagaaaggaaaagtacagatcagtatgactcatgagcataaatgcaaaaatcttgaacaaattttagcaaatcaaacccaacagtgtataaaaagaatgaaccacaagtaggatttatttcaagtatgtaagttgtctcaacacttgaaaatcaatgaatggaatccgttaattccattaatggaatttattctttccacaggcaaagaagaaaagtcattcatcagtaaatgcaggaaaagcataactgacacccattcataattaaaaaaaaaaaacccttagcaaactaggaatagaggagaactgcctcaacttgataaagaatttctacaaaaaaacctacaattaccggctgggtgtggtggcttacacctgtaatcctagcactttgggaggccaagatgagagaatcgcttgagcctgggagttcaagaccagcctggataacatagcaagacctcatcgctactaaaaaataaaaaatagccagttgtggtgggcacactcctatagttccagctacttgggaggctgaggcaagagaatcacttcagcctgggaagtcaaggctgcagtgaaccatgattgtactactgcactccagcctgggcaaaagagcttaaagataaaaaataaaacctacaactaactaccattatacttaatggtgagaaactagatgctttccctttaagatcaggaataagacaagaatgttccctcttgccacttttattcagcatcatactagaagttcctaactaatacaataagataggaaaaggaaataaatgatacacagatgctccctgactaatgacagggttatgtcccaataaacccatcttaaggtcaaaaattcttaagtgaaatcattgtaagccagggattgtacatattggaaaggaagggattgtacatattgctcacaaatgacatgattgactatgtatgaatcccaaagaatcaatttttttaaaaactggaactaacaagtaattatagcaagtttgcagtatataagattaatatacaaaattcaattgctttcctatatgccagcaaagaacaattggaatttgaaattaaaaacacagtaccatttacattagcaccccaaaaatgaagtacttaggaataaatctaacaaaatatgtataagattgatatgaggaatwctgtaaaacttggatgaaaaaaaatcaaagatgatttaaataaatagaaatggtccatgttcatggataataagaatgtgtattaggaggttagttcttcccaatgtgatctatagatttaacacaatcccaatcaaaatcccagcaatttattttgtgcatatcaacaaaccctttctaaactttgtgtggaaaaacgaaagacctagaatagccaacataatattgaagaacaagtcagaggcctgacactacccaatggaaacacttactataatattaatcaagacagtgtggtactgttgaaaaactgagaaacagatcaatggaacaaaattaaaagctcagaaatagactcacacaaatatagtcaactgatactgagaaaggagcaaaagattgtcttttcaacaaatggtgctagaaaatctggacattcacatgcaaaaagaaattaatatagacactgaccttagacctttcacaaaaattaactcaaaatggatcatagacctaaaggtaaaacacaaaactataaaatttctagaggatggccgggcgcagtggctcacacctgtaatcccagcactttgggaggctgaggcgggcagatcatctgaggtcaggagttcaagaccagcctggccaacatggtgaaacctcatctctactaaaaatacaaaaattagccaggcatggtatcacgcatctgtaatcccagctactcaggaggctgagacaggagaatatctttaacccaggaggcggaggttgcagttagccaagatcgcaccattgcactccagcctgggcgacagagtgagacttggtctcaaaaaataaataaataaawaataataataattctagaggataatctaggagaaaatctaggtgatttggggtttgacaatgactttttagatacaacaccaaaagcacaatcatgaaagaaaaaatgagtagttggaattcattaaaattcaaaacttaaacccatgaaaaactgtaaagaggccgggctcagtggctcacgcctgtaatcccagcccttggggaggtcgaggcaggtggatcacctgaggtcaggagtttgagaccagcctggtcaacatggtgaaaccctgtctctaataaaaatttaaaaagtagccaggagtggtggcgcacrcctgtaatcccagctactcgggagactgaggcaaaagaatcgcttgaacccaggaggcagaggttgcagtgagcccagatcacggccattgcactccagcctgggcgacaagaccgagactccgtctcaaaaaaaaaaaaaaagaaaagaaaagaaagaaaaactgttaagaaaacaaaaagacaagcagagactgggagaaaaatatttgaaaaaatctgataaaggacttatatcccaaatatacaaaaaactcttaaaactcaacaataagaaaacaacccaattttaaaatgggctaaagatctggagagacacctcaccaaagaagatacacagatatcaaacaagcatatgaaataatgctcaacttatatgtcattagggaattacaaattaaaactacagtgagatatcattacacagtactaggatggctaaaatccaaaactgatagcaccaaatgctgacaaggatgtggagcaacagcaattcttattcatttctggtgggaatgcaaaatggtacagttactttagaagacagtttggtcttttttttacaaagatcaacatagtattactgtatgacccagcagtcatgctccttgttatttaacctatttgaaattatttgaaaacatgtcgacacaaaagcctgcacatgaatgtttaaagcatctttatttataattgctccaaactggaggtaaccaagatgttcttcaaaaggtgaacggataaataaattatcgtatatccatagaattgattattatttctaaataaaaagacatggtttctcaagccacacacactcaaaaaaaaaaaaagagacatggaagttttgggtgtaaactctgagggaaaaaaaaaaaagatatggaggaaacttaaatrcgtattgcatgttgtaagaagccaatctgtattatcacactagtctttaagttaaaaaaaagaagaagaaagaaaaaagccagtctgaaaaggctacttactatatgattccaagtatatgatatgctggaaaaggcaaaactatgaagacagtaaaaagatcaatagttgccagggacttagagggaatggagaaagagatgaacagatagaacacaggagatttttagagaggtgaaactattttatatgacactgtgatagtggattaatagcatacatttgtcaaaacccatacaactgtataacacagagtgaaccctaatgtaaactgtagacttgagttaataatatatgcatattggttcatcaaatgtaccacactaataattatgtacaatcagccctctgtatctgtgggttctgcatctgtggattcaaccaaccatggatcaaaaatattcaggaaaaaaaactcctcagygttccaaaaagcaaaacttcaatttgctgggcacaagccactatgttgaatccacgtgtaatgatgtataggcattgtattagatattataagtaatctagaggtgatttaaagtatatgggagggtatgatggtaggttatgaaagacttgagcatcctcagattttggtatccaagggaagtcatggaaccaatcccccacaggtgctgagggatttctgtattaatattggtttaccaaatataccacattagtataagatgttaataataggggatatatgggaactctctgtactatctgatcaatttcctgtaaacctgaaactactctaaagacacagtctattaacttaaaaaactgtttttaaagatgatagaagaataaagggaatctcttgcataatcctggyacccaaaaacaactattaataagacattggcataaatattcctggagattttctattcatatatatgcacacacactatgtatctttttttataaaaatagaatcatagaggtcaggtgcggtggctcacacctgtaatcccagcactttgggagaccaaggcgggtggatcatgaggtcaggagatcgagaccatcctggctaacacggtgaaaccccatctctactaaaaatgcaaaaaattagccgggcgtggtggtgggcgcctgtagtctcagctacgcgggaggctgaggcaggagaatggcatgaacctgggaggcggagcttgcagtgagccaagatcgcgccactgcactccagcctgggcaacagcacgagactccgtctcaaaaaaaaaaaaaaaaaaaaaaaaaaaaaaaaaaaaaagacctgcagcaggaatgaaatactccaaaaagtctaaacatgaatttgatcctgccctcttagtatcwgtatctcctataaattttctgagaagaaagtgcaaggggaagaaaggtggctccagaaacatccagagattagccattcccctataagtcagtaagaacgccatttgaggaagttgggtctagaagatctagactattaaacaatatctgggaaacagtggactgcaggctgttctggcacacaacagcagccaagaggcatgccaaatatataatctgaaaaacttacgattctttaaaaaatgcttatgatggaaatgcatagcannnnnnnnnnnnnnnnnnnnnnnnnnnnnnnnnnnnnnnnnnnnnnnnnnnnnnnnnnnnnnnnnnnnnnnnnnnnnnnnnnnnnnnnnnnnnnnnnnnnnnnnnnnnnnnnnnnnnnnnnnnnnnnnnnnnnnnnnnnnnnnnnnnnnnnnaaagtagaatcatagaatattacaaattttttataattctcacaacaattgtttccattttatagatgaagttattgaactcttatttatttttttttttttgagacggagtctcactgtgtcacccaggctggagtgcagtggcccaatcttggctcactgcaacctccgcctcccaggttcaagctcttctcctgcctcagcctccttagtagctgggactacaggctcacgccaccatgcctggctaatttttgtatttttttagtagagacggggtttcaccatgttggccaggctggtctcgaactcctgacctcaagtgattcacccacctcagcctcccaaagtgctgggattacaggcgagagccactgcgcccaacctgaagttgttaaactcttaaatggctgaaccaggttcggtccccaatgtgttttattccaaagcctgtagtcataccattccttctctttgactttatcagcagttacaaagcaaaacataaggcctactttttgttttatctttacttaatgtatttctcctttataagatataacagtctttcatacactactgccttcatccagcaaccttcacctcatatgatgttatattccttaactctttgttttttgtatagaatccctgcctattgaataagaagtggtggccccgctcctttttgccccagggtgctgtagtgagaagcagacagtgggactgccgttcttttttggcagtaatgtgactttctgtctactgtataagtagctctggaaattmaggtgttcaagaaaattatttctggtacctaaagatcctgagggttgcccggcgcagtagatcatagggtcagagatcgagaccatcctggctaacacggtgaaaccccatctctactaaaaatacaaaaaattaaccgggcgtggtggcgggcgcccgtagtcccagctactcaggaggctgaggcaggagaatggtgtgaacccgggaggcagagcttgcagtgagccgagatcaagccactgcactcctgcctgggcaacagagcaagactccgtctccaaaaaaaaaaaggatcctgagggtagagggtattaggtagagacagatgaaaaggtggagagaataggattcacatgggggtctggggaaggaaggagcctcaaatgtgattagtggagacagctcgataacccagaaggggcrgtagcattcagaagcattcaatgaattgatagcagccatttcaatgagtatctattgcagtcagctgactgtttagtaaaactttaaaatagaccctgccccttctcttgacacctataggagacactttgagactccgaacaattctggaagcaatacagaagcacattcattcttcctccctcatcttcaaactggcccaagatgcattcaagattgctactcccaccgacagtagtactgacagcaccctgctcaacgttgccctggaacttgggttacaggtatggaggaagagtaggccatccrcagtttagaccgctgacctagtgacagttggcagaagataagatctctgggagactgggcataggccaagtctggctcttcctttgggcccagaacacaagttctaggctagggaaaaggcaaggatttcataaattgggctccacttttaagttaaggccagaagcaagataaagctttaggctccctggggtccctatcttctctctacctccccatttctacaagtcaagcaaggtatgataataaggactttgctgcagatcatcagagaagcttcctatctgattggtgggagggctgggaaagaaattaactgtattttatgtttatcagcggagagaccactgtttaaagcaccagaaaatatttgtcgcataaatgaatgcaaggggagggagaggtcacaacagttaggcatagcccactggaaaggcctcttttgtgcccaggtgatgcggatgaccttatcaacccttaactggagacgcagggagatggtacgatggttggtgacctgtgctacagaagtgggtgagtctcccacctccctctacccccaggggaaaggagtttctaggccctactcttgggacaggacaatcaatccttagagctctcatattcctatgagatcttaggtccatcaggagatggcctaagaaaggatggggctgctggtaggagaaggtggcctctgttcagccagcccaagccctgtcttcactgcttgaaccatatcctgatgtcagcagcccttgatcctctcaacagagacatgtctaagagaatgaattttcagttgctactcaagtgctcccttgggaggtagtgggcccagtggtttggtccccatccctgtgcatgcttgtaaaaaactccagacaacttagaggctcaggaccctttctaaagcccaaagccccagcacaagactctaccctgagaggccccacttcagctagaacccctggcagatctgtaacccatgcctcagggcaagcaaaccccaggctctactgtcccatccttgtgaggggctaagagcacctgcagaaaccttcaactctctgacctggggaaagaagggataggaagagaccccaaacagggtctggccatctgggatgctccccttgccctggtttgcctcatatcrtctcaaggttgctgaggaggaagaattcatctctgcaggccaagttcaaaccccaaatggtaatctgggtygacctgaatcaggacccagatggccacggctgagctcaggctccccctgacaggtgtgcgggccctggtgagcatcttgcagagctggtacacactcttcacccctactgaggctactagyattgtagctgccacagccgtatcccacaccactatcctgcgcctcagtcttgactatccacagcgggaggaactggcyagctgtgctcgcacactggctctacagtgtgctatgaaggatccacagagctgtgccctgtcagcccttacactctgtgagaaagaccacattgcctttgaggcagcctaccagattgccattgatgctgctgctggtggtatgacccattcacagctgttcaccatcgcccgctacatggagctccrtggctacccgctacgtgccttcaagctggcctcattggccatgagccatcttaacctggcctacaaccaggatactcacccagccatcaatgatgtgctctgggcttgtgctctcagccactctctgggcaagaatgagctggcagctctcatccccctggtggtgaagagtgtgcactgtgccacagtgctttcagacatcttacgacgctgcacagtgactgcacctggcctggccggcatcccaggccgccgaagctctggaaagctcatgtccactgacaaagctccattgcgccagttgctggatgccaccatcaatgcctatatcaacactacacactcacgcctaacacacatcagccctcgccactatggagagttcattgagtttctaagcaaggctcgggagaccttcctgctgccccaggatggccacctgcagtttgcccagttcatcgacaacctcaaacagatctacaaaggcaagaaaaagttgatgctgctggtgcgagagcgctttggctgagagagcagatagctcactgccagagcagcctgggttcccaggtagtatcaggtcaggccaagggcactgaaacatttgtccaccctgagagaactctgagcacctgtggatgaggccaaaggaccacagggctaaggatggggaaagtccagctctagtcgataatgcctaccttggcaagcttctgactacagcctactgttcatggaggagctgggccctgcagatcgaccagaaaccccacaacatgccacctcatgcccctatatcctgcgtgtcctgagcattggccctgtctcccttggcaaacacagaacactgttccatctcagggattgcttaaccagagaaacagacacatttgtgggactgtaaatactatatgtgttgctaattattgtaaacttgtaactatttataattctgcttctgatttgatgggcacttgaagtagctgtgggtaggaggatatgcttattttctgaggagactcacaaccatttctcaggtttcccttgcagagtgtttgctggtagcagtggaagagtgggggtgccaaggagaaaaatggccagttaggatcaacccaagtctagtctatgcagaatcccccacctacagacagggcatttatagtccagtggtgagtgagggacagaggccaggactggacttagacttttgcctcacaaaactgtgaggacattgaagctcctgcctcacacagcctcttcaggagcctgctgaacacctgagaaacaagtgcagggagaagatgaaggtctgggaagccgctgagttcataatattcatctactgtggtcacctttgtgttagcaagtgtgtggtttcatctataattgtgtgtgtgtatctttatggctaagtacatgtgtgtatgtacatagatacatctgtgcatgcctgtttgtgcacatatatatttatgtgtatgtgtcagttctatggctgtgtacctgtttgaatatgtgcacactggactgtgagtttctacgtgaggatatacacattttgtgtacatgtgaggatgcacatctttgtgcaaatgcactcatgtttgtgcatgtttagtatgtgtatctgcgtacacgagtgcatgtgtataaacatgtttgtatccatgtgtatgcttgttatccatgcatctgtgtctttatatgtgtaactgagcgtatttctacatgtagggatgtctgtgtattcatgtttgaggatctgcatcaatgtgtcctttttgccagatttctctttcccattcctcttaaatctctctcgccagctaaacgtttgttccccatctctgtgcctcctctattcattctctcaccaaacaagcttctaagcaccaatctccctctgccatcagattggctgctttagctccatagttctcttctcgcctcatacttgctttcttcccctgcctttctacctcaagcttcctcgccggcttttgtcacagtctcattgctcgctgacttggaggctagggctggtctgcacttagcctctcccttcctaatttctagccctagtgggcagtcctgtcttagccctggctgacctccatagtgtatcatgttcctgctaccttcctgacccctgtgctcagcctggaattgttataggaggtagcaagggcactcagaaaagtcagttggaaccagtgtcttggtgtttactgtttcatgtcttagttcctgagttgggggtggggtttgatagggaaggggtggtatagctagaatgtgaactaagaacttctccatctgctttactttttctttcttcgacaaactgtcaccttttttactccaaactgaccaagaagttgtatttgccatttgtggctactcaagtcttactgtccagccaagggcccctacgtctcagcccaatgggttggttaaaaaaaagagagaagccactctcatttctgtatcacagttgcccttttttagcaagtgtgtgaattcacagtgcttttctatgaataaatcatggatcacataaaagatcatttttctaaaagcagaaattgtgttctctcactaaatgaaacccatctctcctttctgcattgccctggctgggccagggagctggttcagcctacagcacagtgggtgcctagtggtctaaggagatgcagaatgactgacagataaagaatttcttgccataccagacccttccccagggcttacagacacctcagagccttgtcctgggaagcaggtaccaccaggaagggtggaataaccaagatcttgagaaaattaaaggggatgctcagaaaagaatataaagcaaccttgagttgccagagggtcttttggtttcagaggacttcttgctttggtgatgatcgacttgtctaaagctccaatcctaagcaacctagctctgagctttcatgtcctctatatattttggtgtcaaagctgagggtccctcagcttctccctgcttgcctagactccatcttcttccccatgcctctctgaagtgttctaaccccttctgtgcccctttttgatgtatacttcccttcctccccagacataaagccctatcaatttggcctttgtatgttgtgaggaccccacccgtttttctgcaaatgtcacaacctgaactgctaggaaagctctaccctaccccatgtagttctgggacttaggtatctgagagtaagatgggaatgagaatccttaagtgctatagtacatattcactgatacctaacccccatgacttgtgaagaggatatagagagggttcccagggaaggagcagaggctaagaagaactgaggatatgggcacaatctttcacaaacaaaactacacaatagttcaactccgaaacttttattgtcctggaaacgatcaatcatctgtgttagtggtacttgagggtaaaggtatacactcagttctgtcgaagcagacgtgagtgtttatgcacagcatccacaaaggcgcccacatgttctgggtccatgtcaggataaagcccatggcccaggttggcaatgtagcgatgtggtccaaagtcatccagcatctgcttcaccaactgcccgatctcctcctgggggaccaacagggcactggctacaggaggaccagcaagcctttgtcctccctatatatactagtgacaaacgcatatgtaggcatgcttctactcagtgttattcagtcattcaataaaatttatcagatccctagtatggacccaggcatgaagcataaacacaaatgaacaacggcaacaaaaagtccggtctttctagggcttatgttgtacagagtagaagaaaaggacagacagacattaaaaacaagtgcacacagaataatacaaccacagccacaggagtgcacagtaacagacacacagaggggccctggctgttacctcagatgcatacaaggcacaggggtccaggttgccctgcaatgtcaccgtcttccccacacactccctggaagcaaagccagcgccacgttctggtaactgcatacatggcagctcccccagccaacacccccacctcaacctcaaggcctcacccttccatggcttaccgggctttctttggggccactgtccagtcaagcccaaccacctcatagccagcttgggccagctcctccagggcaaaatgcccatccttagcaaagatgatctagaaaaaagcagatctcaggctacagagggccttgctacaaccactaatctttcttgactgtacttctgctgccctccagtggtcactccagtccatgcaggacttagcctgaaagctccacaggaccaccttcactcaacccatcccaatcctcaccatgggcactggtgccaggcctgcctcccgcaacctggccttcacttgcttggccacatcacggatgtaaggcagtgcaaacttgttgaagagctgtgggccaagatgccctgcatgggactcaaacagctgcaatgcctagttagggtatggtgaagaaaaatatgtaacacacaaagaggaagtttcccccacatacaaaatccacctcaattttccccaaatgacttcaatccctgatactgcctgaccctaaaaacccagtaattaaaaaaaaaaaaatttactttcctcagatcccagcactaactttggtgtctgaatacttagagcattaagccccactgtcagtgtcaggatgggcttggctgctcagctagatcactggaggccaaggttctttcatccctggcattaagacccctgccctctcaggtttaggacactcttgcttctggtccttacagaccaaatccaagcctatttctctctctctcaggactcacctgggcaccagccaccacttgtcctaccagatatgggaccagagcatcagtgaggatgcgaagcagctggtgactagcctgaggtctctgatagagccagcgcttggcctgagccatggtgcttgagccaccaccctcaaccatgtatgtcatcagggtccactagagaaggatagaaagatggtgtcacagaagccagactgacccttccttttgtctaccccagaccttccagagtgatctccccgcgccccgagtccctgccctgtcccacattactggggcaccagcaaagccaatcagcggcacacgtccagccagtcgttgtcgggtaagggtgatggcttggaacacatagcctagctcagaggctaccacttctggatcccgtaggcgttctaggtcctgctcttctcttaatggctctgggaagctgggtcctttgccaggtaccatggtcacctccatgcccagtgcctggagggggagaaaacatctgggttcccaaaatggaatccaggaggaaaggttctgttcagctcattccaggaggaaggaaaaggagaataaaactctgccaaactccatttctttcaaccttagtttttccctcgatccagttaggataagtgcttattgtaaaccttgactggactgatagaaggattttcaaggcgtccttggattatattctaggatcaggtttgagtgggtacctggggtacaacaaggatgtcggagaaaatgatggcagcatccagagggaagcgacgcagtggctgtaggaaacaggagacaggttgctaggtggcagactgaaggcataaatctttccctcttttgtggacccctcacctgcagagtcagttcacagcaggcctcaggagagcgacacgtgctgaaaaagtcctgggcagcccgggtttccctaaactctgcatacagagggaagacagggctcagccttgaggccctccagagccctcccctgcccctcgaaaacttttctccctccggagttttatctagatttccagaccctgactcttacctggtaagtaacggcctgcctggcgcatgcaccaaacgggagtgtagtctgtttcctctccccaggctgctcgcaggaatgtgtcattcttcagctccggaaaaccctgaggtctggcgatcaggtgggggtgggggtaggtgtcagtatgctacgctggaggctggggaaagcgcgggttcataaggccgattcagtccaggaccgctatctacctcctccaggccagctcccaaaccctggctttccgcccgttccacctcctctctgcctatcaggtggtgcacaaactccagaagggcccgccctggggcctcttccctccacttagtctctactcttccaagctcgaagcaaccagagggactggggggagggaatgaaggcccactaaggatagtttgggggtcttcgaactagtgagcctcagaaacgggaatgtcactgggctggttcaggggctgagaaatacccaggctgggggataaagagggatcagagttgatggtcccagaatagagatcctggttggaaatcctgaggcatcccttgaattaaggccct

SEQ ID NO: 96854 - DNA, 148190 bp, Homo sapiens
caggcacacgccactgtgcccggctaatttttgtatttttagtagagacagggtttcactatgttggccaggctggtcttgaactcctgacctcgtgatccacctgcctcggcctcccaaagtgctgggattacaggcgtgagctactgtgcccagcccatttttttttttttgctaccaaatatactagtttactgagtatgtgtctttttaatattctgtatgatgagatgggaagtacacatttaacccttctgtgcatacaaaagaagtatgatggttgtctccaagagaaacagttttgtgatagtttgagctgcgagttgaactactgctttttcatggagcactatattgaatcgaaagaacaactggaggtggctgcacagtcgtggcggaggtgaccaaagccacataatgtccgtagttcattcatccatccatgccaagtggatcgtggggaaggtgattgggacaaaaatgcaaaagactgctaaagtgagagtgaccaggcttgttctggatccctatttattaaagtattacaataagcggaaaacctactttgctcacgatgcccttcagcagtgcacagttggtgatactgtgcttctcagagctttacctgttccgcgaacaaagcatgtgaaacatgaactggccgagattgttttcaaagttggaaaaatcataaatccagtgacaggaaagccctgtgcaggaattacctacctagagagtccattgagtttggaaaccacccagctaagcaaaaatctggaagaactcaatatctcttcagcacagtggaggaggagtggaagaaggcactaaagggaaagattgacatgtttatgttatggaaaaagaaatttttctaagttgcattgcaaactgtgtccagtttatctgtgatgtttatgaaatagctaaaagcaaatgaagggcatattatggtttttcatttaaaaaaaaaaaagaactgaccaactatgcctgccgatgtataaacaaagtgagccagttacttcaagggaaaccactaatagtatttgctgccaatgataatatttgagctttgaagagaaaattaaaattttgggggttttttgtttttgtttttgtttttctgagacggagtctcactctgtagcccaggctggagtgcagtggcgccatctcggctcactgcaagctctgcctcccgggttcacgccattctcctgcctcagcctcctgagtagctgggactacaggcacctgccaccatgccggggtaatttttttgtatttttagtagagacagggtttcaccgtgttagccaggatggtctcaatctcctgacctcatgatctgcccacctcggcctcccagaatgcttggattacaggcgtgagccactgtgcccggccaaaaattagaattttataaaacttgtatctgtcatcatcagcttcccagctttctaatatttaagaatttttctgatgaaattgttagtgatattaacaaatgtgattttaaaatattgtataatgagtcaatgttaggaagatctgcataactctgtgaacgaatattttacatattatttgtataccaagttgcaaggtcatgcatgggtaaaatgtccattcaaagtgcaagtactgtaacaaggtacaaaatgttcattgatataatttccgattctacattgcaacaaacctttaacaaactaccacttattgaattttggtatagtgtcaaagaatacctataattatctgaaaaggctattaaaagctctatctcttaccaactatgtatctatgtgaagtcacatttttatgatataattaaaccaaaataatatatcacaataatggaaaaatcaagctgttttctattaagccagaccctaaagagactattcaaaaaggtgaaacaatggcattcatctcactaaactttttgttttgaaaatgtagttggccaggcacaatggctcatgcctgtaatcccagcactttgggaggtcaaggcgggcggatcacctgaggtcaggagtttgagactagcctgaccaacatggagaaaccccgtctctactataaatacaaaatcagctgggtgtggtggcgcatgcctgtaaattccagctacttgggaggctgaggcaggagaatcgcttgaacccgggaggcagaggttgcagtgagctgagatcgtgccattgcactccagcctgggcaacaagagcaaaactccgtgtcaaaaaaataattttttttcgatatggtaaatattgataaatataatccatataaacaaaagctttctggggtcctcagtaatttttaagtatgaagagtctagagatgaaaaagtttgagaattgttgccctcagggaataatttaaagtgagtttaaactgaagcaatctctcaactactttccacaatagaagagaaaaccctctagttcgttgaaaaacatttgctagtttaaacataaggatttgaaatggatggcagatatggggctgactgctcttcttacttataattagttcttacctcaaacccatgctgtaatttccaagtcttggttgaggtaataccaaagagagaatatctctgtgtttctatagaggggtagtcagacttcaggcctcctgtggccagatcagtcagttcatggcaaggcaaagataggctggttttaggatatgagtccccccctttttttttcagggtctaagcagacctccttctggaaaaaatgacaagtcctaatcattaactgctgtatctgcaacaccaagcatctaagacactgcttggcacatattaggcactcaagatattgttgaagccagtcctccatggcacatacctgtagtcctagctacttgggaagctgaggcaagacgatcgttgagcccaggagtttgagtccagcctgggcagcataagctgacctcatttctaaaaataaatgaataaatattgttgaatgaagtcaagctcctttatttttattacagaaatcatgctctaccttttaactggcaggaagctaaagcaactcaagatttaagagatgaatcaggctgggcacggtggctcacggctgtgtcccagcactttgggaggtcgaggcgaacagatcacgaggtcaggagttcaagaccatcctggcctatctgatgaaaccccttgtctactaaaaatacaaaaattagccaggcgtggtggcgcatgcctgtagtcccagctactcgggaggctgacgcaggaatcacttgaacccaggaggcagaggttgcagtgagccaagattgtgccactgaactccagcctggtgacagagtgagactgtctcaaaaaaaaaaaaaaattaattaatcgaaaaaaaaggaagctttcaaaagattaggaaattgcaggaatgcatgggaaaaagagaatggccattggtcctgttatctagtgcaacttgataaaccactccaaaccgtagagcttagaacaacaattattttattatctattcgtcattttttaatatttattttatttacttagagatcctgtctctttgttacccaggctgaagtgcagtgataccatattggctcactgccacctctgcctcttgggctccagcgatcctcctgcctcagccttccaagtagctggaaccccacagcgcggcaccacacctgactaatttttgtatttttagtagagagggtgtttcactacgttgcccaggctagtctcgaactcctgggcccaagggatccatccgcctcacttcctaaacttctgggattacaagcgtgagccaccgcacctggcctattattgttttgttaaaagcagggtctcggctttgcaaatgcagccaccgacgccaggagctctgtacgatcagccatggttaaccccaccgtgttcgacatcgctgtcgacggcaagcccttgggccgcgtgtccttcgagccgtttgcagacaaggttccaaaggcagcagaaaactttcgtgctctgagcaatgtagagaaaggatttggttataaaggttcctgctttcacagaattattccagggtttatgtgtcagggtggtgacttcacatgccataatggcactggtggcaagtacacctgcggggagaaatttgatgacgagagcttcgtcctaaagcatacacatcctggcatcttgtccatggcaaatgctggacccaacacaaatggttcccagtgtttcatctgcactgccaagactgagtggctggatggcaatcctgtggtctttggcaaggtgaaagaaggcatgaatattgtggaggccatggggcactttgggtccgagaatggcaagaccagcaagaagatcaccattgctgactgtggacaactctaacaagtttggcttttgttttatcttaaccaccagaccattccttttgtagctcagaagagcaccccttcaccccatttgcttgcagtatttttttttttttttttttttgagacgctgtctcaccctgtcgccctctcccaggctgaagtgcagtggcacgatctcggctcactgcaacctccacttcccgggttcaagcaattctctttcctcagcctcccgagtagctgggactacaggcgcacgccgccatgcctggctaattttttctttctttctttctttttttttttttttttgtattttagtagagacggggtttcaccatgttgcccaggctgatcttgaactcctgagctcaggcaatctgcctgcctcggcctcccaaagtgctaggattacagacgtgagccaccacgcccggcctgctcgcagtatcttatctttgtgctcttgctgcagttccctttgggttccatgttttccttgttcctttccatgcctaactggattgctgagttaagtttatgattatgaaataaaaactaaattaaaaaaaaaaaacagggtctcactctgtcgtctaggcaggaggagtgcagtggcccgatcatagctcactgcagcctcgaactcctgggctcaagcgatcctcccgtttcagcctcctgagcagctgggactacaggcacacactaccatgcccagctaatttttacttttgtagagactggaggctctctcgcacaggctggtcttgaacgcccggtttcaagcaatcctcccacctcggcttcccaaattgcggagattacaggcatgagccaccatgcccagccgcccccagttttgatggctaaagttaacgtgagtggccctgttacaaataggaagtcccgggccgggcgcggtggctcacgcctgtaatcccagcactttgggaggccgaggcgggcggatcacgaggtcaggagatcgagaccatcctggctaacacagtgaaacccccgtctctactaaaaatacaaaaaaattagccgggcatggtggcaggcgcctgtagtcccagctcctcgggaggctgagggaggaaaatggcgtgaacccgggaggccgagcttgcagtgagccgagatcgcgccactgcactccagcctgggcgacgcagagcgagactccgtctcaaaaaaaacaaaaaacaaacaacaacaacaacaacaaaaacaaataggaagtcctggcaacccctgcaggggcattcggtgatttttttcactagctagccaaaattgcggctcccaatgagctttctttcaccgaatgtactcgaagccaggtcttagacttactccctgaggaaagaggctgagttgttccgtctgggttcccggcaccctgcactgggaggaatactcaaaaggcgttggtaatgtgttaatggacagagggacacacgtgtcgaatgctcctcggtggccccgccccctccggcccgccttccctcctctccgctgagtgtgcttcccctccgtcatccatcgctcggcggtcttctcttctccatgggtctgctctgcgcgttccatcgagtttctcggccatcgcgcgcctgcgccattgggctgtcagtcagaggcggcgtggagatcgctgggagcggttgcggcgtgcsgggagctgagttatagctgtgacttctgccctgccaggccgcacacaagctggctgacccgggtgagcagtgcggtggggccactcatctgagggaggcgggcatgtcgaactgggccgaggtggacccgaaggggtaggagagggtgctgagccccgaagttgtcagctcgactccctgctcgacccggtgtagctgtgtccgaagtagaagggaggttggggatgagaatccgagccaaccaccttatgcaacagatggaggaactaagtttctaatctcagctactcgagagtctgaggcaggagaatcgtttgaacccaggaggtggaggttgcagtgagcctaattcgcgccactgcactccagcctgggcaacatagtgagactctccgtttcaaaaaaaaaaaaaaaaagaaaagaaaagaaagaaacgaagtttcggggagggttctgcttaaagtcacagcgagtgagcgagcaccagaccggtaccagacgcctttagcactgtgcctgcactctttcagcctcagcccttcattcatttgttcagcctgcctttagttgtttggatgcagggcagtgaaatatagggaggagcagtgaggtctctgccttcaggcagcacacgtggaatgacagaccaattctgatacagttttcttatctatttacaactggaaaaggcatgagtgctatgatgcaggcaagtctgagatgcggtgaacaccctctccaaagcttggraggcagcgagactcgttgccatgattcccgtcagccatagtcgtggcagtgacatgagcatttgacagtctgcctggtagcatgattagttatgttcatgattactattcatgcttcstaggttgcctttcttcacccagggcctccttgagagctggaacctcagttcctagtgacctgggttctaatgcccttatgcacatgtttgagtttgactcttatacagttgtgaagttcacaggtcctcattccactttgatttctggcatctgactgggaatacagtgatgatgcacacacagtccaagaaagtcactcttacactcttatgtagacatttaagagacattaatgttacacttaagtagacatttaaacacatacgtgcaatgaaaccctgtaaaggctaagagaatctgcacatggcagaatggaagcacttcgggaaaaggagtcacttctggaggggtgggaacggttaggaatggctttgtaggcaagaggattcttgagctgtcttcaaagtttaataggtgattactagacacaagagaaaggcagactaggaagcaacagtagcagtgcagagaccagaattatgaagcagcatggctcaattagtacgaaggttttccataatctrgtctctgtctagtaaagcaaatacaaatatagtgcttctcataagatggacattattggccrggcgtggtggctcacgcctgtaatcccagcactttgggaggccgaggcgggtggatcatgaggtcaggagatcgagaccatcctggctaacaaggtgaaaccccgtctctactaaaaatacaaaaaattagccgggcgcggtggcgggtgcctgtagtcccagctactcgggaggctgaggcaggagaatggcgtgaacccgggaagcggagcttgcagtgagccgagattgcgccactgcagtccgcagtccggcctgggcgacagagcgagactccgtctcaaaaaaaaaaaaaaaaaaaaaaagatggacattattttgtctgctttacgtagaataacaaatttartcttaacaacaactctgtgaagtgaaactataattatccccatcataaaatgcaaaaattgaggcatagaaaatttacgtagtttgccctagttcacacagctaataataaatagtagagctagaattcaaacctaggcattctagctctatggtctgtgaacctaaccaccaggcttccttctagaagctgaggacactgagagttttaaatgtcaggcccctgatcacacctatgagtgtcagaatcatgactcaaactcatcttttgactttttttttttgggacagggtctcactctgttgcccaggctggagtgcagtggtgtgcagccttaacctcccaggctcaggtgattctcccacctcagcctcccgagtatctgggactacaggcatgcgccaccatacctggctaattttttatagagatggggtctcaccatgttgcccaggctgttctagaattcctaggctcaagtgatcctctcatcttggcctcccaaagtgctgggagcatgagccactgtgcctggcgctcttttggctcttttttattttattttattttttttgagacggagtctcactctgtcgcccaggctgaagtgcgagtggtgtgctctcagctcactgcagcygctgcctcccgggttcctgtgattctcctgcctcagccacctgagtagctgggattacrggtgcctgacaccatgcctggctacttttaaaaatgtttttggtagaggccgggcgcagtggctcatgcctgaaatcccagcactttaggaggccaaggcaggtggatcacctaaggttaggagttcaagaccagcctggccaayatggtgaaaccctgtctctactaaaaatccaaagaattagccaagtatggtggcggatgcctgtaatcccagcaacttgggaggctgaggcaggagaatcgcttgaacctrggaggcagaggttgcagtgagccaagatcatgccattgcactcaacctggggaacaagaactctgtttcaaaaaaaaaaatttttttttagtagagacagagtttcaccaagttggccaggctgctcttgaactcctgacctcaggtgatccgcccgcctgggcctcccaaagtgctgggattacaggcgtgagccaccacgtccagctcatcttttgactcttaagggtccagtgctcttttcataataacatttgatgtggtggatgttatataataccaaaatgaaattaaattacactttgaggcaatgcttgctagaatctacatgaccatatctttacattgtgaatgttatgcaggagccttcactttgtgccttgggtatagtaggtrttaagtgctgcactttagatgttgatgtgctgggcccaggagtaataataattatagtaaagttgcaacattatttggcaatttgatgttgaatagattgtttcttctgaacgttacattttaacacatttgttcttaaaattacatcattgtaagagaaagtactttcagtttaaatcagtaaagatyggtcaggtgcagtggctcatgcctctaatctcagcactttgggaggcccaggcaggaggcctgaggccaggagtttgagaccagcctgggcagcatagtgaaaccccatctctataaaaaattaattaaaagaattagccaggcggccaggtgcagtggctcatacctgtaatcccagcactttgggaggccaaggtgggcagatcacctgaggttgggagttcgagaccagcctgaccaatgtggagaaaccctgtctctactaaaaatacaaaattagctgggcagctgggcgtggtggtgcatgcctataatcccagctctttgggaggctgaggcaggagaatcacttgaacctgggaggcagaggttgtggtgagctgagatcgtgccactgcacttcagcctgggcaacaagagagaaactccgtctcaaaaaaaaaaaaaaaaagccaggcatggtggtacccacctgtagtcccagctgctccagaggttggggcaggaggattgctttagtgcaggaggttgaggctgcagtgagccatgatcttaccactgcacttccagactgggcaatggagcaagactctrtctctaaataaacaataaataaataggatgggcacgtggctcacacctgtaatcccagcactttgggaggccgactccggtggatcacctgaggtcaggagtttgggaccagcctggccaacatggtgaaaccccatctctactaaaaatacaaaattagccaggcatggtggcccatgcctgtgatcccagctactcgggaggctgaggcaggagaatcgcttgaacttgggaggtggaggttgcagtgagccgagatcacggcattgcactccagcctggcaacaagagtgaaattccatctccaaaaataaatacataaataaagatttatgaccttctactgtgcctctgttctgtggtagtttctgtaaagagattcttttcaaagtcaaataggtttgtttattaccttgagtttgaaaaaaggaattaacagtttggtttgtttttataattgtgttctgtaaatctaggttcagatacaagcctacrtttgtgtttatagtgatatctttaaaaattggaggaataagatgagccgatggctgaattattggaggagtcttaagtcatttcatacttttcagaagcctaacatgcttgtgtttctgctgttaattctagtcaggcatcttttaatattttcttttttctctcttttttttttttttttttttgagacaggatctcactctgtcacacaggttggagtgcagtggtccaatctcaatctcggctcactgcaacacctgcctcccaggctcaaatgatcctcccacttcagcttcccaagtagctggaaccataggcacaagccaccacscctggctaattttttgtatttttggtagagatggggtctcgccatgttgcccaggctggtctcgaactcctgagctcatgtgatccacacacctcagcctcccaaagtgctgggattacagatgtgagccacctcacccagcctaatattttcaaagaataaaaattcacacatcagaagtccacttggtaaactcttacttcttcagagtcagctcaagcatcactttctataaaaacttctctgtgttttcaatgaaaactaggtgttccttttattgtatgcccactgtatcttggatatttttctgctgtggcactaatgacatatattgtgatttactgaatttgtcttctccacttaattgtgaataactcaagggcaaagcccctgcattcctatcctcccacttttaccaaggatagaactgagaatacatattggtagacataatgtttatctgcagctaagcttttcttactgtgattgctagagttaggaattatgcatttgacatagtgggtatcagtaacctaaataaaaataggctagtagtatgtgtgctttgatttttgttacattgttttttttctgttaattgttttttctgtacttgcagtttgtaaaaatggaatttcaagcagtagtgatggcagtaggtggaggatctcggatgacagacctaacttccagcattcccaaacctctgcttccagttgggaacaaacctttaatttggtacccattgaacctgcttgagcgtgttggatttgaaggtgagctatgacaaagtgagctgtgaactcataaaacttttaggagatttgatccccatgatttgtcagcgttatgagaatgagagagggtgactagaactcgttggctgaagactgccttctttaaggaatgtaggagtactctattgctgtgtgaaaaaggttgagaggatagcactaagtgttgttgttatggagctgatgtccacaatgatccaagacgaactctgtaargatatcagaaagagcagattgagactcttaaatgcctcatagtcagtacttactgagaatctattatgtaccaggtaatatttatattatctgatattcaatatatatatgttttaaattttgttttgatgtaagtaccaggttatatattaaacacggaggtacagaattgaaaagacagctcaggccctgacttccagaactttaaagtctagtgatcctctctactttttgcttgggtagctaggtagatagttatgccattaagtaggaaaaggaataggagacaaggaacaggtgttttttttttgagacagagtctcackctgccacccaggctggagtgcagtggcacgatcttggctcactacaacctccgccagggttcaacctctcccgggttcaagtgattctcctgcctcagcttcctgtgtagctgggactacaggcattttccaccatgcccrgctaagtttttgtatttttagtagagacagggtttcaccatgttagctagaatggtctcgatctcaggacctcgtgatctgcccacctcggcctcccaaagtgctgggattacaggcatgagccaccgtgcctggccaggaaaaggttttaatgaattttattttcattaaaataatgagttcagctttggtcacattgagtttgaggtgtcctatatttagatgtaataaatcagggtgccaaagcctgaggcccagtcttgtgatccagtgttcattccattattagagttgcctccaataggaagggtggtagcttaatagctctctctttgtattgaatgaagatttaaaatgttggagtctcaccctgtcgcccaggctggagtacagtggtgtgatctcagctcactgcaacctccacctcccaggtttaagcaattctcctgcttcagtctcccgagtacctgggactacaggcgtgtaccaccactcccggctaatttttttgtatttttaatagagacagggtttcgccatgttgtccaggctggtcttgaacttctgacctcaagtgatctgcctgtctcggccttccaaagtgttggaattacaggtgtgagccactacgcatggccccctttggtttttttgttttttagagacagagtcttgctctgtcgtccaaggctggagtacagtggcatgatttcagctcattgcaacctctgcctcctgggmtcaaacgatcctcccatcttagcctcctgagtagctgcaactacatgcatgccaccacacctggataatttttctttcctcctttttttttttttttttttttggcagagacagggtttcgccacgttacccaggctggtcttgagttcctgggctgaagttatctgcctgccttggcttcccagagtgttttttatatttcttcccatttgtatttttgattaatgttcttctgaattcttcatatcaaggaraagtggcatataatatattaaagtgtgggcaccattcatatagacctgaggtttttttttgtttgtttgtttgttttgagacagactcactctgttacccaggctggagtgcagtggggtgatcttggcccactgcaacctccacctcccagactcaagcaatcctcccacctaaacctctggttttttggagtttttttatagagacaaggttttgccatgttgcccaggctggtcttgaactccagggctcaagtgatccgcctgcctcggcctcccaaagtgctgggatttacaggcatgagccactgcgcccagccagcatgtcttttaatccaagattcctcatttgtaagatgagattgttctaagaattaattggggggaggccagatgcagtggttcacgtctgtaatcacaacacttggggaggccaaggctggcggatcctttgagcccaggagttggagaccagcctgggcaacagagcgaaacctcatctctacagaaaatacaaaaattagccaagcatggtggcacatgcctgtagtctcagctacttgggaggctgaggtgggaggattgcctgatcttgggaggttgaggctgctgtgaactgcgacagtgccactgcactccagcctgagtggcagagtgagaccctgtctgtaaaaaaaaaaaaaaaaaaaaaaaaaaaaaaaagaatttattgggggaatgcaggtaaaatatattgaaaaggcacaataatattagcagttgttattacacctagaaatagaccaaatctaattgaaataatggaaccactgtctatatgagtaagtttttgtttttctttctttttttcttttgtcctatagaagtcattgtggttacaaccagggatgttcaaaaggctctatgtgcagaattcaagatgaaaatgaagccagatattgtgtgtattcctgatgacgctgacatgggaactgcagattctttgcgctacatatatccaaaacttaaggtgaaaagcaattttttgactcttcttgtttattgaagatagatgatatcttatgttttcccagtgcattatagtcttttttttgagacagaacctcgctctgtcacctaggccggagtgcagtagtgtgatctcaattcactgcaacctccacctcccgggttcaagcaattctcctgcctcagcctcccaagtagctgggattacaggcataygccaccgtgcctggctaattttgtatttttagtatagatgggatgttggccaggctagactcgaactcctgacctcaggtgatccaccctcctcggccttccaaagtgctgggattacaggcgtgagccatcacgcctggcccccagtgcattatagtttacaaaactttatttctgatatatttttacatcacatactttgttacccatgtactcttcagttgctctttgatttggttactagtaaagatttagacattaatttgtcatagtcactggtttccaatgtttttgagtaatagcacatttttattaaaaaagaaaaaaaagacatactctaggccaggcacagtggcttatgcctgtaatccctttgggaggccaaggcaggtggatcacttgaggtcaggagtttgagaccagcctggtcaacgwggtaagaccctgtctctactaaaaagacaaaaattagctgggcatggcggtgcacatctgtaatcctagctactggggaggctgaggcaggagaatcgcttgaacccaggaggtggaggttgcagtgagccgagatcatgccactgcactccagcctgggcaacagagtgagatcccatctcaaaaaaaaaaaaaagatatactctaaatgtacttcaaaagattccattcatatgaagtttgtgaacaagcaatgttaatgtataaatcagaggagcagttgactctgcaggtgaggattgactagaaagaagtacaaaggaacgttcaaaaattcatagacctcccatgtaatatttgaacttttagttaacctttggttaagaaactaaggagcacatagatatgagaacatagtctccccaatggtttgtggcccatgagctgagaaagatccactgtagattgttctaaaattgtttttctttggaaaaaattcaatcgttgtgatgttgccatattacttgaaatgggagacaaactttcttctgttatttctggtgattaaacggatgtgttattttcaaccgacttttgtactataaaacaaaaaattaatgcaaatatgtacatggctttcccaccccttttattgaggaataatttatacacagtaaaatgcacagatactaaatatacacctagattaccattatccaaatctagaacaattccatcacccctgaaagttcctttgtgcttctttctagtaagtctctgatcttctgagtcaaccactcttctgtttctatcactatgtattaattttatttgcttataaacttcatataaatggaaacatacaattttgttctggcttcttttgttcaacatatttttcagattctttcatgttattgaaagtataactaatctgttccttttcatgctkagtagtattccattgaatgaatatactactatttatttatctatcctcctattgacagttatttgggttgtttctaatttttggctatcatgcataaagctattatgagcattgttctgcaggtctttttgtgaaaatattctataggctgtaaggtttactttattggaaactagcagttttctaaagtgattgtaccattttatactttcatcaacagtttgtaagagttgcgtttgcttcacgtcttcatcaacacttggtgttgtcagtctttttaattttaaccattctagtaggtatgtatgtagtggtatctcattgtggttttaatttacatttccctgatggtaatgatgctgaacaccttttcatgtgtttattggccatttatatatgttcatgaagtgtctgttcaaagcatttgtctattttttaattgagttgtttgcctttccattattgattrtaggaattcttaatatagtccagatgcaagtcgtttgtgagatatgtgttgtgaatattttccaccagtctgtggctttttatttaatggtgtctcttgaagaaaagtttttaatgatgatgaaatccaaattactgattttttcttttatggttattgctttttgtgtccggcctaagaaatctctgcccatctgacctttgtgtagatgttcttctatggttttgtctttgttttgtattctttttgagacagagtcttgctctctcacccaggctgagtgcagtggtgcaatctccacctccactgcacctcctcaccgcaccacctcactgcagcctccacctctcaggttcaactgattctcgtgcctcagcctcctgagtagctgggattacaggtgtgtgccaccacacctggctaatttttgtagtttatagagacagggtttcaccatgttggccaggctggtctcgggctcccaggttcaagtgacctacccaccttggcctcccaaagtgctgggattacacacatgagcgacctcacccagctcagatttgacatcttaatattgaatcttttgatccttgaacatsgtatatatagtaatgtgccacataacgatttttggtcaatgactggccacatatgtggtcccataagattgtaataccatatttttactgtaccttttctatgtttagatatgtttaaatacacaaatacttaccattgtgttacarttacctatggtatataataacatacaggtttgttacctaggarcaataggctataccatatagcctaggtatgtagtaggctatactatctaggtttgagtaagtacattctatgatgttcgcacaacgaaatcacctaacaatgcatttctcagaacataccggatttctcagaacatatcgctgtcattaagtaacacataattgtgtatctatttatttaagtttcgcttaatttctctcaactgagttttgtaattttcagtgatgattttttttttcttgagacagccttgctctgtcgtccaggctggagtgcagtggtgtgatcaaggctcactgcagcctcaacctcctgggctcaagtgatctccacatcagcctctcaagtagatgggactacaggcacatgctaccatgcacagctaattttttagatttttattttagtagagatgtctcactgtgttgctcaggctagtttcaaactccagggctcaagctgtcctcccacttcagtctcctaaagtgctgggataacaggcatgagccaccacacccagcccaatgtagaaattttgaacatgtcttgataaatttattcctaggtaaatatttttaatgatattgtaactggtattttttctattttcaattgtttattgcttgtacatagaaatacaattgatttttgtattttggcattatgcgctgtgaccttttaaattayagattcgtttaggaccttatcatcatattgcctgcaaataaaaacagtattatatcttccttcttaatctttattctttttaaaaattaaattacattaattttattttttgagacagtctcactctgtcacccaggctagtgtgcagttgtgtggtcacagctcactgtagccccaaactcctgggctcaagcagtcctcccacctcaggctcccaagtaactaagtaactaggactacaggcatgtgccaccatgcccggctaatttctttttttttcttttttttttttttagaccagggtcttactttgttgtccaggctggagtgcagtggctcgatcacggctcactgtaacctcgacctccccaggctcaggtgatcctcctacctaagcctcccaagtagctgagactacaggcwtgcaccaccacacctggactttttttatatatagagagaaaggatctcactgtattgcccaggcctggtctggaactcctggacagaagtgatacccccaaccttgccctctcaaaatgctrtgattacaggcatgagccacyatgcccagctctttaaaaaaaaaaaaaattgtctcattgccctggccagsacctccagtacaatgtatataggcatttccattcacttttggccttccttctacttttctgtattttctctcaagtggattttgggtgcttctgattagagtgggggcttccaatacaataatgtggggtgtgttgctttctggagtaccgctgattatttgtttagagaatatttggggaattccattagggtaatgagaagaaaatttgggtcaagtgtacagttcagtggtattaagcacatttataatgttgtgcaaccattaccaccctccatctctataaccttcatcttgtgaaactgaaactctattaccattaaatactaacatccccctcctcctagcccatggcagctaccattctacttcctatttctatgattttgactacctctaagtacctcatgtaagtggaatcatagagtatttgtctttctttttttttgagacagagtctcactctatcaccctggctggggtgcagtggcatgatctcagctcactgcagcctctacctcccaggttcaagcatgtcttgtgcctcagcctcctgagtagctggaactacaggtgcatgccctacctactacacctggctagtttttgtatttttagtagaaatggggtttcgccatgttggccaggctagtctcgaacgtctggcctcaagtgatctgcccaccttggcctccagtatttattttttgtgattggcttacttagcataacatcctcaaggttcatccatattgtagcatactgcagaatttacttcstttttaaggctgaggaatattctattttatggatatgccacattttgcttagccattcatccatccacggacacttgggttgcctccacattttagctattgtgaataatgcagctgtgaatatggatgtacaaatatttctttgagaccctctttcagttcttttgrtttatactgagaaatgtagttgctggattatatgctatttctgtgtttaattttttaatgaactgccatactgttttccacagtggctataccattttacattgccaccaacagtgtacaagggctccaacctctttctctctttcttttcttgttttgtttttgagacaggatttcgttctgacatccaggttggagtgccatggcgcaatcatggctcactgcagcattgacctcccagggtcaagcgatgctcctatctcagcctcctgagtagctggaaccatgggcatatgttgccacacccagctaactttttattttttgttgagatgagggtgtttcactatattgcccccaaaatacaaaaattagccacgcatggtgacacacacctgtagtcccaggtactcaggaggctgaggttgaggactgcttgtgctcgagaggtgaaggttgcagtgagctgagatcgtaccactgcactctagcctgggcaacagagggagattctgtctcaaaaaaatatataaataaattaaaatcagtgtgtgtgtgtgtgtgtgtgtgtgtgtgtgtgtatttatttattattattttttaaaacggagttttgctcttgttgcccaggctggagtgcaatggcgtgatctcggctcaccgcaacctctgcctcccaggttcaagcgattctcctgcctcaccttcctgagtagctgggattacaggcatgcgccaccacacccagctaattttgtgtttttagtagagacagggtttctccatgttggtcaggctggtctcaaactcccgatctcaggtgatccacccaccttggcctcccaaagtgctgggattacaggcatgagccaccgtgcctggatatatatatatatgtgtgtgtgtgtatatacatgtgtgtgtttgtgtgtgtatrtgtgtatatgtgtgtgtgtgtgtgtttgtgtgtgtgtgtgtatttttttttagagacagagtctcactatgttgcccaggctggtctcgaactcctgggctcaagtgatcctccaccttggcctcccaaagtgctgggattacaagtatgagccaccatgcctagcctatggttccagtttctccacatccttcccagtatttattttctgcttatttttgtttgtttgtttttttgtttttgagaaggagtcttgctctgttgcccaggctggagtgcaatggtgcaatctcggcttactgcaacctttcctcccaggttcaagcgattctcctgcctcagcctcctgagtagctggaattacaggtgcataccaccacggccagctaatttttgtatttttagtatagagacggggtttcaccatgttggccaggttggtctcaaactcctgacctcgtgatccacccacctcagcctcccaatgtgctgggattacaggcatgagccacctcacccagcctatttttttcttaatagtrgtcatcccaataagcatgagttagtatcttactgtagttttgatttgcaaagagcttgggatttttggtggtcttctyagagctgtattagctaccatctaaaagtttagaatggatgtgtaaactttctttgctctataatctctgaattttagaaaagttatttttggcccagtaagctagagatcttgaaagtcccaggcaaataagttcctctaatacttggaggcttgagaagtaatagtggcaactgttaggagagaaggcatgagaaggaaagtaaagtaacctccaaaggggcattttactctccaagttactgcctttttgtatgactttgatttttttttttttttttctggagacggagtctcgctctgtagcccaggctggagtgcgggctcactgcaagctctgcctcctgggttcacgccattcttctgcctcagcctcccgagtagctgggactacaggtgcctgccaccaagcccgactaatttttttgtatttttagwagagccagggtttcaccatgtkggccaggatggtctcgatctcctacttcgggatccgcccgcctcggcctcccaaagtgctgggattataggcgtgagccactgcgcccggccatgactttgatcttttactccttattttagggcttccccttgcacctaaaatcagaatctttactaagtccttctgcagtctaatttctgttcctccgttacccgttcccccacatcatttacacagaatctcttacatataatcctacctstgagccatcttccaagctgtgactttggccagcaagtctttgctatctttacttggttttttcttactacaatagcccctgaaatcctggcttcatatcagattgccttccaaccaggagtagaaggcaacaaggctaactgttggaagaacgtaaataaatgcccaaatagctgttaggaactgagctaagccaaaattcagaattaactgattagaattaacataaacttgtagaaagggcagtggaagtgcgtataaacagttgaagaaagtgagacagcctaagaagtaagttgtcagtgtttgctaagggatgtcggttatctctctaaaggagaaagttgcactgagcagctgtgccatgcatgacacagtggccctttaagcccatgttttttcttcccgtgtgcccacaaaagagctcctaaacattaataggctcttttggtctgtttccaataagattttaggtaagataagaacattccctaaaagtttgaggtttattggcttttggttttatctttacccacttcctccagattgagtttcccagctattattgtgaggtcttcrtgtttgacttctgttctcagacaaaggccagagtagtacattcactttatttggcttttttttgttaaaacaatttttaacttataatstttttcctttaccttatatttgctaaatgtattgcagtcctacttatatgtggaaacctccatcacatgtgcttataggatattgaagttagataccatatttgctaagttatgttttttcacttaaaggacacatatttcatttggttttatactttctggcaccattttctacttcattttgctttatctaaccccacaattttactgatttactggttctcactttttatttcagctacccaaacctctttccctgacttatcaagagagattattggttcattcattctcccaggccctgggtgagtgagctccactcttacaactgacgttgataacatgaatgctcttagatttcatattttctccataataatgtttcatatttgttgataaatcattcattcttatctatgtctaaactcattcatttagtaaatattcagagtcaactaataakaataatgataattgccattgttaaacacaagttgtagaccagacatagttaatattttaacttcttatatggaaattttaaaacttgtacaaaagtaatcaacattgcccatttatctgtcacccagcatcaacagttaacaacctatagcaaatcttattttatctatattttacccaacttgctttctcccatattcttttgaagcaaatcttagacatataattttatctgtaaatattttagaatatattataaaaataagggcactttttagaaataccactatcacttctaaaaaacagtaaaaaaccaaatcaataataattctttggtatcattaagtatctaatcagtgtttgagttttcagttgcctcataaatataatttcagcatgttttttcaaatgtgtttatttaacttaggaagtgaataaggattacacattacaattggttgaaatgtcttttaagtctcttgatatataggttttccctccatttcttttttcccccttgtaatttaattgttgaagaaactaggtttttgttgatttaatgagtgtttctctgtatgtatagtctgtaaattagtagttgaacttgaggcttgattaggtttaggtttgaatttttggcaaggcagtggtgtgttcttccatctgcaggtacatgattatctggttgtctttcattttgtgatgttagcagccgttgatgatcactgcacacgagtccccattccttgtgtctccagtcatttgtctgaarcttatttctaatagattcctaaaggagggcgcatataatgttcaacaagtaatctgccaccgttatgtttcaaagccaatttatttggatatagaatccgtgactgacatgttttccttgagtatattaaatgtatcttttttttttttttgagatggagttttgctcttgtcacctaggctggagtgcatggcgcaatctcaactcactgcaacctycgcctcccaggtttaagcagttctcctgcctcagccttccaagtagctgggattacaggcacrcgccaccatgcctggctaatttttgtatttttagtagagacggggcttcaccatgttggccaggctggtctcgaactcctgacctcatgatccgcccgcctcggcctcccaaagtgctgggattacaggcgtgagccactgcaccggcctaaatgtattctttcattatcttttgacatacagcgttgttgtcaaaacagtccagataaaatctgtttttctttcccttatgagtgacttggtccttttgtctggattcccaaaggagtttttatttttctttaatatcttgtggtttttctatataatgtatcttattgattgttctgaatcatgttttttagatatgtagtaagttcttttcatgtgaagtttcagtcttttttttttttttcctttttttaagaggcagagtctcactctgtcgcccaggctggagtgttgccgaacgtgactcacttcagccctgacctcctgggctcaagccatcctcccatcatagccttctgagtgactgggactataggaacatgccaccacacccagctaatttatttttcttttttgcagagacagggttttgccttgttacctaggctggtctcacactcctggactcaaatgatctgcctgcctcagcttcccaaagtaatgggatttacaggcaagagtcactgcaccaggccttttcttttatatttttatttttatttttatttatttattttcaaaatggagtctcactctgtygcccaggctggagtgcagtggcacaatctcggctcactgcaacctccacctcccaggttcaagcgattctcctgtctcagccccctgagtagctgggattacaggcatgtgccaccccgcctgactaatttttgtacttttagtggagacagggtttcaccctgttggccaggctggtctcgaactcctgacctcttgatttgctcgcctcggcctcccaaagtgctgggattacaggcgtgacaccgtgcctggccttttttttttttttttttttgaagacagcatctcactctgtcgccagacgggagtgcaatggcacagtcttggctcactgcaacctctgcctcctgggttcaagcgattctcctgcctcagcctccccagtagctgggactacaggcatgtgccaccacacccggctaattttttatatttttagtagagacagggtttcaccgtgttagccaggatggtctcaaactcctgacctcgtgatccgcctgcctcggcatcccaaagtgctgggattacaggcatgagccaccacgcctggccttttttttttttgagacagagtctcgctctgttgcccacgctggagtgcagtggtgggatctcggcttttcgcaacctctgcctcccaggttcaagtgattcctctgcctcagcccctcaagtagctgggactacaggtgtgagccaccatgcctggctaatttttgtatttttattagagatggggtttcaccatattggccaggctggtctcgaactcttgacctcaagtgatctgcctgcctcagcctcccaaagtgctgggattacaagcgtgagccaccacgcccagccacatttatcattttcttactttagcttattttgaaatatgaggctatggaaggccgggcatggtgtctcacacctgtaatcccagcaccttgggaggccgaggcaggcagatcacgaggtcaagagatcgagaccatcctggccaacatggtgaaaccccatctctactaaaaatataaaaattagctggccatagtggcgtgtgctcgtagtcccagctactcgggaggcaggagaattgcctgaacctgggacacggaggttgcggtgagctgaggtcgcgccattgcactccagcctggcaacagagtgagactccgtctcaaaaaaacagaaatattagtctatggatttcatctgtttgtgggcatgtctttcttatatgtgctttcattataggaatgttattttaatctttattatcttttttgataataactttgtataggatttgactgtaattgttttctgtttgtaatttttatctgaagttggtctttctacattttcagaagagaagagtgagtcagaattgcttttttagcttcacagctctagagccccctcttttaagatcttcctccactgttcctttatcgccgttttatctgtcttttctggttcctgtgctcttggattgtctttgtcctgcttaatttggattctactcctggcaatttctatttagtgccaggcttcttcttcttcttttttttttttttttttgagacagagtctcgctctgtcgcccaggctggagtgcagtggcataatctcggctcactgcaagctccgccccccaggttcacgccattctcctgtctcagcctcccaagtagctgggactacaggcacccgccaccacgcctggccaattttttgtatttttagtagagacagggtttcaccrtgttagccaggatggtctcgatctcttgaccttgtgatcctccytcctcagcctcccgaagtgctgggattacaggcctgagccactgcgcccggccttcatttttaaagacagtgttggtttgttagttttgagagttcatagggctaagactgctctagccttttcatatcttactgtgaatagataaggggactgagtcttcagagtttaatggaagagttagtgattgaaccggttctcttccttcagaggctatgctyttaactacgctttacagtctaggagagaagtaagaatatggtatacacttttggccaggcatggtggctcacacctgtaatcccagcactttgggaggctgaggcgggtgtatcacttgaggtcaggtgttccagaccagcctggccaacatggagaagccttgtctctactaaaaatacaaaaattagctgggcatagtagtgtgcacctgtagtcccagctactcaggaggccgaggcacgaagatcgcttgaacccgggaggcagaggttgcagtgagctgagatcatgccactgcactccagcctgggccacagagtgagactccgtctcaaaaaaaaaaaaaaaaaaaaaaagatgcatttgtgcatctcagatacccaggcctttttgactattgtattgcctccaaaagcattagtactttagtactaattagtacttttagtacattagtagtattagttgcctccactaagcattartagtctttataatcactctaactctagacttttggctttagaacacgtttagttctaaacctgttctaaagattctaccaggtttacttggtctgctattttcaaaatttctttttttgagtggtgttcttttctgtggtgttcagatatgtagaattttatatgtagattagatagttgtatgtatgtatagaactcttttaaagtgtacaattcagtggttcttaatatgtataaactcttaattagttttgtgtaaaacatacttagaaatgagcaaatctcctaacaggactcatgtagtatccttgtcttgcaggtgtgcagctattgcttgttgatctctttctctaagtggagggaattccaggcttataggagaaatttttgtcctatgtctagagccatgtgaacaagaagtgttgttaagtaaaggtgcggtctgtgagctgcacataaagcaaagctggctgactccttggatatggatcctgacccatattagagctgttgctctaactatctggggtaaccagccattggtgctgtttttgtgtgctttagaaacagactgcgattattcctcgagaacaagttagtgaggtatattttagaggcttcaagcagactaaatccataatagagttctgtagcctatgtttaaagtatttgttttatattgccggtctcattgcttcttttaatttagaaattccagagttgataattctctatttaatctagacaggaatctttggcttcaagcaagcctcatttaccctgtgcctcagtttcacaaccaagaaagtagggataataataccaacacactagtcgttagaggtatagttccttaagtcctttgatgtagagaaaggactattgttatgtcttatgaaacagctaacatgttacaacaaagaacaaactatgccaatgaaatccccatgctggagacaacttattagaaagactgagcatatgtactattttcagatgttcaaaaagctaaatgcaagttattttcagttgagtgtttgatgtcttttatcaaattacaaatctctgtcattctttcctggaacctttcatttttcccagagatttttatttgtcagatttctatcatcttgaaaagagtaaatacagttggtcaagggaagatctgagaacttggtcccaacttgcttaaagactttattaagtggcaacgttccttaagactgctttggtgggccatggttgcttacgacagcctcagtgtaatcctgatgatgccttcctggagtctactggtggcgtagtgaaaagcccaacattactggcagaaacgagttggatataaaaattttggagtcttttttttttttttttggccaagaaatctcaatggagcttttcttttgatactaacctattttgatactaacctagtataygtatctacaacattgaaatgttttcaccttactttttcagactgttactttttggaactctgatctgtgggataggacttctgtagccctgtacttaatttgacagccaaaaaacttgcaagccctgtgtttgagtctrattcttttaagtcattttccttccttaggaccctgtcaggggatgaagggctatagggtagagggaaaagttactagctagcaactgtgataacacagactgtcatcacaaacttactgcatcattggataataagcagcctgcatgactttgatttttggaaactcttagtagggccacttattctactctgaatcatgaagtaacattacagcccgagtagtggaaaggtgcagtacaatttatgggaagtcagtaagcattctgtcaccatgaccagagagttcatttgaagtagcctgtagctacttaggctcttaacttaggcatcatctgtgccaacaagacttccctggttggccaggcacagtggctcatgcctgtaatcccagcactttgggaggctgaggcgggtgaattgcttgagcccaggagtttgagactagcctggacaacgtggcaaaaccctgtctctacaaaaaatgtaacagttagccaggtgtgatggcatgtgcctgtagtcccagctactcaagaggctgaggtgggaggatcacctgagcctgggagacagaggttgcagtgagctgagatcagccactgcacttcagcccgagcaacagagtgagaccctgtcaaaaaaaaaaaagatttccyccctggttttctggggtttttttttgttttgttttttttgtttttgtttttgttttttgagtccagatctcactcttgcccaggctggagtacagtggcatgatctcagctcactgcaacctcagcctcctgggatcaggtgatcctctcacctcagcctccccagtaactgggactacaagtgtgtaccaccatgcccatctaattttttgaagagatggggttttgccatggtgcccaggctcgaactcctgggctcaagcagtctgctcacctcccaaaatgttgggattacaggcatgagccactgcacccagctgtctggtcttttaagactgaatccggtgtcatttttctgtatttacacagggattagaagacatctgtcatattgttgctatactgtgaggcaagaactatatctgggcctggcacaaagagtttgtccaatattatttgttgaatgaatgaatgacagccggaagcaagttatttgtaaacatttaaaataagttccttaagttccttactcccttaatatagacacacatgtttaggtcaggtacagtggctcacacctgtaatcccagcactttgggaggccaaggcaggaggatcacttgagcccaggagtttgaggccaacctgggcaagatggtgagactccctcatcgctacacaaatttttttagattagccaggtacagtggtgtgcaccagtagtcacagctacttgggaagctgaagagggaggatcccctgagcccaagaattttaggcaacagtgctgtgatcgcgccactgctccccaacctggccaataaagtgagaaactcatctctaaaaaataaatagatgcatgtttatgtgaacctaaggatgaatttcagtgactgtagattagaagaactgattatagcattggctgcttggtgttcactttatttgcatctgtgagtttccaacaagccctaagtttactgacatggctggtcctctaccccaagaatgttctcccagaggaaggatgatgatgatgatgatgatgatgatgatgatgatgatgttgatgatgattgagacggagtttcgctcttgtcacccaggctggagtgcagtggcgcagtctcagctcactgcaacctctgcctcccaggttcaagtgattctcctgtctcagcctcctgagtagctgcgattatgggtgcatgccactacacccagttactttttgtgtttttagtagagacaagatttcatcatgttgcccaggctggtcttgaactcctgacctcaagtgatccacccgccttggcctcccaaagtgctgggattacaggtgtgagccactgtgcctggcaggattattttattttttgtgataaggtagggtgatgtggtgaaaagaacacaggctttcataagagaggtagacctagatagataattcttgttctgtcattcactagctatgtgaccttggaagttatgagtccctttcaaacttgcatttgattcatctataaaatattaatatttttagcttattcaacaaatatgtgttgaatacttagtatatatcctattcagagatgctataaatatagtggtaatccagataaaaaagatacctgtcctcttagatctactctataaggagagagaaataaacaaggcgatcttcccacttcagctccaagtagctgggaatacaggcacacaccaccacacctgcctaatttaaaaaattatttttgtggagatgaggtcttgctatgttacccaggctggtctcaaayttctgggctcaagcagtcctcctgcctctgcctcctaaagtgctaggattacaggtgtgatgagccaatgcacccggccctgtttttcacttgacagtatatcctggaaatcactccatttcagttaatggagacttttttttttttttttttttgagacagggtctcactctgttgcccaggttggagtgcagtggcatgatcatggctcactgcagcctcgtcttcctgggctcaagcctgtagctgggactagaggtactcaccaccactcccagctgatcttttttttattttttgtagaaagggggtcttgctttgttgtccaggctgctcttgaagtcctggcctcaagcaatcctcctgcctcagcctcccagactgctrggatgacaagtgtaagaaactgcttgaccagattttttttttttaacagctacatagtacctcattgtacatatatttttaaaaatcttttaaattattttaatacagtctcttgagatcagtaacacattggtaaactttctgcagaagtatattcctgaataagtaaaccaaaggcaacagttgacaaaaaggtaaggaaagaagtagctttattttaaaatacagtcgtcctttggtatctttggggtattggttccaggaaccctcacagataccaaaatccttggatgctcatgttgcttttataaaatggcatggtatttgcatataacctacaagttctcccaaatactttaaatcacctctaaattatttataatatctacagtgtaaatgctatccaaatagttgttatccagtattggttttttgtcttttttttttgagacggggtctcgctgtgttgcccaggctggagtgcagtggcgcgatctcggctcactgcaagctccgcccccgggttcacgccattctcctgcctcagcctccggagtagctgggactacaggcgcccgccacctcgcctggctaattttttgtatctttagtagagacggggtttcaccgtgttagccaggatggtctcgatctcctgacctcatgatccgcctgcctcggcctcccaaagtgctgggattacagatgtgagccaccacgcccggcccagtattggtttttaaacagtattagtttttartttgtattttttattgttatattattatttttattttttctcgaatatttttgatatgtggttggctgaatctgcagatgcagtacctgcagatacagagggccaactgtaaatgtcaaaaaagtcaactttaaaaaataactttatcaatgtgagttatttttaaatacatatagggactgaacatacatgcatcaaattgtactctcattcactgacataagcacacctccaaacaagttaatatgaaggtaaatacataaatatatacaaataaatacacatacccaaataacaagccacatatcacccaccattttccaattttcacataaacatactggcaaatacagcaaaatatcagtgtaaattaacacacttacatatacagatatgcataaatactagaattcaaagtgacgtgtagcatataacacaggtacttaaggcataaacaacacagctcagtcagaaacagcccagagttgaaacaaatactattgtgaccttctcactagggatgaagattcagcagttcacaatgaaattgagattaataaaatgctcatgctttaattaataggaacagagaaaccagactctaaaccattccccattgccaatgagtttgttatgttgataatttgatgacaacttcagagacttaaaagcacagggaggctggggagtcstatctagataaaagatttgctaaatgaaattactgaaggtgaacctggaaacattctgtaaagttagctaaattatctttacgttttttagaaatagggtctcactctgttgcccaggctggagtgcagtggcatgatcttagatcattacagtgtcatactcctgggctcaagtgatcctcccagcctcagtctcctaagtagctgggatcacaggtgtgtgacaccatgcctggctcaaattctttttactttgaaggccctgctagaaattgctgctgctctaattcaccactcagagaggagaggcaaaactaaataagctgttgctggtttcaggtgctgtggaagaacccacaaaaaaaaaggtctgaactgaaaatctccatctccatcaccctgatttaaacaggtgtactatccaaaggaaacttggagttgttattcctaatgggaagccaaaaacaccagactgtgcaatcgtagatggttcaagggtgccttcacggttagcaatagggatgttacgtagcctaaggctatcatagaggccttggagcttttgatgctgaagatggcgttccataagtttctcagatgtcactgaactttttcttgtattcttctagcactttcttcatggaggygacttcccctttcatagaggtcaattctacatcctcgctttgtatttgctgagtatatattttctccgtctgtttcagatggccctcagccttgatgaaattgtgttcttgatagagatgttcctgatgtacctgatatgtccagaagsccactgctcaggagctaacgtccaacacgatctcttgtcgcagtcctgccaataccatagctttatatttctctgatggattgagttctgtgcggacaatatctagctttccagaaagggtactgttycaggcagcacagatagctggtgagygactaaactcaccactgccatgctgatcacagaatatgtgagagcaggcagtgacccatgcatagccatagagtttgatgccacacttttgataattacaaagtagcatgtcttcacacaaagacataataggatagtgaggtctccagaagctaaagacagkccataaaagaaaaacgcagtaatcatctactgtatatccaggatttacagcaccaaagaggtccagactggaacagtgagactccgatctggtttcggtctcttaaaattttacttctctggcatcacatgaatccagcttctatctagaaatcaagttgaaccacaggatctatcaattacctaggatcatctgtgtaatgaagagaacttaaggcagcgtatcttgatcaaaattcaagtaccaggcyttaggtcccatcagcctttaaccctttttattgagaatgtccaaatccaagcccatttgattttcagggggtctgtagataggccagttctggactggcacacagggtgctgaagacccaggccttcccttctcagtggatttcatcttcaaccrgyccaccaaaatggaaaggaaaaaaagtcattgtacatattttactcaaccaactcctatggttgggtttttaggtagcttccaatattttgctgcaatgaataactttgcaattagtagtggtattgttgcatgataaattcttacaagtgggattactgggtcaaaggataaaactgcatgtgtagctttgttaaaaatgaccaaatttccatccaaaagtgttgtactagttagcattcctagcaacaatatatgacagtgtttatttccacatggactcaccagtctaattggtgagaaatggtagctcagagtcatttgaattttaatttgcatttttcttttttttttggagacggagtcttgctctgtcatccaggctggaatgcaatggcgcaatctcagctcactgcagccttcacctctcaggttcaagtgattatcctgcctcagcctccaaagtagctgggattacaggcacatgccaccacgcccagctgatttttgtatttttagtagagaccrggttttgtcatgttggccaggctggtctcgaactcctgagctcaagtgatctgcctgcctctgcctcctaaagtactgggatcacaggtgtgagctgcatttttcttattatgagtgaagttaaatatctttttatatgtttaaggaccatttaaaaattgaatacattatgatctttctttgtaaattgttcatgtactttattttttctcaattttaaaagtaccttcagtttttgttgttttccttcttgaattttagaagttctgtaactgtagcagtttgatgtcttttgactttgtggtgtttgggggcatagaaaacttttaggtcttgccctgtcgcctaggctagagtgccatggcacgatctcgccttactgcagcctccatcccctgagctcaggtgatcttcctacctcagcctcctgagtagctggaaatacaggcacacgtcaccatacccggctaattttttttcttttttgtggagacagggtctggatgttgcctaggctagctagtctcgaactcatgagytcaagtaatcctcccaccttggtstctcaaaatgctgggattacaggcatgagccaccactcccagccttgtttttatatttatgtagtcaaatttaacaatctttaattcatctggattttgaataacaattagaaagtttcttcccacatttaggttatagagaaacctacttttgtttccttctagtacttgtatagtttcacttttttacatttaggtctctgatccatttgatgtttgtcttgtgtacggtatgaacagtgaatctaattttatcctttttccaaatgcttattcagtttcccatcaccatttattaaaatattcattttgcccttgttatttaagtttcacgattatcatatactaaattcccaagctgagtcaatttatatacacacatatatacatatatgtatatatagccataagatcttattgatcatatttttaaattttctatatccatttttattttttatctgcttcatctatcttttactaatagtagtgtgttaaagctccttattattagtggtttctattgattttttttttatactttaagttgcagatttgttacatatgaatacatgtgccatggtggtttgctgcacccatcagcccacatctacattaggtatttctcctaatgctatccctctcctagtccccccaccccccgacaggccctggtgtgtgatgttcctctccctatgtccacgtgttctcattgttcaactcccacttatgagtgagaacatgcagtgtttggttttctgttcctgtgttagtttgctaagaatgatggtttccagcttcatccatgtctctgcaaaggacatgaactcatccttttttatggctgcatagtattccatggtgtatawgtgccacattttctttwtctagcctatcatcaatgggtatttgggttggttccaagtcttagctattgtgaacagtgccgcagtaaacatacgtgtgcatgtgtctttatagtagaatgatttataatcctttgggtatatacccagtaatgggattgctgggtcaaatggtatatttctggttctagatccttgaggaatcaccacactgtcttccacaayggttgaactattttacactaccaccaacagtgtaaaagcattcctgtttctccacatcctctccagcatctggttgtttcctgactttttaatgatcgccattctaactgaaattagatggtatctcattgtggttttgattgggatttttctaatgaccagtgatgatgagctttttttcatatgtttcttggccacataaatgtcttcttttgagaagtgtctgttcatatcgtttgcccactttttgatggggtttttttttcttataaatttgtttaagttccttgtagattctggatattagcctttttgtcagatggatagattgcaaaattttctcccattctgtaggttgcttgttcactctgatgatagtttcttttgctatgcagaagctctttagtttaattarattccatttgtcaattttggcttttgttgccattgcttttggtgttttagtcgtggagtctttgcccatgcctatctcctgaatggtattgcctaggttttcttctagggtttttatggttttgggtcttacgtttaagtctttaatccatctcgatttaatttttgtataaggtataagaaaggggtccagtttcagctttctacatatggctagccagtcttcccaacaccatttattaaatagggaatcctttcctcatttcttgtttttgtcaggtttgtcaaagatcatatggttgtagatgtgcggcgttatttctgaggcctctgttccactggtctatatatctgttttggtaccagtaccatgccgttttggttactgtagccttgtagtatagtttgaagtcaggtagcatgatgcctccagccaccacaatcaagtcggcttcatccctgggatgcaagactggctgaacgtatgcaaatcaataaacataatctgtcacataaacagaaacaatgacaaaaaccacatgatttcttaacagatgcagaaaaagccttcaataaaattcaacaccccttcatgctaaaaaactctcagtaaactaggtattgatggaacgtatctcataataagagctatttatgacaaacccacagccaatatcatactgaatgggcaaaagctggaagcattccctttgaaaaccagcacaagacaaggataccctctctcaccactcctattcaacatagtattggaagttctggtcagggcaatcaggcaagagaaagaaataaaggtattcaaataggaagagaggaagtcaaattgtctctatttgcagatgacatgggtgtgtatttagaaaaccccatcgtcccagcccaaaatctccttaagctgataagcaacttcagcaaagtctcaggatacaaaatcaatgtgcaaaaatcacaagcattcctatacaccaataataaacagccaaatcatgagttaacgcccattcacaattgctaaaaagggaataaaatacctaggaatccaactcacaagggatgtgaaggacctcttcaaggagaactacaaactactgctgaaggaaataagagcggacacaaacaaatggaaaaacattccatgctcatggataggaagaatcaatattgtgaaaatgcccatactgcccaaagtaatttatagattcaaatcaagctaccattaactttcttcacaaaattaggaaaaactactttaaatttcatatggaaccaaaaagagcccatatagccaagacaattctattgatttcgtaattcatctcctgatgtttttgctttatatgagttgttttgtcttttttgctgcatagatatgaagaactattgtattttcacttttaattttggcttctagcattataaaataacctttgttttatttaatgattttggcgtaattctactttgtctgatagcaggatcactttcttattgtttccatttgcctggtatatctttgctttttaaaaattttttagcgtttctaaatctctgatttaggtctgtctcttgcatacagcatagaattagattttactttcaagcaaattgaaaaccttttgctttcaatgagtgaattatgctcatttccatttattgatgtgactgacatgcctgttgtaaatgctgttgttattttaataatttatttttgagacagaatgtcactccagtgcccaagctgaagtgcagtgatgtgatcatggctcactgtagcctcgacctcctgggctcaagcartcttcccacctcagcctccttggtagctgggactacaggcacacaccaccacacctggctaaatttttgtattttttgtagagatggctaagtctttgtgtttttttcgccatgttgcccaggctgatctcgaactcctgggctcaagtgatatgcacaccttagcttcccaaagtgctgggattacaggcgtgagccactgcacccggcaagaactgatattaataaagagaattggcaagttaggttcagtgatgacttaaacccttgctggagtggtagggacaaaagcctgattagagagaatgggagaggaatgagaaaatgaagacagtgagacagctaactttttttgagaaattrtgatatgaaggaagaagaaaaacagggcagaaattggaccagaaattggaccagagtgaggctggttcttttttttttcttttttttcaatgaaaaatttcatacctataaaagaatgtgatataaataagtgcttccttgcccagcttataaaaataaattgtgtgttttctggtttttttttttttttttacacttatggaggcaagttgggttttttttaaggtaggtatttttgtatgttctatactgacgggagtgatcccaaagaggagaggaataaattgatgatagagaaaataaagcattcaattattcgattcaacaactatatttttgctacctacaaggaactaatcactgtatgatgtatgcttaggatgaacagtgagtaaaacaaagttcctgcccttgtggcatttttagagtagatgagagggactgtgatctggtgcacgagtggatgggtttcccttaaattggagaaaggacggccaggcgyggtggctcatgcctgtaatcccagcactttgggaggccgaggcgggcggatcacgaggtaaggagatcgagaccatcctggctaacacagtgaaaccccgtctctactaaaaatacaaaaaattagccgggcgtggtggcgggcgcctgtagtcccagctactcgggaggctgaggcaggagaatggcgtgaacccgggaggcggagcttgcagtgagccgacatcacgccactgcactctagcctgggtgacagtgaggctctgtctcaaaaaaaaaaaaaaaattggagaaaagacatttaatttattgtacaggcagaatgtataatatgtaatgcatatagattaattaattttgtgtcagaaagatgtttgctgcttctaattgcttgtattttcttattgaaataagatgtaaagccaccagttaagagtcagtagggccaggctcagtggcttacgctggtaatcccagcactttgggaggccgaggcaggtggatcacctgagatcaggagttcaagaccagcctggccaaaatggcgaaaccccatctctactaaaaatgcaaaaattagggccgggcgcggtggctcacgcctgtaatcccagcactttgggaggctgaggcgggcggatcacgaggtcaggagatcgagaccatcctggctaaaacggtgaaaccccgtctctactaaaaatacaaaaaaattagccgggcgtagtggcgggcgcctgtagtcccagctacttgggaggctgaggcaggagaatggcgtgaacccaggaggcggagcttgcagtgagccgagatcccgccactgcactccagcctgggcaacagagcgagactccgtctcaaaaaaaaaaaaaaaaaaaaaaaaaaaaattagccaggcatggtggtgcgcccctgtaatcccagctactcgggaggctgaggtgggagaattgcttgaacctgtgaagcggaggctgcagtgagctgagattgagccactgcactccagcctgggtgacagagcgagaccccgtctcaaaaaaaaaaaaaagaggaagggagaagctgctgaagttttaaggaaggatgagaatatatgaaattatctctgagaatgtaaaagttaattggctaggaaatgtattgctggacagtgtgaaggatccccttgagatttgggttatcagtttaaaaggagactagccaatgctgttaccagttttctatccatgtttagcttcttgggttcatatgcaaagtaggcagagagttaggatataactagcatctttacctggtgagtacaagggatgagagtagtaaggaagacrgtgatgtatattaaggagtatttatagtgatggaccaccataagctgtgtaaacgagaccaccaaaggaattagggtgctataaatcagtgtaacaaatggattgaggatcctgttagaatcagaattgctggagccagagtaaaaagtcagtgagttggaaaaatagaaggtggtgatcagacaataggatgtaagctttttgaggtcagggatttttgtttgtttgttcattgctgtatctctataatgcctggccatattcagggttcaatatatgtgtgtyacatgaattaatatgatattttaaagtgagattttggagttggtgcaatttttggtaatgccaaggagtagagtataacaaagtggttgagtgactaaggcgagaaggagaaaaaaaataattgaacgtgatgaggtcatggagtctcagccataaggatgttaaagtcactgaagtaatttttttaaaaaacagagataagaaaatagtcctaatgtcttttttaaaaaactcatactggtcaggtgcagtggcttaygcctgtaatcccaacacttcgggaggccaaggtgggtggatcacttgaggctaggagtttgaaaccagcctggccaacatggcataatcctgtctctactgaaaatacaaaaatcagccaggtgtggtgacacatgcctgtaatcctagctactctggaagctgaggcacaagaatcgcttgaaccccagaggtggaggttgcagtgagccaagatcgcaccattgcactccagtctgggcgatagagcaagactcttgtctcaaaaaataaataaataaataaacaccttatacttattgaagttatatgtatatatcatttaaataattcaatatcatttaataaattaataatttaataatttaaataattcaatagttcaagctttgttcctaaaaatattagtcccctgaccacccccaccccatatccctaacccgaaaggttctcttcttttagctactttgttttttatctgtatgtctctaaataacatgctaaaattgttacttcttgaattttctgttttgtttgtttgttttttagaaacacgatctcactctgtcacgggtgctggagtgcaatggcacaatcatagcttactgcagcctgaaacctgggctcaaatgatcctcctgcctcaacctctcaagtagctgggactacaggcatgcaccaccatgcctggctaatttttaaaattttttgtagagataaggtctcgctatgttgcccaggctggtttcaaactcctggcctcaaacagttctcccaccttggcctcccaaaatgctggggttacaggcatgagccattgtgctcagccaaccctaagttttaaaaagatttattagttgtattttttctcattgttatgaacttccctttagagtgaaagtttgatttgggagaacaaaaaaaatctcttgtttttttctattccaagtcagtgcatttagagatgaaaattaaattgcatatatctaaatcctagaagagacgtgacaggcatttttatagggaactcatttgaacataattaaaaattaatataggtgcttctttcctagcttcacacagtaaggaagaatataattcctctatttgttcttaatctgaagaggaaaatttccttggaggacgtgaatgaattatgaatattagaaccataaatgttgagccttcattttaagttgtaaatctagcaagcatatcatcattcttcagccgtgccctccaggacagctgcttttgacttctttcctttcagacatctctgccttttgcttctttggtagtagcaggttcatttcctaccttcttgcattagggaactgcaaagttgtctctgtggcccctgtcctaactctgaacagtcagtctctacaaagggagcattcacctctgtcagaatgtatactgtttctaaacatttaaaatcagatgttttaatatttgagtcaaattaaacaaagagaaggagataacaggaaaagtactaacatttactcatgcgtgtttgccagcactaggttgaactctgaatatacaaagataaaagggctccttatggagctcaaagtctagatggaaaaaatatatatgtaatccaattagtgatttaaggtctgtaatggatcagaaaatgcatcatctctaggggagataatatatcggctctgccctttctagtaactgtgacaagacctgaattttgatggataaatatataatagagtaggaagacagactagggtatacattcttggcagtcgactctatcaaattaacactggcggccaggtgcagtggctcatgcctgtaatcccagcacctgaggaagccaaggcaggaggatcacttgaggtcaggagtttgagaactagcctggccaacatggcgaaacactgtctgtactaaaaatgtaaaaattagctgggcatggtggcatgtacctgtaatcccagctacttgggaggctgaggcacaagaattgcttgaacctcgsggggcggaggttgcagtgagccgtgatcgtgccattttactccagcctgggcaatagcctgggcaatagagcgagactctttctcaaaaaaaaagaaaagaaaagaaaagaaaaagttaacattggctatgtggaggggagttgggggagagaagactgaattaggtaggtggagtcatattttgaagacccttaaartcatgctaaggaattccaacttaatcttgttgagcagcaatctccaaaataggctgtactcaaagccaggtggtgtacagaattaagtaccagaggaaaatgttagaatttcttgtttttaaatgttttatttattcctttttaaatgtctatctttatatatattatataaagagcatatcatattatagtgatctatatatttttttaaaaattttaaggtaagtggcaataagttcaacttttttgatgtttggaaaacactgttttagggtgtctttgagcagggaaaagacatatgcagtagaaattagagtatggattagaataagggaaaactggagcaagagagacaccagccaagagactggaagaagattttgagacctgaactaaggcagtgcaataggggaagagtaggggacagggcaggagaggaaggacttccatcctggactatgggcggatttctggcatcagattctggatggtagcaacagcatgattaaactaaggaatatagtaaggatatttagctgtgagcccaaggattatcacatttcttacttactgactgagttggtcayttcccttcctagagctactgccccaacctcagtgaaaacaatgtggcagttggcccttggccttgcactttgaggactatagactggaatcttttccaagcattttaaaccaaaactgaggtctccattgcagttagcctttggtgtttattcaagcacacaaactatgccaggtgcagtggctcatgcatgtaatcccagcattttgggaggctgaggcaggaggattgcttgagtccaggagtttgagaccagcctgggcaatatagggagaccccttgtctaaaaaaaaagaaaagaaaagaaaaagcacacaaactactcttggggatttgactgggattggaccacataggaaaatgtaaaatgtgaccttcatagtcacaccaagtagctgaattcatgagttccatatgggcaggggtggcatgcaggctggtgatttggatcatagccattatttgtggaagcactgggtgagtagagaagcatggtagttaccttgccctgacagtttttttccaagggagtaaatgtgtttttctttctccttgtcataagaaatcggttgccagattgtgttatttataacaatctgtcatggaacagctgccaggaaaagaaaagaggctattcccagtagctctcctcacctcccgccccaccactacagccacacacacacacatccggttttctgatttaaccttttttcccctctaattttactcagtggttttggcttgatcgaaaatgttcttgtaatgagagatttctgggctttgccatggcttggtaattgggttttctgagcttaatttgtttactttagtcaagactaactggcagcagtttggattttgaattcctgggtgttttggacactttaaacactaaagtgctgccttcccttgaaaccttgcatgtttctatattgtcaagagtgcacacatctgctttccttctgagttgtgctttctgcccttgacattgccctggcttctctagaggagcaggcttgggatgaggcataccaatgactgttggaatagtgagtagggagatctttggagaggccagttggtctctgcagaagaggcatactgttggcattagaaaagaagtgggtccatgaaacaaaggcagctgagtgttggcatgttcagggaactttaaaattaactgcatttctgacacacagttgcttcacagtccaaacagtccatgtttattcatggcttgtggtcacacatgatcaaaaatacttctctgggtcttatcagtttttctactttctctctctgggctccagttactagaaagccatttgcattcctagaatgggctttacattttagaataaaaataaaaacaatgatcatttctttctgttacagcgtttataaaatcaggccaggctcagtggcttatgcctgtaattccagcactttgggaggctgagacaggaagatcacttgagcctaagagtttgagaccagccctggcaacatagtgagatcccgtctctacaaaaaaamaaaaaaaagaagaagaagaagaaattaaaatkagtggacatagtggcatgtggtgcctgtagtcccagctacttaggaagccgaggtggtaggatgcttgagtccaagaatttgaggttacagtgagctatgatcacacctctgcactccagcctgggcaacagactgagaccctgtctcaaaaaaaaaaaggtattatgaaggtataagtgtgatttagctttcctttctttcttcttctgagatttccagctttggaaattgatcagacaacaaacactttcctttggaagtgatggagttgcacagaggatgagatgtgtttggtctcagtgactcttacatggtgcattctctgggaacagaggcaggagaggggctgatggaacagcacctccgtctgtatgctaggccctgtkctttcagacccacgcctttcttttcacactaagaacagatggcaaccagacattgagtggaggggtctgttccttgtgatccttggggattttgcattcagtttagcaaaaagtcatcaaaacgcaaagagagaaatgagcctacagcctgttcacaattatgcaggacttgtttggcattcactgtactgacagatttaaacacttttgcagatatcgaatgataacagcatttatttgccaagacaacattgttaccacttctgaggcatctgcattggagtcattttcttgattttggagtatacttaatagttcaatttattgtagatcagtmaacttgcaaaaaaacagccatcttattagagaaacttagaaaaatagaaaggggatttttttcctcagcaaattgtcattttcattctgatgaaatggggcaacttctgtactgttgtaatgacaactctgtgaatgtctttagtaatgatttgtctccttgtctttctaagcattgttctaagtaggattctgcaggctgtttctttagtttgtatgtatgtggtctgatttgttcacgtttgctgcttcctgcatggtgagttgcaggtgtagggttttttttttcctaaagagatgtttatgggaactttttttttttttttgagacggagtcttgcgctgttacccaggctggagtgcagtggcgcgatctcggctcacggcaagctccgccccctgggttcatgccattctcctgcctcagcctcccgagtagctgggactacaggcgcctgccaccacgccctgctgattttttgtacttttagtagagacgaggtttcaccatggtagccaggatggtctcgatctcctgacgttgtgatccacccgcctcggcctcccaaagtgctgggattacaggtgtgagccaccgcgcccagtgggaactttttttttttttagtctcagagttaaaatctaaaaagaatttagagagccttaagcagaagagtaggaaacaatccgaatttgagcttaactttaaaaggccttcaaaagaaattgttcaggctataaataacaagttacatgtggaaaaagaaatggtgattctgttgcagattctatattcagaataagaaatttcaggcagtaacataaggcattctgatggttgagtctcactttctgagcaaacaagactctttgatttggtagactatgagttgaaatcatccattttcccacccaaaccaggaatcatgattttaaattaaaatattaggaaagtttggagtacttacaaaaaaaaaaatacatgtagactcacttcattcttgaacccaaaataatttggtccaatgttttccagactatttatttatttgagacaaggcctcactctgtcacccaggctggaatccagtggagtaattgtagctcactagagtcttgaactcctctgaggtttaagcaatcctcttgcctcagcctcccaagtagctgggactataagtgcatgccaccacacctggctaacttttaaaaaattttatttgctaatttaaaaaatgttttatgtatttttagagatggsgtcttactgtgttgttcaggctggcctcaaactcctggcctcaagtgatgctcctgcctcagcctccagagtagcttggcttacaggtgcaagacactgtgccaggcctttttttttttttttttgagacagcatcttgcactgtcacccaggcagaagtgcagtgatgtgatcatagctcactctaaccttgaactcctgggctcatgcagtcctcctgccttggcatcccaaagcactgggattacaggtgtgagccactctgcccagcctagacttttttaaagtagcataattggttttccaagacaaagcttatccagaagcctggaaaataaaattaataaaagaggagctgccttggttgattcacgaagggcaaatcagaacctgcctttccytgaggcacctctgggattacaggcatgtgctactgtgcctggccytaaactatgtttcttttttttctttctttggagatagagtcttgctctgtcacccaagctggagtgcagtggtgctatctcggcccactgcaatttccacctcctgggttcaagcaattctcctgcctcagcctcccgagtagctgggactataggcatgtgccaccatgcccggctaatttttgtattttagtagagatagggtttcactgtgttgctcaggctggtctcaaactcctgaactcaggcactccgcccaccttggcgtcccaaaatgctgggatacaggcatgagccactgcgcccagcctaaactatatttctttaacactattcagtaatacagattctttagttatacaaatagccattactaattgttaaatcttagttacataactactataaatctgtttcttcgttggtaaagtgctaataataacagctctgggctaggcgcggtggctcacgcctgtactcctagcactttgggaggccaaagtgggcaaattgcttgagtccaggagttcgagtccagcctgggaaacataggaagaccctgtctctactaaaaataaaaataaaaattagccaggtgtggtggggcacgcctgtagtcccagctactagggaggctgaggtgggaggatcacttgagcccaggaagtcgaggctgcagtaagccatgatcatgccactgcactccagcctgggtaacagaacaagaccctgtctcaaaaaaacaaaaatttagatatagatatagatatagatatagatatagatatagatatagatwdttcttcctgcatatggttgttgtgaagattgaaatatgtttttggccaggcgtggtggctcacacctgtaatctcagcactttgggaggctgagacaggattgtttgagcccaccagttcaagaccaacctggactacatagtgagaaacatagtgagaccctgtctctatwttttttttaatttaaaaataaaattaaaataaaaaataaggccgggcgtggtggctcacacctgtaatcccagcactttgggaggccaaggcaggtggatcacgaggtcaggaaatcaagaccatcctggctaacacggtgaaacaccgtctctactaaaaacacaaaaaaaattagccgggcgtggtggcgggcgcctgtagtcccagctactcaggaggctgaggcaggagaatggcatgaacccgggaggcggagcttgccgtgagccgagatcttgccagtgcactccagcttgggcaacagagggagactctgtctcaaaaaataaataaataaaataaaataaaataaaataaataatgtttgcaaagtgttatcacaattcctggccaatagtaagcattcagtaaacattagttatcattgttagtttttattataattaatctgagatattagaattataatcaggcatggtagctcatgcctataatcccaacactttgggaggccgaggtgagtggatcatttgaacccaggagtttgagactagcctaggcaacatagggagacaccatctctacaaaaaatgtaaaaattagccaagtgtggtggtacatacctgtagtcccagctacttgggaggctgaggcaggaggatgacttgagcctggcaggtcgaggctgcagtgagctgtgaccgcaccgctgcattccagtctaggtgacagagtaagaccctgtctggaaaaaaaaaaaaaaaaaaaaaaaaaaaaatatatatatatatatatatatatatatatatatatatataaaatcagaaagcccaccaataagagaaaaccttttcttcgttgatttattcattcatttgttaaacaattattaaataccaactgtgtgtcagacactggtaacaggccttatttttctcagctataaaaatagaggccagtaatattaataataacaatgcctttctgtcattcttatgctatttttataagattgaatgggtgccttgtacatacctgaggttacattgtaattatttactatagaatgttaagttcctaagaatgaagcattgtattctgttcatcctgttatttcctagtactgtagtaaagtgattgttctttgccatattaagtcatcaaactatgtgaaaatgctcttttaaactataaagagatgtataaatataagatcatatattccatagtcatagaaatagacaatgtggtggttttcagactgtttcttagaacctagggttccagagatgtctcagggactgcccacacagttcctgaggtacacaagggagaggtagagtttccagaccctataccagcacaattcaatgagaacaaccccatttattttacttgtttggctatgaaaaatgcttgaagagtattgtctgatttgtgtggttttaagccatcctaattttgtcttgtgatgatttgtgtaatccattgtcctttatgatattgacttttcccatctccatttaacagacagatgtgctggtgctgagctgtgatctgataacagacgttgccttacatgaggttgtggacctgtttagagcttatgatgcatcacttgctatgttgatgagaaaaggccaagatagcatagaacctgttcccggtcaaaaggggaaaaaaaaagcaggtaaggaagattggagtttgttttgtttgttgagttttcgtaattattattctcactcatgctttccctgaaaaaacatttattaagaatctactatacatcacagattctgtgctaggagttgatgacataaagtcaaataagacacagtccctgaatggaaaatgcttagaactattgattagattctttaatgtccttttgtatgcagagaggaacattcagaactatttgcattgtatttaaggctcaaataattgaatacgtatatctaagaaacaaacaaacaaaaatccaatttaaaattaacttttaaaaataggccaggtgcggtggctcacacctgtgatcccagcactttgggagaccgaggcagggggatcacaaggtcaggagtttgagaccagcctggccaacatggtgaaaccccatctctactaaaaatacaaaaattagctgggcgtggtggcgtgtgcctgtaatcccagctactcaggaggctgagggaggagaattgcttgaacccaggaaggggaggttgcagtgagccgagatcacgccactgcactccagcctaggcaacagagcaagactccatctcggtggggggagaaaaggaattaaagttactatcacaaatttagtatggctggttctttcaatgcttcagtcaccctaaatgaccaataaatgtgatagttgtttctttttctttttctttttctttcttttttttgagatggagactcgctctgttgccaggctggagtgcagtggcaccatctcggttcactccaatctccacctcccgggttcaagcacttcacctgcctcagcctcccgagtagctgggactacatgcacatgccaccacacccagctaatttttgtatttttagtagagacggggtttcaccatgttggccaggatggtctcttacttatctcttgaccccgtgatccacctgcctctgtctcccaaagtgctaggattacaggcatgagccactgtgcccagctgatagttgttaatcatgcttatcttcctaggattataacatacttattttgattgtaacatacttattttgatacttattttcctaggattctagtagtcyttttatgggtttaaattttcctgaatgatgtgtttttttccttgaagttttcctctggaatgatgtattctttaggttttgctttgccagcattatgtaacccactattttgtcattattatatgttggcatattttgttacaattattagactatgtatagcttattaatttcttactattattaatagagccactgagagccttcatasttaggatttgaataatctagttaatattttaggacgtttggttaaattataattttccagtataacattgaaacttgtttctagttgctttttgtgttcagatgatcactggtgcagattaattgttggatactttttctacattattgttatgtgatgatactcatgctgatcagtctttttgttcttcatatagtttctgcttttgcaaggtctggtttacttacaattccctgtattcattcttttctgcctacacagatagaaataaatatataaccagattttataaacagatatatgtttcataattaatttttttgtttcctttgtactctatttataaaaatcaattaaaaaatcaacttattcttcttgtcattagaacttttctttaaattttctcccttttcataggcattgataaaactttttaatacactttatatatagtttttatgtcttaagtatcattataaatgcacagattttcacaattccttttcttttattgtaaatttaacaatttataattgtataaatttatgggatacaaagcratgttataatttatgtatacaatgtggaataattaaattaaacaggttaacatatccatccctcaaatacttaacatttttcatggtgagaacatttgaaatttactctcttagcaattttgaaatgtacaatactcttgttaactatatttacaacataattctattttaaattaactgtaactattagctacctaccatccatttttaaatgttttcatgcttaaattgtcagtttggccaatggaagtcctttaagctggatcctttatcctctgaaaaagtatgatgtatactggtaactttctatagctggagtgtgaatataggaggcagagaagcagataggactggagaagagccagatatcagacgaaagagtttgaattcttgcccaaaacagtgaggaagttgttgaagtaaacaagatagtgtcataattagattagattaatgttttaagaagatttttctttccttttgtttcttttttttttttttttttttttttgagacagggtcttactctgttgccgaggctagagtgcagtggctcaatcttggctcgctgcaaacctctgcttcctgggctcaagcaatcctcccacctcagcctcccgagtaactgggactataggcactcgccaccatgcctggctaactttttgtattttttgtaggcacagggtttcacaatgttgcccaggctggcctcgaactcttgagctcaaaagcaatctccctgcctcagtctcccaaagtgctgggattagaggcatgagtcaccacacttggcctctttctttctttctttttaaaaagatactggggggcaccatggctcaggaccgtaatcctagcactttgggaagctgaggcaaacagatggcttgagcccaggagtttgagaccagyctgggtaacatggtgaaaccccatctctacaaacaattttttaaaaattagctgggcatggtggcttgtgagcctctagtcccagctacctgggaggctgaggtgagaggatcacttgagcccgggatgtcgaggctacagtgaaycatgatcatgccactgcactccagagtctcactctgtcccaaaaaaaaacagagagagagagagagagagagaaattaggtctcattatgttgcccaggctggtctcaaactcttgacctcaagcaattctcccacctcagcctgccaagtagctggtattacaggtaccagccatcactcctgtcaagttttcattcttaatatgaaattttaaacttctcaatacctatattttgttacatttgaaggctaagattcacctaaataattgagttttaaattcctcccatagaatgctatgcatttccatcataagcattttttaaagaatcgtaagtttttcagattatatatttggcatgcctcttggctgctgttgtgtgccagaacagcctgcagtccactgtttcccagatattgtttaatagtctagatcttctagacccaacttcctcaaatggcgttcttactgacttataggggaatggctaatmtctggatgtttctggagccacctttcttccccttgcactttcttctcagaaaatttataggagatacwgatactaaagagggcaggatcaaattcatgtttagactttttggagtatttcattcctgctgcaggtctttttttttttttttttttttttttttttttgagacggagtctcgctctgtcgcccaggctggagtgcagtggcgcgatctcggctcactgcaagctccgcctcccgggttcacggcattctcctgcctcagcctcccgcgtagctgggaccacaggcgcccgccaccacgcccggstaattttttgtgttttttagtagagacggggtttcactgtgttagccaggatggtctcgatctcctgacctcgtgatccgcccgcctcggcctcccaaagtgctgggattacaggcgtgagccaccgcgcccggtctgctgcaggtctttacacagcttccttgcctgaaatgctctctagtccctttctcctccgaacacatatattccaaatccagcttagccttcaagttatttctgagaaagacctatcctgaccttttaatataaactatatccttttgtttgcctacatatagcagcctgctctcttatttactctttcccctactggactataagctccataagggaagggatcatatctgttttgtttattttattcccagcacctggcccagttatgtcccatggtgaacaatcaataaatattattgaatggcctgcttataaaggcagctcttcttgccccccaccccaggtaagtgaagatagacctgagcactagcagtttaaaatcctaaagatgttagtctgagctatagttggattcataagtaggtattacaagagcgcgtgagcttgtaatgcttttagcaatatggatctagcagactgatactgactacattgtctattaattttatgtttagaaatggtttcaagatttttaaaaaaatacccagcactgcaccatgattgttaagagcacaaggtctatagagttcagactgggtttcagtgctcaaaagctgtgggattttgggcaaattaccttgatcttcatgaatttcattttcttctgttgtaaagtgagcctgaatcctttcaggatttttgtgagaattaaatgacatgtttataaggcatgtggcccattcgttacctgaaagatagtagatgcttaataatttgtaattactattgtaatttggtactgaaacttaacaaatctcatttaataactttgtaaacattctatatcacatatttatttcatgtaaaatggcagtactttaaaaaaccacagaatatcagagtgtttttgtttgcatttttaccataatagcttgtaagtttgaagggaaactcatagtgacaaatgtctagacaagcctctctggaaggctcacatgtaactttttttgagacagagtctcattctgtcacccaggctggagtgcaatggcgcgatcttggctcactgcaacctctgcctctcgggttcaagcaattctcctgcctcagcctcctgagtaggtgggtttacaggcgtccaccaccacgctcagctaatttttttttttttttgtatttttagtagagatggggtttcaccatgttggccagactggttttgaactcctgacctcaagtgatccacccgccttggcctcccaaagtgctaggattacagccatgagctactgcgcccagcccacatgtaacttttctagtgattcaaacagccctgctttctagcattttctagaatgtaccaacttttgaaaaaaaaatttttttctcaggaaagaaatggacaacttagaagtgtaagcaagacccagaaacccagctaaggctgtgcggggaaatggggttctaaactctgagaaacctcatttcttttttttcatcagtagataccattattattcagccattgtctcgccattgcttgatactacttactgagtgaaagggtgaagagatcagcttaccacagttactgagtatgtattatgccaactcctgaactaggcaccaaggctatagaaacagaaaaaaaaaaaaaccaaaatgccacaatatccctaccctcaaggagacacaaaaaagtgttcattgtactctccccagtcatagggcattttaagaaacttggagtctgatggggaaaattagactaggtattgtgtttttaaaagaatttacaggctgggtgcagtggctcacgcctataatcccagcagtttgggaggccaaggtgggaggatcatttgaggtcagcagtttgagaccagcctgaccaacatggtgaaaccctctctctctaaaaatacaaaaaaattagctgggtgtggtggcacatgcctgtagtcccagctactcgggaggctgaggcaggagaattgcttgaacccgggaggcagaggttgcagtgagccaagatcacgccactgtattccaccctgggcaacagagcaagactccatctccaaaataaaaaaagaatttataaaagcctctcatttgtaattgtttacattcacaaacatcaaacagtaaagacgacacatagagaatttcagtgacaccgtatatgcatatatatcttaaacttgcaatratatgtaaaaatttgttttccatcccttgttagaaactttccttttctcaatttcagtgagaagataatatatttatattgctttattgcagataatatgtttattagggggctttttttcctgtacattcctctatgtaattgtttaatactatcatgatttaatgacacaaatcattgactattgtctctatagtcccactgtatctcttggaatacttgaaatagaaaatgttctaggaaactttatttaaccaatccaattcactgtagtatttcccaaactccttagttctcagagttatatggccttggcccagactagaatcagtacatgttaatgtacttcagaaccatgagtgaaaactcttacttggctgtcacctcttaatcggcttagctccctctgcactaacagatgttggcaggcagttctgagcctgtacagtatttcttttgctacagctttctttacttctcttgaagctgtactaccaaaaaaaaacctgtttgggcttctgtgttaactattttctcctctcagtcttccaaatcccaccccattttaaaaaataaagtgggccaggcgtgtggcacacacctataatcccagcactttgggaggctgaggtgggtggatcacctgaggtcaggaattcaagaccagtctggccaacatggtgaaaccctgtctctactaaaaatacaaaaattagctgggcgtggtggtgggtgcctgtaatcccagctacttgggaggctaaggcaggagaattgcttgaacctgggaggtggaggttgtagtgagctgggatcaccactgcactccagcctgggcaacaagaacaaaattccttctcaaaaaataaaaataaaataaaaaataataaaaaattaaaaaaatttaaaaaacaaaataaaaataaagtgacttgaaattcctacatactcaaaattgaattttgttttgttttgttttgttttttgagacagagtctcactctgtcacccaggctagatcgcagtggcacaatcttggctcactgcaacctctgccctccgagttcaagtgattctcctgcctcagcctcccgagtagctgggattacaggcgcctgccactgcacctagctaattttttgtattttttagtaaagacgaggttttaccatcttggccaggctggtcttgaactccttacctcgtgatccacctgcctcagcctcccaaagtgccgggattacaggtgtgagccactgtgcccagcctgtttcactcttgttgcccaggttggagtgcaatggcacgawcttggctcaccgcaacctccacctcctggattcaagtgattmtcttgcctcagcctccctagtagctgggattacaggcatgtgccaccatgcctggctaattttgtatttttagtagagacggggtttctccattttggtcaggctggtctcaaactcccaacctcaggtgatcttcccgcctcggcctcccaaagtgctgggattacaggtgtgagccactgtgcccagccataattttcttatttaccaagtgtttgtcttgttttttatggcctaatagcattttgacctaatagcatttatggcctaatagcattttgtggacagttgctcgagataacatcagtggtaagtggtaagagccagaactcaaacccatgccttctgattccataacctgtgctatttcttttttgaatttagtttttatctttatcaaagttttatatgcccaaaatttaaagagtatctaattatctaagatatattataataaatagcagcccctcaccctatctatcctcaccccacttagagatgccactttcaacattttcagctaattttttggcatttaactccatatctccaaataacgtgcttttattttctgtgtcttaatttttttagctttaagaattatctgttcacttcttactatagaatgtaaagatttggttctattttaccacatgctctgcccccactacatgtatgcaaccttgtatttggcccaatttcctaatatagttattcatattgtattattaattaactgaatattttatgtttatattatcatgactgtataaatagtattcacagttgagccttgtagtatatgattacttttctctttcctccttttgttttcctaaagattgtcttgttttttcatttgcttgttttttatgtatttgtcactaattcaacccaagctccaattgtgtgaatttcctctccttacattgcaacacactagatgtcctctcaatttcaaattcttcaaggtacctctcctaaagcttttctaacctgagttagttgccctgctgtagagctgtcattttaggttcacccttcactgtcatatcttgaacctcacgttttcttctttcttactttatacccacattttctgtaggacacatcctctggaagcctcctgaggtacagattgtgagaagtaaatttttgagcttttgtatccctgaaagtgtctttattctgcccacatatttgtttcatattttggctggatataaacttctcttggaaatcatatcccctcaaaattttgaaggttttttgttttgttttgttttgttttgttttactgtcttctagcttttcttttaagaagtccaacatcattctgattcttgattctttgcatgaaacacttttttcctctttttcttgggatgggagggggagcttataggatctttttgtttccgaagttcttcaagtgagaacacttaaaatctactctcttaggaattttcaagaatacaatacattgttactaactagtcaccaggttgtattaggtctctttatgagcttattcctcctaagtgaaattttgtattctttgacaaaggtctcacaatagttttttgtttgtttgtttgtttgtttatcacatggtattcctaagcagacttccatgcaagtactaactaggcctgaccctgcatmgatcagatgagatcagatgccttcagggtgatatggctgtagacttcccacccccacccagtagtctaagtttctggtttctttttcttgtcttactgtgctggccaggacctccaataaaattatgtgtacaaatgatgctagttggcacccttttctcattcctgattttaaaaggaatattttcaacatctctccagttaaaatgatgtttattactataggggtgtgtgtgtgtgtgtgtgtgtgttcgttttgagacagtctctctctgttgtccaggctagaaggcagtggcacaatcttggctcactgcaacctccgcctcctgggttcaagcaattctcctgcttcaacctcccaagtagctgggattaccagcatgtgccaccatgcccagctaatatttgtgttttggtatgaggttttgccatgttagcagagatgatcttgaactcctagcctcaaatgatccacctgccttggcctcccaaagtgctgggattataggcgtgagccaccatgcccagcgtactatacatttttataggtacttgttatcagattgagaaagttcctttctagttctggtttattgggagcttcttggcctaaggatataaattttatcagatgctttttctgcatctatcaagtggtatatgatttttctctgatgatgtgatgatgatacctgggataaacccaactcggtcatggcttattatccttttacatgttgtgttagtttttactacataacaaatgttcgtaaactctagtggcttaaaacaacaaacatttacttgcttatgagtctgtaggttggcagtttggcctaagtgtagccaagatggctcatctctgttcaagtgatatcagctagtgttttaacaattaattacttataaaagttgccacacatttaacagtttaaarcaacactgtgggccaagaatccaggcatgacttagctggtccaccagtctttcagaaggctgcagtcaagatgtcagctagggctggagtctcatctgaaggctcaactgggaagggatttggttccaagcttacttggttattgggagaatttcatttccctaggactgttggactgaayctcagtttccaccatgctgttggccagaagctaccctcctttctttatcacttgggcctttccaacttggaaacttacttcatcaaagccagcaagggagaaactcttctagaaagacagaagtcacaatcttatgtaacctaattatagaagtaacattttattacctttgccacgttctgttggttagaagcaagtcactaggccagcccacattcaagaagggatatacaagaatgtgaataccaggaggcaactatcattcttatcttagtctcctgtaactgggctcattaatatgtatagagccttggttgggcacagtggctcacacctgtaatcccagcactttgggaggtgggtggatcacctgaggtcaggagttcgagaccagcctggccaacatggcaaaaccccgtctctactaaaaatacaaaaattagctggacatggtagcacatgcctgtggtcccagctacttgggaggttgaggcaggagaattgcttgaacccgagaggcggaggttgcagtgagccaaggttgcaccactgcactccagcctgggcgacagagcaagactgcacctccaaaaaaaagaaaaaaaatatatagggagagcctcagccttgacagctggatttttcttttcatctagtctcttaccatccagggggttagcccaggcttgtttacaaggtagcagcagcaggttctaagcatgacagcagargctacaaagtctcttgaagtctaaactcaaaacacacactgtcacttcagctgctgcgctctgttagttcaaagctagttatggagcaagcccagatataaaggatagggaactaaccttacctttggataggaggagctccaacaagtttgtgaccctttttaatctactcgacatactattttgacttgctaatgagtaaatttgcctgttcctttctcataatatccttgcctggttttggcatcaggatcatgctggccttataaaatgagttggaattcctaactctagacatagcacctaccatagggtaggtgtacaaagatatttattggtagaatgaatgaatcaatgaatgaatggataagcaaaatgcctgtagatgagacagaagaatcagtcagaaaagtaaaaatcaactagggaaaaaaacgtgaatacttgaatatgacggactttttttttaatagaagttcagttttgtctgctttcttaagtttgtgtagcctttcttcttaggaagacattctacaattacctgctctgctcccaaagtgaaattcctattttgctaaagcagaacagaaagaaacctttccaagtttctataatttgtatcacattctgaagtcccagttactgtaatagctgcaaagaagcaatacaaggtggagggtctgagagggagagaaaaatgactaaagtgcaacatagctgaaaaattggctggctggaaattattgctcccaggacatcagtgattcaaggtttctgtgagccttaggacttgagtaggggaagcattccaaattatatccaaaaataacatctccgtgtttcttttgttaaatggctggctcataatgagacccttacagactttgttacattctcaagtttccatgtaatgtataagttgatatatgtctaagctgctatgtggcatttgaaattctctgcaaaatttagcttcagattggcagcatttgctcttccttttttggatttcatttggttattgaactaaaaaaccccaacatataattttttataaktgtttttcctcatttatattaaaacactgcatataagatgaccagagaccatctgattggtgatcttgaatactttcaagtacctgagctaaacgtattgtacaattgaatcatatatttggttataggtatacaggcagctttagccaacagcgaaacatattctgttatttagcagccattgtctgtcagtaggaagcaaattcatctttacagatctcatttttcctagagctaaactttctgtttctcctatgtaaagaggtattgaggcattgctttatgtggttgttgtgaggattaaattagagggtgtattttgtttaatttttaaacttaacattttatttaatgttttagttaataacactattataaattctttacaaatattaattcacttattctgcataataaacctgtgagacaaacactattattatccccattttatagatgaaactgaggaagagaggttaagtaacttgctctaacataaactggtaattggctgagctgggattcatacctaggcagtctggctccagaagttctgttcttaatcattctgctattttgtcactatgagaaaatgtttctgtaagctatagatactgtacagatgttagtagcacatattattaagtatgtaacactgtactagatgttatgggagatagaaaagaatcagaagcctgcctttgaaaagtttataatctagtcggggaagagaagtatgacatagaaaatagcaataatatagcagcctgtaagatcactgtctaccaagacctcttcacacataataaaatatagactatacatagcatagaatctactgcctgtagttaatgttggttgaatgtggatgactttaaataatattattcccattttcacagtaagaagacctaggttattatttgcagagagaaaattctttaaaaaaaaaaaaaacgaagcgccctaaataaataaagtaactttacttaattaattaatttatttattgagatggagtctcactctgtcgcccaggctggagtgcagtggtgtgatctcagctcactgcagcctctgcctcccaggtacaagtgattctcctgcctcagcctcccaagtacctgggattacaggcgcctgccaccacactcggcagctgatttttttatttttagtagagacgagtttcaccatgttggccaggctggtctggaactcctgacctcaggtgatccacctgccttggcctcccaaagtgctgggattacaggtgtgagccaccatgcccggcctatttatttctgagagaaggtcttggtctgtcacccgagctggagtgcagtacagcagtcatggctcactgcagccttagcctcccaggctaaagggatccccctgcctcagcttcctcactataggtgcatgccaccatgcccagctaatttttttattatttgtagagatgaggtcttgcagtgttgcccaggctgatcttgaattcctgggctcaagtgatgcttctgcctcagcctcccaaagtgctggaattacaggcaggaaccactgcccagccactctctctttctttgtaatatatattcaatatatataatrcatacataatataatatatatgattattattttctgagctatctgagaataagttgcagatatgattttcctttgcctttaaatacgtcaatawgtatttcctccctctcctccaaaaatgatagtctctcaaaacaggaaattacattggtaccatactttaacatacagaccttgtttaaacgtcaccaattaataatatcctttagagcagtacaaaacaaatttgatcaccyatgttttaaacaccatggcatgtgctataggacactcattggtatagtttggatgttcccccaaatctcttgttgaaatgtaatccccagtgttggaggtagggcctggtgggaggtgtttgggtcatgggtgcggatccctcatggcttggtgctgttcttgtgatagtgagtgagttctcatttaaaggtgtatggcatctctcccccagctctctcttattccctctcttgccatgtgaccagcctgctctcgctttaccttctgccatgagtaaaaagttccctgaggcttccccagaaacctcctgtatgcttcctrtataccctgcagaaccatgagacaattataaattataaatctttctttgtaaattacctagttgcagattctttatagtaacgcaaaatggcctaacgcacttattatagctcctctctcatctcaatcctgttttttttttttgagatggaatctcactctgtcacccaagctggagtgcmctacagtggcacgatctcagctcactgcaacctccacctcccgggttcaagtaattctcctgcctcagcctcccaagcagctgggactacagggcgtaacaccacactcggctaatttttgtatttttagtagagacagtctttcgccatgttggccaggctggtctcaaagtcctgaccccaggtgatccacccaccttggcctcccaaagtcttgggattacaggcgtgagccactgcacccacccttcaatcctgtgttgtttccaagagcactgagcagatactgtgttccctggtgtattcatacaggcagggcaaatggctttatttgattttttttttcttttgtatgattcagtggagcagcgtgacttcattggagtggacagcacaggaaagaggctgctcttcatggctaatgaagcagacttggatgaagagctggtcattaagggatccatcctacagaagtaagccctagggttttttcttctggcaattctccttgtcttaaaacaaaataaaaccacccagtggatgggaaagagggaatgaaaactagactatactgtgtgaaattgacaaaagtatgtgaatatttttcccrtgagacaggatgaaggcttttcttcactgcataagcctgtttccctgtcttttcttgccaaggtagagccaaatcctgcaaaagagtaaagcaaagcagctgtgaggagaacaggactgtctttctgacagtgttataaatcccctttaaaaaaaaaagtggtaaaaaaaacacatgacataaaatgtaccattgtaacctttgtttttttgttttgttttgktttggtttggtttggctttggtttttgttttaagttttttgagactgagtctcactctgtcacccaggctggagtacagtggtgcaatcttggctcactgcgacctctgcctcctgggttcaagtgattctcctgcctcagcctcctgagtagctgggattacaggtatgcgccaccacgcccagctaatttttgtatttttagtagagacggagtttcaccatgttggccaggctggtctctagctcctgacctcaagtgatccgcccacctcggccycccaaagtgctaggattacaggcgtgagccaccgtgcggcccattctaagtggcctttttttttggagagggagtcttgctctgttgcccaggctggaatgcaatggtgcaatcttggctcactgtaacctccgcctcccaggttcaagcgattctcctgcctcagcctcccaagcagctgggactacaggcatgtgccaccacacccagctaatttttgtatttttagtagatacggggtttcaccatattggctgggctggtattgaactcctgacccgtagtccacccgcctcagcccccaaagtgctggggattacaggagtgagccaccgtgcccagccctaagtggccatttttaagtgaacagttgagtagtgttaaatgtgttcacattgtggtgaaacagatctcgagaactttcatcttgcaaatctgaaattctatacctatcaaacaacagctcccctccccatttttttctccccgcaaggccttgctacccacgattctactttaaatatctaagtgaaatcatacaatattggtctttttgtgactggctaattttacttagcataatgtcctcaaggtttgtccatgccgtagcatataacggatttcgttttttttaaggctgaataatactccgttgtatgtatgtagccacattttgtcatccatttatcttctgacagacatttgagttgctgccacctcttggctattgtgaatagtgctgcagtgaacgtgggtgtacagacatctcttcaagaccttgctttcagttcttttggatatatatttagaagtgggattactggatcatatggtagagaactatgatgtttaattttttgaggaaactacatactgtttccatggcattttcactattttacaatcccaccaacagtgcataagagccccagtttctccacaccagtacttacatggtagctggtctcagatacagaaggaaaagagaattcatttatgttatatcaaaacaaataaaacatctgggcagagccatgactcaagcatgagtaagctcaaaagaatcagaatgtcagctgtacaaatatactacagaaaacaaaatgaaagcaagaaaaatgtcccgtaaaagacaaagaagctatcctgaaaagaatataactcaagaaacagaagaaattttcttaaaactatgcaactgtataaccataaaactacttattacaacatgaatttaataaataaaagttcagtaatgagatgataaaaaagaggatattatagaaccaaaaaaaagaggattggccaggcatggtggctcacgcctgtaattccagcactttgggaggcagaggcaggtggatcacaaggtcgggagatcgagactatcctggctaacacagtgaaaccccgtctctactaaaaatacaaaaattagccaggcgtggtggcakgtgcctgtagtcccagctacttgggaggctgaggcaggagaattgcttgaacccaagagtcaggggttgcagtgagcctagattgcgctgggcgacagagtgagactcggtctcaaaaaacaaacaaaaacaaacaaacaaaaaaaggattaaatkattacagagttaataaattttaaaatagctaaagaatggcatagacaccactgaaaatcaaattattgacaaagaggaatggtctgagatatcagtgatctaggtaaaaaagaaaatcgtttaagaaattagaatctctggctgggcgcggtggctcacgcctgtaatcccagcactttgggaggcctaggcggggggatcacgaggtcaggagatcaagaccatcttggctaacacggtgaaaccctgtctctactaaaaatacaaaaaattagctgggtgtggtggcaggcacctgtagtcccagctactcgggaggctgaggcaggagaatggcatgaacctgggaggcagagcttgcagtgagccgagattgcaccgctgtactccagcctgggtgacacagcgagactctgtctcaaaaaaaaaaaaaaaaaaggaaagaaattagaatctctgaggttggaggattgcttgagcctaggaggttgaggctgcagtgagccatgattgtactactgcactccaggctgggtgacagagtgagaccctgtctcaaaaaaatgaaagaaagaaagagagaaagagaaggagggagggaggaaggaagggaggaaaagaaagaaattagaatctcatagaaatgaaatacaaagatgattaaatgtaattaatgaattaatgcctctgaattagaacatggatttctagaaagaaagaaatgaagagagaagaaaacatcagtgaaataatttttaaaattttctgaggataaaaggaactgggtttctagactgaaaggaaactgagttcccagtaaaatggagaaaagaaacataccaaggttatcattgtgaaattttataactgctaacaaagagatcttacaagctcccggagaggagagaggatatcatatacaaaggaattaaaatagctttgaacttcctaacagcaatactggcaactataaacaatgactttaacattcttatttctatctaatcaaactatcaatcaaatatgagagtagaatgagaactttttagacatttgttttccatgcatctattttgagaaagcttactagacaaggatgcccactttcactgctgttacccagcatagtactggaagtcctagctagagcagtcaaacaagagaaggaaataaagggcatctaaattggaaaggaagaagtcaaattatctgtgtttgcagatgaaataatcttgtatttggaaaaaactaaagactccatgaaaaactattagaactgataaatatagtaaagttccaggatacaaagtcaatatatgaaaatcagtagtatttctatatgctaacagcaaaggatctgaaaaagaattagccaggcatggtggtatgtgcctgtagtcccagctacttgggaggctaacgcatgagaagtgcttgaagctgggaggcagaggttacagcgagccgagatggtgccrctgcactccagcctgggcaacagagcaagactcagtctcaaaaaaaaaaaaaaaaaaaaaaaaaaatctgaaaaagaaatcaagaaagtaattctattacaatagctacaaataaaataaattacctggggattaacttaaccaaagaagcaaaaggtctctacaatgaaaattataaaatattgatgcaagaatttgaagaggacacaaaaaatggaaagatattccatgttcatggattgaaaaaatcagtattgttacaatatccatactcctcaaagcaatctgcagatttttttttttttttttttgtcttgagacagagtctcgctctatatcccaggctagagtgcagtggtgtgatctcagctcactgcaacctccacctcccgggctcaaatgattctcctgcctcagccgcccaagtagctgggattacaggcgcccaccaccatgcccagctaatttttgtatttttagtggagatggggtttcaccatgttgcccaggctggtcttgaactcctgacctcaggtgaccctcccgcctcggcctcccaaagtgctgagattacaggcgtgagccaccatgcctggctgcaatctatagattttatgcaatccctatcaaaataccaatgacattcttcacagaaatagaaaaaacaatcctaaagtttatatggaattggctgggcatggtggctcacgcctgtaattccagcactttgggaggccaaggcgggtgaatcatttgagatcaggagttagagaccagagaccagcctggccagtgtggtgaaaccccatctctactaaaaatacaaaaattagctgagcgtggttgtgggcgcctgtgatcccagctacttgggaggctgaggcaggagtatcacatgagatggaggttgcagtgagctgagattgcgccattgcactccagcctgggtgacagagcaagactccatctcaaaaaaaaataaataaaataaaataaaataaaaawatatatatatatggaattacagaagacccagaatagccaaagttatcctaagcaaaaagaacaaagctacaggaatcatattacctgacttcaaattatactacagagctttggtaaccaaaacagcatggtactgacataaaaacagacacataggtcagtggaacagaatagagaaccagagataaatccatacaccttcagtgaactcatttttgacaaaggtgccaagaatatacgttggggaaaggacaatctcttcaataaatggtgctaggaaaactggatatccatatgcaaaagaatgaaactagacccctgtctcttgccatatacaaaaatcaaataaaaatggttaaagacctaaatctaagacctcaaactatgaagctactacaagaaaccattgaggaaagtctccaggacattggtctgagcaaagatgtcttgagtaataccccacaagcacaggcaaccaaagcaaaatggacaaatgggatcatatcaagttaaaaagcttttgcacagcaaaggaaacaatcaataaagtaaagagacaacccacagaatgagagaaaatatttgcaaactacccatctgacaagggattaataaccagaatatagaaggagctcaaacaactctataggagaaaacctaatctgacttttaaataggcaaaagatttgaatagacatttctcaaaagaagtcatacaaataaatgccaagcagatatatgaaaaggtgttcaacatcactgatcatcagagaatgcaaataaaaacaatgagatgtcatctcaccttaggtaaaatgccttttatccaaaagtgaggtagtagcaaatgctggcaaggttgtrgagaaaggggaactctcatatactgtttatgggaatataaattagtacagccactatggagaacagtttggaggttcctcaaaaaagtaaaaaatagagctaccatacaatccagcaatcccactcctaggtatatacccacaagaaaggaaatcagtatattgaagagatatttgcgttcctatgtttattgcagcactgttcacaatagccaaggtttggaagcaacctaagcgtccatcaacagatgaatggataaagaaaatgtggtacatatacacaattaagtactattcagacataaaaaagaatgagatcctgtcatttactacaacatggatggaactggaggtcattatgttaagtgaaataagccaggctcagaaagacaaactgcatgttttcacttacttgtttgtgtgagctaaaaatcaatggaactcatggaagtagagagtagaaggatgattaccagaggctggaaagggtagagagtgtgggggtggtgggagtggggaatggttaatgggtacaaaaaattagttagaaagaatgaataaaacctaatatttgctagcacaacagggtgactataataaaaaataatttaattgtacattttaaaataactaagagagtataattggattgtttgtcacacaaargataaatgcttgaggtaatggatacccccatttaccctgatgtgattattacgtattgcatgcctgtgtcaaaatatctcatgtaacccatcagtgtatgtacctagcatgtactcacaaaaattaaaaattaaattaaaaaaggaaagctgctagagtttatatagcmccaaaaccttagcataaactaagaaagaggaagacacaggatataagaaaaagggcactgatgcttgaacctgggaggcagaggttgcagtgagcctagatcgcatcattgcactccagcctgaacgacagagggagactctgctcgaaaaaaaaaaaaaagaaagaaaaaggacattcaggccgggtgcagtggttcatgcctataatcccagcactttgggaggccgaggtgggcggatcacgaggtcaggagatcaagaccatcctggccaacatggagaaactccatatctactaaaaaaaaaaaaaaaaaagtagccaggcatgttgtcgcatgcgtgtaatcccagctacttgggaggctgaggcaggagaatcgcttgaacccgggaggtggagattgcggtgagccragattgcaccactgcactgcagcctggtgacagagtgagcctccgtctcaaaaaaaaaaaaaaaaaaaaggacattcaattaagatgaaatgaatccccagtatgatgatgaagggagattccaggctaacacatgtacacccagtataaatggcaaccagaccacactggaataggtcagaaaacttgggaatgatttcttcaagatgatcatatttcttctgatgaaaatgacacaacatgtgatgtgtttcaacattttgagacgatttggagcacttaagtagttagtttggagttgaactattggtaagcacctagaaaactaagaaataagacaattattcacaccaaggcaaaccacaaaaatgtgcaggtgaaaaaattcttagtgactgtgtggttcagctgtaactaatttttttttttttttttgagagggagtctcagtctgttgcccaggctggagtgcagtgccgtgatctcagctcactgcaacctccacctcctgggttcaagtgattctcctgcctcagcctcccgagtagytgggattacaggcgtgtgccaccacgcccagctaatttttttgtatttttaatagagatggagtttcaccatgttggccaggctggttycgaactcctgacctcaagtgatccacccacctcagcctcccaaagtgctaggattacaggcattagccactgagcccggcctgtaactaatatttaaatatgcatactaatgcagtcactgatacagtctaacccaaattatgatttaattactttggaatgatgagatgaggttagtatgttggaagcatgagggaataaaagagtgaaatcgtccttttctrtagtaaatagctaatacgtagagctgaagtcataataacttaagcattgattattgagctgaccaaaataatataacaattattgggaaggtaaaasgcataaggaagtatgggtgtatatgatgggagcagggttgatgatgaaaataagttaaatcctgttttccacaatggaaaatcagattattcctgaaatggaaaacctgaaaaataccaatataagaatgctattggttaggtgcagtggcttacgcctgtaatcmcagcactttgggaggcagaggcaggtggatcacctgaggccaggagtttgaaaccagcctggctaacttggtgaaaccctgtttctactaaaaatacaaaaaattagccgggtgtggtggtgtgcactggtaatcccagctacccaggaggctgaggcaggagaattgcttgaacctgggaggcggaggttacagtaagccaagctggcgccattgcactccagcttgtgcaacaagagtgaaactccgtcttaaaaaaaaaaaagctactatgctattgctgggcacagaggctcactcctataatcccagcactttgggaggccaagacggccaggtcacttgaggtcagaagtttgagaccagactggtcaacatggtgaaatcctctctactaaaattagaaaaattatttgagcgtggtggtggatgcatgtaatcccagctactcgggaggctgaggcaggagaatcgcttgaacttgggaggcagagattacagtggagccaagattgtgccactgcactgcattccagcctgggggacagagcgagactccatctcaaaaaaaaaaaaaaaaaaaaaaggctgggcacagtggctcatgcctgtaatcccagcactttgggaggccgaggcgggtggatcatgaggtcaggagattgagaccatcctggctaacacggtgaaaccccgtctctactaaaaatacaaaaaattagccgggcgtggtggcgggcgcctgtagtcccagctactcaggatgctgaggcaggagaatggtgtgaacccgggaggcggagcttgcagtgagccgagatcgcaccactgaactccagcctgggcaacagaggaagactccgtctcaaaaaaaaaaaaaaaaaaaaaaaaaaaaaaaagagtgttattggtggcaaaataaatactaagtggatctgctaaaagagttacaaatgggcatatctggggaacagaaaatgggcaggaaagggaatagatgattcagtttttttcattaaaagccttgagaaactacttgcctctttatatgcatatataacttcaattttaattttttaaaataagagcaagatatataatacattaaaatttctgaatcaagtaaaatctgaagatttttttttcttttttttttttttgagatggagtttttgctgttgttgcctaggcttgagtataatggcgtgatctcggctcaccgcaacctctgcctcccgggttcaagatattctcctgcctcagccaccagagtagctgggattataggcatgagccactatgcctggctgattttgtatttttagtagagacggggtttcaccatgttggtcaggctggtctcaaactcctgacctcaggtgattggcccgccttagcctcacaaagtgctgggattacaggtgtgagccaccgcacctggcacatctgcagattttaagagtatagtgtgttctaagataatttggccagatttatcctaatgtacttatgaagcttcagggataaagagagaattcaagtatccagaggcaaaaagcaaatcatttacatggaagaaaaaaattaggcttacctctgagttattcccaacatttaatacaagaggaacaatgtcccgtccacagacttttcagggaaagcaagtggaactcgagaatattataaactgagtatgcagattgatagataaccagaaaaaaaagaatattataaacaatgaagattttattcaaatataaaagcagtaggcattctcaggcatgaaaagacttatgacatatgagccctgagcccttccttttcttttttctttttttttttttgcgacagaatcttgctctgtctcaaggctggagtacagtggctcactgcagcctctgcctcctgggctcaatcaatcctcctacctcagcctcctgagtagctaccactatgggtgtgcaccaccacatttggctaatttttgtttgttttttgttgcgaggaagtctcattatattgcccaggctggtctcaaacccctgggctcaagtgatcctcccaccttggcctcccaaagtgctgggattacaggagtgagccaccatgccaggcctgagcccttcttgaaaataaaacttcaaccagcctgtaatcctagcactttgggaggccaaggtgggaggatcacttgagccctggagtttgagatcagcctgggcaatatggtgagatcttgtctctataaaaataaaaataaaaaaaaataaccaagcatggtggtgtatccctgtagtcccagctactccggaggccaaggtaggagaattgtgtgagcccaggaggcagaggctgcagagagccaagatgatgccactgcactctagcctggacaacagagagagaccctgtctcaaaattaaaataaaataaaatgccaagaattgagtcaaaataaagaatatggtaatagagaaaccatgttcattaacatttagcccatttatatgtagaactgacacacaacaactataggaattatggttgcagaatgtaatttaaatatcttgaacctggacaacataaaaatataactgccaaaaatcaagagataaaagtgtgggaagaaaaaacattgctagatattaataacatcatctttcatagtaggaagttagaaaacattaacagacctaaaaaaaccataataatttcaacctcttaatattttgttcttaaaatctgtttttaggcacaagatcttctaagaaatagtatctttaatggtgaagatatattaagtttactatttccttcatttttactttttcttttttcttttgttaaataccagtaaaattgaatagtcatttttatattaaaaataaaatttttaaaatagcattttgttytttataacagtacatctatttgtatatgtacataaagaaatgtctataatgattgttattcctgggtaataagaattaaagccaggcacagtggctcactcctgtaatcccagcactttgggagacctaggctggagaatcactttagcccaggatttcaagagcagcctgggcaacatagcaggacctcatctctataaatatttttttttaattcgctgggcatggcagcacatgcctttaatcccagctgcttaggtggctgagacaggaggattgcttgagcctgggaggccaaggctgcagtgaactttcatcattcttgagaggaattaccggggagttcgaggctgcagtgcgttgtgatcatgccattgcattccagcctagacgacagaacgagaccctatctcaaaaaataataataataattttttttttttgagacagggtctcactctgtcacccagactggagtgcagcggcacaatctctgcttgctgcaatctccgcctcccaggctcaagcaattctcctgcctcagcctcccaagtaggtgggattacaggcatgtgccactaccactcagctaatttttgtattttaagtagagacagggtttcaccatgttggccaggctggtcttgaactgctgacctcaaatgatctacctgcctcggcctcccaaagtgctgggattacaggtgtgagccaccacgcctgaccaaaaaataaaataaaatttaaaataatgggcggggcatggtggctcacacctgtaatcccagcactttgggaggccgaagtgggcggatcacaaggtcaggagttcgagaccatcctggctaacacggttgaaaccgcatctctactaaaaatacaaaaaattagctgggcgtggtggcgggaacttgtagtcccagccacttgggaggctgaggcaggagaatgtcgtgaaacmgggtggcggagctagcagtgagccaagaccgtgctactgcactccggcctgggtgacagagcgagactccgtctcaaaaaaggaaggaagggagggagggaagaaaggaaggaaggaaggaaggagaattttttaaactcttagtaattctctaaaatccttgaattctgtaaaataagtacatcttttttcataaaataaatgtgatgtttcttttttaaaaacaacatttatgctgagatagtaacaattctggaatgtggaagtattgatgattattatttttttctttgtacttttctgtattttaaaamattttctggctgggcacagtggctcacgcctataatcccaacactttgagaggccgaggtggrcggatcacctgaggtaaggaatttgagaccagcctggctaacacagtgaaacccatttctactaaaaatacaaaaaattacccaggcatggtggcgcacacctgtaatcccagctacttgggaggctgaggcaggagaatcacttgaacctgggaggcggaggttgcagtgagccaagatcacgccattgcattccagcttgggcaacaagagtggaactctgcctcaaaaaaaaaaaaaaaaattcccaatttaaaaagttttaaaagcaagtaaggctgggtgcggtggctcacaccactaatgtccactttgagagaccaaggcaagagaataacttgaggccaggagtttgagaccagcctgggcaacatcctgagactacatctctacaaaaagtttttgaaaaaattacctgggcatgttgacgcgtgcctgtagtcccagctacttgggaggctgaggctgcagaatcacttgaacccgggaggcggaggttgcagtgagccgagattgygccattgcactccagcttggacaacaagagtgaaactccatctaaaaaaaaaaaaattcccaatttaaaaagttttaaaagcaagtaaggctgggtgcggtggctcacacctctaatgtccactttgggagacagaggcaagaggatcacttgaggccaggagtttgagaccagcctgggcaacatcctgtgacccccatctcagtttttgaagaaatacctgggcatggtgacgcgtgcctgtagtcccagctacttgggaggcggagacgggaagatcccttgcactcaggagtttgaggctacagtgaacttttttcatgccactgaactctagcctgggtgacagagtgagaccctatctgtacaagattttttttttttttccattaaaacaggcaacagggccatctaactggcaggctgtagtttgctgaccccactcggattcttttttttctccataaagaatatctgtgacagagccttgtgagcacagcttgtttcttacagtggtcaggatatagctgactagctctggaattctgcgaagaaagaagtaagggttttgttttggatttttttttcctaaatccatttatcaaaataaaaacgtaggaagcagagggagtttttttgtatttcagaaaagctcgccacaagatgcaattaaacaatatctcttaatgtattaaaaaatatgatcttatttgtagctattaggttggtgcaaaagtagttgcggtttttgcctttttttttttttttttttttttttaacaaaaaccgcaattgcttttgcaccaatgtaatatttctagaattacgaactgccacagctggaaggtcatttagttagtctagtcttctatatttcaggcaatgattctgaaagcaaggaagaaggggttttgttcaatgtatctagttagggacagaactagtccttattcatgaggacattctactttcaggaacacatccttcaaatctggtcaaaccactgttttggtatttaaggcagaagactttttccttgaggcaggggactttatctcaaatagctcatcagccttggtggaagattcaattatgcatggaaaaggttaacaaacaatagcaagggatatcagatactgaacagttatgtccaacagacagtgttctaagaattcaaaggaggtatctaatcctaggcrctgaggtggtcagggaaacagaatagaataattcagacttgaaggattgatttggtccggatatggaaagggacatgggaagccagctgaatcctatatgccgagaatgccacgagcaaaggtggggaaggacagtttgacctgaatggaaggttcatgttgggaaacttgaggagataaggctgagatgttaagttggtctaaaaatagagagccttgaataccagggaattattaaaaacttttgaggaaggaaatkattattcaaatataggattctgaaaaaaaataatctgacagaagtatgtaggatagatttaaggtatataagacttgaaaagtatcacagtgttggattgctaaattcaagactctcaaggaattctgtcctttggaatacagaaaggaaaactaattgtgattagcaattattatgtgaaatgagggtcctgactcacatgcatccatcaagcactgatgtttatgctttgttctgtattagagatagcagccctagacattaagttcttaaaagcactattcacaatagcaaagacttggaaccaacccaaatgtccaacaatgatagactggattaagaaaatgtggcacatatacaccatggaatactatgcagccataaaaaatgatgagttcatgtcctttgtagggacatggatgaaattggaaatcatcattctcagtaaactatcgcaagaacaaaaaaccaaacaccgcatgttctcactcataggtgggaattgaacaatgagaacacatggacacaggaaggggaacatcacactctggggactgttgtgggttgggggaggggggagggatagcattgggagatatacctaatgctagatgacgagttagtgggtgcagcgcaccagcatggcacatgtatacatatgtaactaacctgcacattgtgcacatgtaccctaaaacttaaagtataataaaaaaacaaaacaaaacaaaacaaacaaacaaaaaagcaagactcatacgtttctctggttacaactaaagggtgggtggaggttgttttctgttttctttttaacctctgtgggaactagtttatggctccatacaatggagtgttagtaactgccttaattgtaattacatttgacaatgagagcaaggcttgggcatgatgggagcaaagaagatggacctagtcagaggtgaggtgataatgaagagcaggtggatgtgtctttttccttcatagatgtcaagctcagggccttgactaagcactggggtcattgagagcagatcttctatcagtttcctaagactaggctgcatttttagttgttggcagatttttttccttgttcttctgatttataatccacaccccagtgattcaggatctttggtgtgtagttataaaagggttgcaggctggataaatatgcataaaaatattctctcattcctatgaccctctggggtgttgtgctcctcctgcctcaagtgagatgctggttaaaagctaattagattcagattttcaagcactttctgattatgagaatacagtacttccttctgtttttatcttttttaaaacgctgaatttccaaagatggaggttagytcctagtgagcaaacaccagttatcttggatacggccttcatgtatataggaaaatcagaaacttcttgtaaagtttttttaacttttgtaaattgggttcagtctatactgctcaggagatgggtgcgccaaaatctcagattaccactgaagaacttactcatgtaaccaaataccacctgttcccccaaaacctatggaaaaaaaatttaaaaaagaaagagagagagaaaaggacaatgacagaatgtacatcccatcagttttctctttctgagagagaggctgggtgtggtggctcacacctgtaatcccagcactttaggaggctgaggtggaaggattgcttgagcccagaagtttcagaccagcctgggcaacatagcaagacccatttctctcttttaaaaaaaaaaaaaaaaaaaaaaaaaagcattacttgggggggtggggagggataaaatgtttgcttgatttcaaagacacctgttagaatatggtcakgtgcagaggcagcctccccagcaagctagtcatcagtcagtactagtaactttacctcaaagggcccagattcttatgaccttgttggatttaaacaaagcacaacacctttcctacatgtctgattgttgcatttctgacttggagaggcattacatgtagtaggaaagaatgttctggtagaaggagcttgttactgaaaattcaggttcagagaatttgcagtctagtctggagacaaaccagctgtgtgaccttgagcaaataactttatttttctaagcctcagtttcccccagctgaaattggcttagttggtctttaaagaaacccccctccagctctaaaattcctgctttatttctgacagacatatgtttttaatagttcataagtaaaagatatttgtgccaaatatttaataagaaaatcatgtagcttttccccaatgttacattgttttcttttgaatagttgtcaagcttttttactggaagagtaatgaaaatattaaaacaagctcctaaaggatatctttaaaatggaataaaatgttcacaaggtcatcttggaaggtttagacatctatatctggggagtcaaggacttcagtcaagacctcaaagatcatggccagatctgtatttctgggactacagatgatgagaaatggtttaaacccttgattattttcccaatggtgtggragtcttgaaatactatttatgtaagttagtacctctgctgctcctaaccagccctaattcccaaaatacctctcttaatttgcagtttgggatgggggcaggtacagaagggaagaagggcttgtggaagttaggatcacaaacctttcccaaggtatcttgtccagtgtattcttactcttttgtacttttaatttacttctataaaatgatatggctgtaagataacccatgtcaatatctttaagtctttgctttggagctggccatatagacttcagagaaaaatcttccaatctcctgcctgggtgggtaaaagctgtgctgccaattcctgatcatttcagggctcctgagatacaaatcaagctgcttcttagctttccttatagatggtttaggattcacctttcttggatatgctaaatctgttaccaccaccatccttttgttttccagctkccaaaattttgttgtcatctcttcttgtggtctttgtccttgtgggtttatgtctttaaaaaaaaaaaaaatctgtactgacacttcagtgagttttcagaaagaggatgggttaacgcttatgtttaatctgccatctttacccagaatcctgtttccttatttcagcctcaaatctttctagtcccttactaccaccactcctaccctctcttttttctctccctctctctctcttttcccccctcatttccttcttcatccaatctaggtcctgtgccttcaggcatttctctccaagtccaaagtctttaggagaaatattatgcacggatataaattggcagcactataaattcatggctcctatcttagctgaaccctcagaaccactcttcattcttccatttgtcctgggccagctttccactcctctcagaagctgttctctaccatcaccattctcctgtcaaaacatgggcctgctgatttccccagctaccccatccatgactttgcctttattcagacccaccttcgattcctttcctccagcattagaagaagtttggggccagtcccttcatttatgccttttaccccctttcttctgccactcctggaaccttttctccattagttttttcaacattctccagaattttcaactttgctttccactatctctttatcccaaatctataaatacattgcttgtagaataaagcacacattcctaaagccctcagttatctaatcatgcttacccctccagccttatatctcatctttctctaacacaaccccattctcaacattctatcagtagctatgaaaaattgcttatagttctgttaacttctgcattccttgtaatgtctttgtccttttacttttcaccgttcctggtaatccttcagccaaagttactcttctctccctggctaagaacttatttttctttcaagactcagctcaaatatcatttttctgtgaagatttttctaatctttcctgtcataggcagaaccgtgcttcttcctttgtgctcccctatatactgaagaaagttctgtggtaacatttataaccctgtattgctctggactataagttacataaggatagtggttgtattttgtctttgtaggcctaaggtctaatacatggcctgacatagtaggatcccagtaaatttgttggaagaggacattaatggagccagagtgtcaccttgtgtttgaatgtgctttggcaacagagtctttataggcagagctgagacttcttaatcttgtgaattggagaaagggctggaacagcattatttgcaccacattcttcagatcaaagcagtcataagcccagcccagagtcatgagatgcaaaatagactytacctcatgatgggaggagctgcaaagttactttacaaaaggatatgagtacagagaggggaataattgtggccatctttttttttttttttttttttttttgagatggagtttcgctcttgttgcccagactggagtgcaatggcgtgatctcggctcactgcaacctccacctcctgggttcaagcgattctcctgccttagccacygagtagctggcatgcaccaccatgcccggctaattttgtatttttaatagagacagggtttctccatgttggtcaggctggtcttgaactcctgacctcaggtgatccccccacctcagcctcccaaagtgctgggattacaggcatgagccaccgtgcccggctgtgaccatttttaaaacaatctactgtagtcccaactaccaaagcattttttgtttgtttttgagaaggagttttgctctgtcgccaggctggagtgcaatggcacgatcttggctcactgccacctctgacttcctggttcaagcaattctcctgcctcagcttcccaagtagctgggattacaggcacgccccaccacgcccagctaatttttgtatttttagtagaaatgaggtttcaccatgttggccaggatggtctccatcccctgacctcgtgatccacccacctcggccacccaaagtgctgggagtacaggcatgagccaccgcgcccagccactaccaaagcattttaagcagggaatgacacaatcaaatttgccttcgaaagataactctggatacaatatggagaaaggattggagttgggtaagagaggatgcagagagaccaagtaagggaaggtattgtagtaatccaggtaagaagtaatggtaatttgaactagggtattgacagtggagttggagaaaagtagataagttagagaaggatttagcaggtaaaatctgaggacttggtgtttgaaccttggggttgagaagtgtagtggtgtcaaaaaagactcacatttcaggtttgagcagcaggataataatcagataggaagcactgggtttgtggcagggagatccgaagttcatttggggatccaggtaaacaggagtaagtcatatatagactcggtgttcagaggataggactatgcttcagatataaatttgtaagcattaatatatagatgtcaacttagtgtcttgtacatacctggtacttaggagaaagttatttgcccagctgttgaacctcaagggtggggaatgtctgagctaggttgtttcataatatcttttatcccgggcacggtggctcatgcctgtaatcccagcactttgggaggccgaggygggcggatcacctgaggtcaggagttcaagaccagcctgaccaacataatgaaaccctgtctctactaaatacaaaaaatgagccgggtatggtggcgcatgcctgtaatcccagctactcgggaggctgaggcaggagaatcgcttgaacctgagaggcggaggttgcagtgagtcgagatcgtgccactgcactccagcctgggcaacaagagtgaaactctgtctaatttagtataactctagccatgcagaagctgaaacaaagctttgaggcatgaactcctgagtgatccttcactgaacctttgccgtgaccatctcctacacaaccagcttggaaccaggcctgaagacagtaggaatattgcttgtgtacttgggataattctggtcaaggctgtcacaaggccagcctagattcatgagacgagaaaatagactctacctcatgatgggcatgacctgctgaaatgtcatattagctagaccagtgagactagagtggagtgcaaattaatgtgtcagttttccccacccagagttgtatgggccagacagcttagaaggatagcttgaaagatgtaacactcttgggcttatctttgagtagaagcttcttgtcagtggtgctgtgcagaatgctttcttgagcacctcttggggagtgagatgcttctagatctcagcaggttctggcacgctgagttgagatgggtgagggtgaacagcagtgtgattctgcctaggaaggctttgctaattcctgtgttacttattagacatgtggctctcattagtctgtgtgatggttagttttatgtatcaattttgctagtctgtagtacctatttattccatcaaacactaatctaggtgttgttatgaaggtatttttgtatgtaattaatatcaacaatccattgattttaagtaagagagattatcttggctaatctgggtgggcctcatccaattagttgataggcctttaaatctaatcagatcagagaaccaattccaaataacacagaacaagttcagcaaacccatctttaagatttttttttttccaggaccacttctagtagcaatttttatatcagagaaacagaaatgctgtgagtcatagagaataaaggatttattacacaattacggaagctcgtagagtagtgtatgtatgctgttgtttctgtgtctagtgttgagcctgaaatcactatcagtcagccagaccatcagtcagaaaggaaagctggatctggacaagaacaagaacaaacccacaaggtcacctaaaaactggacctggagcagaacttggaactcttaagaatccttccactgttggcagtctctgctgctttgagtccagggttttcacctcaacacaactgctttttttggagagggcctgagcacctcagggctatggtgtcatagcctaccctgctgaacaggcagacctctagtttgataactccatatgcactcctaacaatcgagaatctgttattcctaccacttacagtgtgaccaagatcaggcattgggatggtatggttagtgccttcctatgtagcaaataccagatagccacaccacaggtgcttgccccagcacctcttgttaaaattataggtagctagtaagtagtagccataggtcattcccttttccctagttctgagaaaacttgattatttcaagcatatcttggtctctagtttcttctaaattgcagtgattagggagtagtgaattagctctgattcttttagcgggagagaagatgcttctttgttggaatatgtttaagattgccaaatctggctggacatggtggctcatgcctgtaatcccagcactttgggaggccgaggtgggcagatcacgaggtcaggagatcgagaccatcctggctaacacggtgaaaccccatctctactaaaaatacaaaaaattagccgggcacggtggcaggcacctgtagttccagctactcaggaggctgaggcaggagaatggcatgaacccaggaggcagagcttgcagtgagccgagattgtgccactgcactccagcctgggcaacagaacgagactccgtctcaaaaaaaaaaagattgccaaataaagtagaaggtgattatctgaaggtcttcaaatagaggagttgtttatgttgctgcattgaacactgcaagatagttaagttactgtaggaggcttttatcctcatctgaattgttatctctggttttatgaataactgtttcaagctccagttccactggcatctgaattcagaagccatccatgacacttccttctctgttaacattcatattcatgcaaagagaagcctgtgataaaattaattttctcttgtatttgacttttttttgtgcaactgggttttcttcattctgttctcacccaataccattctctggtccccaaactttgaacttagcttggttaggaaaaagtcattctgtgcagccatataagctggcaggacacactcagttttttgggtttttttgtttgtttgttttgtttttttgagatggagtctgccctgtctcccaggctggagtgcagtggcatgatctcagctcattgcaacctccacctcccgggttcaagcgattctcctgccttggcctcctgagtagctgagattacaggtgtgtgctaccacacctggctaattttttttgtagttttagtagagatggggttttgccatgttggccaggctggtctcgaactcctgacctcaggtgatccatccatgtcagcctcccaaagtgctgggattatggcatgagccaccacacctagccaacacactcagtttaaattaatgatggctttcctttctcactgagtaactgtggactatatcaacatgcataccagttctcccactaggctagaaattcttacggtctcattcacagcaatgctgaaaatctaaatgtgttcacacagggtgtctagatgaatttcagtttttaaacatgcagctactataaactgcttctttgcctgtcagctcttttctacccacccttctaggaactaagcattgtacaatgagcatattggggaatagaactcccagttggcttctgctgtacttaggcagtgagcaggataaaaacaactcagttcctcccacacacatgatgatgctgggaayggggaagaagggagcagacytcaagaacatttggcattgccctgagcctggggacctttgtagatttgaagggaatgaggatctgaaaatccctggagatcttttgggggaaaattaaagatcttgttgttaactaaagacctttttttagagtcactaagagctttggacatgtaaagtactaattttgtctttcatggacatatttccttctttcaaggctgcctttcagaactgctttttttattccctagctctatcgttcacagatgttttgtacagtgttcatggtacatatatctttgtgttcagctttctttaaattaaagcaaatctcagaaaagttcaaagtatgcagtcctgcataatctcatagaccagtagctgtgtgttagtctttcttacagcttccctagaaatcctaaagctttgcccctgacatacagtatgtgttgttaatatttggaacaaacttgggtaaataaatattgaaacacgggtacagcttggttcttgaactactcgaaatttaaaagtaatctgcccaaagcaggcagccgcttctttgggagctttcttttttttttttttttttttttttttttttaaagaaagrgtctcttttctgttgcccaggctggagtgcagtagcacgttcatggctcrcagcagcctcgagctcctgggctcaaacagtcctcccacctgagacacccgagtagctgggaccacaggcacatgccaccatgcctggctagtttttctttctttattttttgtggagacaaggtctccttatattgcccaggctggtcttgaactcctgagcttgagcagtcctcccacactggcatcccaaagtgttgggattacatgcatgagccactgtgcctgactggaaacatttctttctttctttttttcttttttttaattattatgagacagggtcttgcttagtcgcctaggtgctggggtgcagtagtgcaatcatagctcactgcagcctcgacttcctgggcccaggtggtctaagagggcagctctcacagatctataggattatcacaaaccctattagaatctcagttggatatttttgctgaaattgacaagttgatcttaaaagttatatggaaatacaaagaacacagaatatccagaacaatgttgaaaaacaacaaaaaagttgaagaaattatgcttcccaagctcaaaacttactataaagctatggtagtcaagacaagtatggtactggcataaggacagacagacagatctgtggaacagaactaagagtccaaaaataaacccttaggtttatggtcatttgatttttacctgagatgtccaggcaactcaacaggaaaaggatagatttttacacaaattgtgctagaacagtttgatccttacttgcagaaagattgatttagaaccttacctcactccatacagaaaaaagaaaatggattacagacctaacatgagagctaaaactgtaagagttgtatagattttatttcttaaaaattaaagattttgaaccccaaagacactattaagaaaatgaggrccgggtgcagtggctcttgcaggtaatcccagcattttgggaggccaaaccaggtggattgcttgaaccaggagttcaagaccagcctggggaacatggcaaaaccygtctctacaaagaaaatgcaaaaagtagccaggtgtggtgtcacgtgcctatagtcccagctactcaggaggctgaggagggaggatcacctgagcccagggaggttgagggggcagtgagctgtgatcacgccacagcactccagcctggatgacagagtaagaccctgtctcaagaaaaaaaaaaaaaaaaaaaaaaaggccaggcccagtggctcatgcctgtcatcccagcgctttgggagtctgaggcaggaggatcgcttggggccaggagtttgagaagagcctgggcaacaaagtgagaccctatctctataaaaaaatcttaaagggactgggcgcagtggctcacgcctgtaatcccaacactttgggaggccgaggcgggtggatcacctgaggtcaggagtttgagaccagcctggccaacatggcaaaaccccatctctactgaaaatacaaaaattagttgggcatggtggtgggcgcttgtaatctcacctcctatggaggctgaggcaggagaattgcttaaacctgggaggcaggggttgcagtgagccgagatcacgccattccactccagcctgggcaacaagagcaaaactccgtctcaaaaaaaaaaaatttttttttcaattagccaggcatggcacgaacctgtagtcccacctctttgggaaactgaggcattaggatcacttgagcccaggagttctaggctgcagttttgatcatgcctgggtgatggagcgaaaccctgtctctgagaaaagaaagaaaataaggaaatgaaaagataagaactcttccaactcaaaaaaatcactaacagcctaatttcaaaataggcaaaagacttgaatgaacatttcaccaaagaaaatacacaaatggctaacaagcacatgaaaagatcctcaacatcatgtcatagggaaatgcagaccaaaactttgatgatactgcttcacacccattagaatggctgcagttttttttaagtgacagaaaaagcaaatctataaatctatagagacaggaggcagattaatgattgcctgagatgtgataagaaaggggattggttttttttwaattattatttcaactgttatttagatgtgcaagtatgttacatggtatattgtgtgatggtgagatttgggtgcgattgaacccatcacccaggtagtgagcatagaacaaaacaggtattttttcaactcttgctctcctccctccccctggttgtgtatccttgttgtctgttgttcccttttttttttttttttttttttgwgatgattctcgctctgttgcccaggctggagtgcagtggcatgttatcagctaactgcaacctctacctcccgggtgcaagcaattatcctgcctcaccctcctgagtagctgggattacaggtatccgccagcacacccagctaatttttgtattgttagtagagatggggtttcactgcgttggccagactgttctcaaactcctaacctcaagtgatccacccaccttggcttcccaaagtgctgggattacaggtgtgagccactgttcccagacttytgttcccatcttaatgtccatgtgtattcagtgtttagctcccacttataagtgagaccatgtaatatctggttttctgtttctacattactttgcttaggatagtggcctccagctgcatccatgttgctgcaaaggacatgattttgttcttttttatagctgcatagtatktcatgatatatattgcactacattttctttatccagtccactgttgatgggcacctaggttgaatccatgtctttgctattgtgactagtactgtgatgaacatgcaagtacacttgtctttttggtagaacaatttcttttcctttggatatatacccagtaatggattgctggttgagaggtagttctagttttagttctttgaaatatctccaaactgctttccacagtggctgaactagtttacattcccaccaacagtatataaacatttctttttctccacagtctcaccggcatctgttgttgttgttgttgtttgactttttaatagtagccattctgactggcatgaggtggtatctcattgtggctttgattcatatttctctgatgattagtgatattgagcatttcttcatgtgtttgttgtctgcctgtatgtcttcttttgagaagtgtctgtttatgtcctttgcccaccctttaatggggttgttttttgcttgttgatttaagttctttatagatgcttgatattacacctttgtcakttgcatagtttgagaatatttcctcccatttctgtaggttgtctgtttacagaacagtagtttcttttgctgtgcagaagctctttaatcagatggaaaggggaatgtttgattataaacagtcatgtgagatcttatttgagtaaaagaaatgttctgtaactggattgtggtgatagttttatagctctgtacattttctaaaaatcattaaattgtatgtctaaaacaggtgaattttatggtatgtaaatgacacttccataaagctgtttgttttgtttcattttgttttgttttgtttaagacataggctgaatgcagtggctcatgcctgtaatcccagcacttttagagggcaagatacaagtatcgcttgaggctgggagttcaagattagcctaggcaacatggtgaagccccatacaaaaatacaaaattagccaggtgtggcagcttgctcctgtggtcctagctkcttgggaggctgaggtagggggattgcttgagctcaggagttcaagaccagcctgggcaacatagcgagaccttgtctctaccaaaaataaaaaaaattagccagctgtagtgatgcatgcctgcagtgccagctacaggaggctgaggcaggaggatcacttgagcccaggaggtagaggctacagtgagcaatcattgtgccactgcactccagcctaggcaagtggctatctccagtcagagcaagaccctgtctctaaaagtaaacataaaaacctacaaggcagtcgaagccaagcaacacagagttagaagacaaccaggcatctatgactggaatcttcttttttttttttaaccatactccccttccctgtgtatttatttttattaaatagaatgacctcaaacattacaagcatggcattttttacacctaggcagatgccttaatttgacctcatttattcatttatttgtttattcaacaactatttattggacatttactctgtgtcaggcacaatgctaagtgctaaggatgtgaagataaatctctgctctactgaatttcagtctagtgggagagagagagacaagtaaatagtctatttctttactatatgttaagttatccaatagaggtagataccaagttttgtgggagcacaaacttcactgttgtcagtgaaggattcctagaggaagtgtatcctggggtgagtcctgaggaataartaagagtagcaagttaggattattcatagaattttactccatcttctgtgaagatggagaatacataccaaattgtggaggcaaaagaaagcatggcatggtctgaggaaaataggataattagggtagaagcaggaaaatgtttgttataagaattgtgtgtaggaatttataatagaggccaggtgtggtggctcacacctgtaatccaaccactctgggaggctgaggtgggtggatcacttgagaccaggagttcgagaccagcctggccaacatggtgaaaccccatctctactaaaatacaaaaattagctgggcatggtggtgtacaactatagtttcagctactyggtaggctgaggcacaagaattgcttgagcctgggagacggagcttgcagtgagccgagatcacgccactgcactccagcctaggcaacaaagcaagactgtctcaaaaaaaaaaaaaaaaaaagttaacgatcaaatagaagaaggtagattatcagtgatatgatgtctcaccagatttctttagaatcgtaaaagcctcagaaagtatgccatagggtttctagggaaaasaccttttatgtggtagagtcagggctggggtccactgtcctggtctccccagaaagagatgtaggcagcatgcctctgaccctcataaacttaccagtgcctactacctgataatagaatggagaccatgttacctgattgtgagcctcttctttctttcttttattttttatttttttgcaggcatcctagaatacgtttccacacgggtcttgtggatgcccacctctactgtttgaaaaaatacatcgtggatttcctaatggaaaatgggtaagaaaaagggtggtagagtcaaacctacagtrcttaacaagctactttgtgaattccttaaattttaaaccttcataatttagataaccagtttctaaaattagcacaatagcacagttagttctcatttttgttttagaaatgaaattatgtcatcaatatagtgttgttttatctgtaccacagagtcccctgcttatatttttgcagcgtgtgttataataaatcagcaaaatattttgtaacacttaacggtaacccatgatgcctctttctgcccagttccaggctcttcttccctcctttgacaggagtgagctccacagcccttatgctgtttgtctctaattacatgttctcctaggcagttatcctgtagatgggccctcttagcaaagggctacagacttaaccatagaagagaaaaaggagagcaagtttccccccaattttagaaaagaagcccacttcagtgagtgcagagaaacaaaatttggcacattttctgatttttttgtttgtttgttttagaacagaattgtaggacttaaatagtttccagagattgtgtctggcagatcaccggacttgagttttcaaagagaaaaccccttttgcagttgatctcaaggattttttataagaaaagcagctacagtcctcaaaggaacaggtggaaaaagatttaataactgcatggttaagaataggagcagctagcttcccttgatgactgctggataagtttggaaagttcaccagtgctatccaaggcggaaacttatctaggtgaacagataccacagtagcaagaggtatctccgaccatctggagaaaagaatttgagaacctgagtttaaatgctagctctgcctttggctgatggacttgaatatatatcggaatattaagaggaaggaggattgctcccctgcccagtatgatctttcttgcagtgtcctacctgtcaccccccyacaacacttgctaagttcctgtggagaggcccatgtagagccaatggtaaaacaaatcatttggacttttagaaagctttcccaaggattgttatagctctgtttcccctaccaaggacacagttgccctgctcccttctgacctctgaaaaatgttttcattccatctacacatacttattaagcacccattatgagccaggcattgtgctagatcaaccatgggatcaatgataaataaacagatatggccctgccctcatggaaattacagcctaagctcatggtggaatgtggagaccttgctttttagatagcagggtaacttgttgccaagatttagagggtgatccaagagctatttctcagtgaccagtctaagctgtttgtattccaaaaatgaaattaactcttggccattgaagggtttatttttcactcccaaataaaaatgaagccatatgaaatgagcctaggccttgataggcagaagagaacacaactgtgttagaaaggatgactttttaaaaaatgatttactatggaaaatttcacataaatgcaaaagtaaagaaaataatgaactcccatgtatccatcacacagtttcaacaattatcaactcattgtcaattttgttttatatatgccaccgtttctctccccccattaccctaaattgttttaaagcaaggcattttgatataatttcatctgtaaatattttgatataatttcatctgtaaatatatttcagcatgtatagttaaaatataaggacgcttccaggataaggatatttaaaatagatatatattttatgtatatgtacatatatatatatakagagagagagagagaggctttttttaaataaataccttaatatcattatcacaccttcaaaaaactgacagtgctttcttaatactatcaaagaggattgtggcttttggtgtctgtatatgcaggcagttttacagcaaacctagtcatctcatcctggttgttatagcttatktgtagttcatttggccactaccagttagttattcccacacctggcaagtgtaacacaatggtgtgtgtaccttgaggacaagcctgaagtttgtgatatggctataggtcctggccagaagctctgccaaatgggactttcccagaacctgctgcagtagagaatgatacagagcctcagcacatactgtttccccacctcaagatctgtttaggagacccttatctctttcctccccgcatctaccttgacctctcagagtcgctacaatcaaagagcatatattgaaaattgatatatttcaatatattggaaaaagtaaaaaggcacagcagggcaaattagaatgttacttgagggacagtckttactcctggctggaatagtgaaggtctttgaaaggttgtgggagatgggattgaattggttggtggtaggtagcagcatgtagaaggtcttgaaagctgagcagggagttacagatctttaaacagaatagtcttacaggaaatgagcaatgatacaacctggcaagtgaacataaaccattctgcatgggaaagagatttcttcaagataagtaggaggcacttataatcatctggtcatcagatgatgactcctttaggaatggaaaggaaagagtaaacctaggagacacagcttcaagaaaggactgttgtagcaatcctttgttatattttacctctgagagttaacatattctaccctgtgttmtttatgtagaaaagcatcatgttttcaataaagtcacacttaggttttgttatttgtttacatgttaacattttccactcaaattctttgagaatggatatctacctggatttgtaaggcattcattatatacttggtgaatgagggaaaggagatgtagtgacagataacagaagcagtttagtattaatacattaatagtggaagaagagaggtgggtttctacagttgaccaagcagaaaagctacagggagagctgcagagagaagaaaatctgtactctctttgatgagaatttagtaactgtacacattttacaagttttttatccacttctgagtgtagtatgatagatgaatgttccacagaatctcttgaacattttaattcaaaatgtgttggattctgtgtccagggccaaagcagatcttagtctgagtattgtgactgtgattcctcttgataactgagtgttcctccctgttttataatgtcagctggtttaagcctaaagaagctgatctcttaggagatctagaagcccaggtattggcccagctctttgcttgccttagtaggagctgctcctagacctgagtcagggccctagattgtcactggccctatgaaggactcaagcaatatgccaatatgccagctttgtgagctaaagccatgggcaatatataccaggcaatgtataccaggattagtcttgatttccttttagtatagaacctcccccgctccccacccccaccagccccatttatctttctctctttaagagacttaaagattagtctccttaacagggagaattgaggctgattacttccttcttgtccagaagtatccacggttacagtcagcctcttatagtgttagaatctgatattgccatgcagtacttacagtcttggggttggaccttcagagcaggaagagagaggaaagaagaaaatttaaccacctactgtgtaccaggcactgtgctgggtgcttttcacatatattcatttcttacaatagttctctcattaggtattatactcatattatagaggaagataatgctcaaaagtcatttgctcaatatcatgcagccacagcctcaacaaaatccatcactgtttaattgattgccagcaacatccaccacagatgtcggatatctctgttgccaacatgcttatatgcacatgcacatgatttgcacttgaaagagtaacagagcagtcacaacttccttgcctcagctatgtcaggatacagagaaataaggataggacccacaaagtgaagtcaagagttggggataggcagccatggcaaggtcagaatcaaggtaataattaaagccacatacraaatgaagttatgttagctgggcatgatggcatatacctctagtctcacctactcaggaggctgaggcaggaggaccacttgagcccatgaggttgatgctacagtgagctatatatgatggcaccactgcactccagcctggtagacagaaagagaccctgtctctaaaagaaagttaaaaattaaaaaagatgaaagtgtagaatagctagaaagccacgagtaagcacaagacagcagagtggagataagcagagatgagggaccagatagtgctgtgagaggctggcagtagtagtcttggtttcttactgttcagttcaggcatccattgatttggctgtacttggtttccttacatatccttagatgtcctagagattgcacratgtgtcctttacttcaataacaacaaaattaagctaagagtatgtgacttacacaccttctcaacagggctgttattgggtggctgcatactgatatctgaagatgcaggtgctgccaagattaaatcaaggtagtctcctttgaacttcctagttgcattcatttttatctctgggacttctagaaatattagtaatattagtaatagagaaacgtatttagaattcattacatttccaaattaggaaagctttactttttttttttaagagacaggatcttgctctttcgccaggctggagtggagtgcagtggtgtgataacagctcactgcagcctccacctcctgggcttaagtgatcctccctcctcagcctcccgagtaactgggacyacaggcactcaccaccatgactggctaattttcttattttttgtagagatggggtctcaatatgttgcccaggctggtctcaaactcctcggctcaagagatcctcccacctaggcctcccaaagagctgggattacargtgtgagctaccaggcccagccaagaaagctctaccttctgtatccaaaaatctgtgtgtttatgggtaaagagacagcaagcagagaattctaaatcctgtggaaagtgctttggttgaactaagcacaagatgctagttaatatggtatagtggaaagagccatggactataggacagatgtggagtgactttcaattctatcagttataaaagttgtattaaccctaggcaagatagttaacctctctaagccttgatttccttctttataaaataggggccaggtgcaatagctcacgcctgtaatcccagcattttgggaggctaaagtgggaggatgggctgaactcaggagttccagaccagcctaggcaacatagcaagatgccatctctacaaaaattacaaaacataaaataagaatagtaatacctatcataagcattgctataagaacttgaaatgatctgtattattttcctagcatagtacctcagacatgayacctcctcacacatgatcaaaaagcagtacatataactgtctttactgtgagagcatagaagcctacaaatgttataaaaggcttccaagcagagatcatatttgagaagggtgttatgacttgataaattttcacaaagtgaacataccttatgagtactatattcaggttaagaaacagaacattgccagaattccagaaactcccctcattctatccccctaccccaccacatacacaaaagtaatcactatcctgagcattaaataagtgtaaggagatgggatgagatttgtactttagaaaaatcactgtgtctacaaaatagaggatggattgaaggaagaagagacatgatcagattgtacttcagaaatattctgtcagctgggtgcggtggctcatgcctgtattcccagcactttgggaggctgaagcaggaaggattacttggaggtaggcaggaggatcactggaacccaggagttcacgaccagcctgggcaacttagggagacctcatctctacaacaaatttaaaaataaaaaaattagcatggtggcacatgcctgtagtcccagctacttaggaggctgaggtgggaggattacttgagcccaggaggtcaaagctgcagtgagccatgataacaccactgcactccagcagcctgggtgacagaatgagaccatctttaaaaaaatttaaaaatttwaaaaaagtctcttttttttcccatctaccgtatgaaggatagattttgtggataaaactagagggagagagaccaattaaaagcaggtacaggaatccaggcaaatgatgacagtagtctggaccaggcartggcagtaaagatgaagagaagttgaaagtcttgacagagatttaggggatagaatcagcagtgcttggtgattgattatatgtgaggagtggaagaagaagtcaggctgttttgtgaaagggccatttatcacaaagcaacccccaaatgcagaaggagctgagaaaccaaagaagaaggcagacaaatctagtttgacagttttggatgatttattagggcaacttataracagagtcgtggtcttgggtgggtgcaagacaggtagatctccacactgcaaccccccagacccagagcctataccttggggaaaaaaaacatatatgctttggaaggaattttcgaaagtcaaagcagtttatgaccttaaggcatttagcaaacctaatatctgacctgcctaatttagaccaaatgtctttattttaccaataatctttaacattttttatttcccaaagattactaaagttacgtgaactaaaaggcattacagtttttatttttttcaaaatattttatttaagtgcttatttttctttatgccaattaattagagcttttacataagcatcacacacataacatatgtataaactacacagacagacagaagaagatccagtagttgtaagatttttcatttgccagtttcttaattggattactggcctcacggtagagcccttcaagaaacaggtctaggaaaacatgcagtttctggggcctaataagcaggcacagctggaagacaaaaacagacccccaaaatcaagagtcccgtttttatatcagatcctggatcccaaaaagagggaattagcccatctcccatgagagtcttatctctcagtgaggagtgggaacatttccataacttctaggtggccaagagcatgcttctctgatgtaaacatgcaaagagccacgtattccctgataactgccattagccattgtcaaaagtatatttagccttagattttcagaggaatctatccaccacccattcctggggttttatgaggaaaacagagttttttcccagaacagggtctgtgacatctcctctgtttttcacaaggagtcccagtctattagagcttgaatatccacttttaattaagctgactggccagatgcagtggctcacacctgtaatcccagcactttgggaggccaaggcaggtggatcactggaggtcaggaatttgagaccagcctgggcaacatggtgaaaccccatctctactaaaaatataaaaattatccaggtgtggtggcgtgtgcctgtaatcctagctactcaggaggctgagaatcgctggaacaaagcaagactccttttcaaaaaaaaagataaaaaacaaagtaaataaaaataaaagcactatggttaaaagtcagcttaatttttttttttttaagatggatcctcgctctgtcacccaggctggagtacagtggcataatctcagctcactgcaacctccacctcccaggttccagcaattctcctgcctcagcttcctgagtagcagggattacaggcacaggccaccacacccggccggtgttttgtatttttagtagagatgccatttcaccatgttsaccaggctggtcttgaactcctgacctcaagtgatccacccgcttcagcctcccacagtgctgggattacaggcgtgagccaccactcctagccataggactcttttaaaaagcacttttaaatttcttattacccgactctagccacactgacaatatttctggcttttgaacttaaccaaaggtaacttcccaggtgcttagggaaaggaaaattcaagatggttcatggagggaaagataatcaactaacagtaaaggtcacacagatatcaaaccagaaaggactcattccctaagccaggaattgaacccagggcatcactgtgaaaagtcaaagccttagctgctgagctacagcactggtggtttccattgctcttcccactgttcccagaaggaatctaaaatagttaattttgtgcttgcaaaggcttttaactactcaagataatttttagagctagctatgacatgaatcccagaattcctgttccctggaaggaagagaccgagagacattatggccacatggttacaaggtcaagttgccaaggacataaaacmagatggagacctcacccagtttttttgtttgtttcaaggacctgcagtaawatttattaccagcttgctgggccgtcttgagcagtttatggggtcctaagcccctgttctatcctaaggtacccttctttatgacagaacaacacagacaaattcatagcacaaaatacattagattcgttacaacttaatatgagcctcaraattttttctcattaatcaaaactttacagaggagataaacagtgatttttaccattcattcagccaatttgcacagagagagagagagagagagagagagagattgagaagccataagtctgactggcaagaaatttttacccctttgccggcatgtcccgtttctgggttccccttccctgagcggccctagcgaccctgcttgccacaccatcgctcctggggccaagctgcatcacaaaggaaaatcatggaaccacaggcaaaatcctctaaattttgtaagttgccgcccaaacggctgcatgggggacctgaattctaatattttccattctggacgtagcaaaatacatgtgacaaaacatagacattagccaccatatggatgcttagcacccaatattgaactggcaaggcccaaacttgcccccagttgggccctgtcatctgtatccatttttaaccaagagggactttattgagggragggcctctcacccaatcccatcctttactcaggtaaaatgtatccccattacgtatccaaagtcagccaattggtgctgcagwctgtttcttttgggtcagatagtaactaagctaaaagattagtaaatctaattttttaatcaattagtcatttaggtgcctttcataaagtctttttttttggggggagacagagtctggctctgtcgcccaggctggaatgcagtaatgccatctcagctcactgcaacctctgcctcccgagttcaggcatgcctcagccccccgagtagccaggattacaggcctgcgccaccatggctggctaatttttgtacttttaatagagatggtgtttcaccatgttgaccacccgccttggcctcccaaagtgctgggattacagatgtgagccatcgcgcccggccttcataaagtctttaaataaaaatattgaaatctttttagaagcrtctgcatatcagtaagcatccctagatgagtctcaatgcacttcagtgcattgttcattcggaacgttctactgtaagttatctttagtaagatttcgccatttctgtaagacttcactgcttaccagctaatgtataagctggaaggaattcagttttccaaaaatgaaggatcccatttttacctaaaatatttgctttgctctcaggttcccttgatgaatttagccaatgatttttcctacctaagcacacaagaaaaatgaaacaaaggggtagaacacaaacatccctgtgaattttcaagagccaaattttacaacccctacagtattaccatttacaaccagtttctttctgacccagtcagatgtaagaagccaagtaattagctggatccaagccagctaattactggatcaagtccaatcctggacccastcaagtttctcttgtgacttccaaacctagtttggatcagaaatttgctcaaagaaacttggacagctcaaaacacaaatccttggagctctgaaatctgagagagagcttacccacaatccccagtcactctgagagatcaatggacataagtgggtccttgcaggtaccttgcttgttcactcagcgctcctggggttgttaaagctctacttcagatcccacttctgacaccatctgtagaaagaaamrctgaattaagtttaaaggagtttaattgaacaattaatgattcatgaattaggaagcccccagaatcacagcaaattcagaaagactccaaggatgcctcatggtcagaggcatttgacaatttttagacaaaaaaaggaagtgacgtacagaaatcagaagtgaggtacaaaaacaactggattggttacagctcggcatttgccttatttgaacacggtttgaacactcagcagtgtatgagtagttgaattatggctgctgggattggccaattctcagctattagtacaggcacatactcctaagttaggttttcagtctcatctacctattaagttaggatgcagtttgtccacaaggactcaaatatagaagtatgaagtccttctcaggccatatttagtttgctttaacattcataattccactactgtgagataactattgtgaacattttagtgtatttgtttccattgttttattttcatatatatagtaagaatacatgcttgaaatcacactttaaaaataatcggggtcgggcacagtggctaacgcctgtaatcccagcactttgggaggctgaggcaggtcagatcatgaggtcaggagttcragaccagcctggccaacatgttgaaaccccgtctctactaaaaatacaaaaaattagcccaacatggtggcaggtgcctgtaatcccagctactcgggagcttgaggcaggagaatcgcttgaacccaggaggcggaggttgcagtgaaccgagaccgtgccactgcattccagcgagactctatctaaaaaaacaaaaatttgcttttttcattgagtgttataagcattttattctatcattaaagaattcttggccaggcacggtagcttacgcctgtaatcccagcactttgggaggctgaggtgggcggatcacgaggtcaggagttcaagaccagcctgaccaacatggtgaaaccccatctctactaaaaatacaaaaaaaaaaaaaaaaaattagccaagcgtggtgtcaggcacctgtaatcctagctactcaaaaggctgaggcaggagaatcacttgaacctgggaggcggaggttgcagtgagccaggatcgtgccattgcactccaagcgagactgcgtctaaaaaaaaaaaaaattctttacagtcacagttttgcctatatgacattctgttatagaggtattttgatctatcattgttgaatattttattgttctccatttttataaataacgggaatacctttttttgaaagattcttgtttataatctgatgatttcatctattcagcaaatatttactgagtaatatattttccttaggatagacttatagaaatggaattacagggtgaaattatatgaatatcttcaagtcttttgctataatgttgccaattatttttcagagattttatcagtttayactcygactcccattatgtgacagtaacggttctcaaagcactcttatcagtaatgaaaattgttttgaatcagttaatttagttggaggagaaattgcatcttattttagttttttacttctttgaaaatattttatatgtttttttaacacatatctgtttattaagaatattctttgccctattcatagcaattattttgtctttttatttggtgggattgtttgctagtagtcaagtctattgttctcctttgtgattgcttgagaagagcttatgatttcatgagataagacaggtgtttctaggaaggctgtgtataagagggaaaggagaaagtaaggttgaccagggcactgtatccagcaagtggcctaggcccaggatgttcacaatggttcactgtagctttgtaacatttcttggcacagctctgagctgcctgcactttaactaggaagcaggaagagtaattgtttccttcattatgtttctaagtcaactgcatcatggggattgacctaatgttgagctccagcagaggtgggtgggacctggcagggctgtttcatagcctctcttcaaatcatggatcctctcgaaggttctgcctgatggggccatgtgccaaggctcgtctgcttgcctcttgcagtgacagttctttttggtctgtaatgtaaatatcatggccctgaaatcccctagctgtccgtgctttgtcacttcttcaaagggaactgacttgttttccaatggaggaggaacatttgctgcctacactggtttgaagcattaaaaggggagaaaaagagctaagagtaagtgttgcttcattctttgtattcacatggaaatttttaaatcttcatcaaaggatcaggagaaaaatcacattgaaattcaatacaagagctcacagcttaacacagaatttttcaaaattgattctttaaaaattgcagaaactatgaactgtgtagctccagggttcatagttttccttaccctcctcagcctctgcctctgtcttgccttcctttctacctacactccatctgtttggttttgtgtcagcatgcagagctttgaatgggggctggkagaggtggtgggaagtatgcagcaagtcaggtttatagagctgcccatactttcacccctctctcaggcctcattatctcatctctcagaatattgtaactggtctccctttcttcagtttccttattccaggctttcttccacattgctaccagaattaccttaataagagataaaactgttcatgtcactttcttgcttaaaaactaccactggcagccaggtgcggtggctcacacctgtaatcccggcactttgggaggctgaggtgggaggactgcttgagtccaggagttcaagaccagcctgggcaacatagtgagactttgcctctacaaataataaaaaaattagctgggcatggtggcacatgcctgtggtcccagctacttgggaggccaaggcaggaggatcacttgagcccaggtagtcaagactgcagtgagttgtgattgcaccactgcactccagcctgggcagcagagcaagaccccgtctaacaaggaaaaattaccactggcttctcagtccagactttctagactgctactgtaactcctcagtgggttcatcttacctgctgccgagatagagacgatttatcaagatgggagaattgcaataaagagtttaatacacatagaggcagctaaaygggaaaccagaattttattattactcaaatcagcctcccccagaattctgaggctagggtttttcaaggatggtttggtgggcaggggtctagggaatgagtgctgctgattggttggggatgcaatcataggggtgtggaaamcagtcctctgctgagcccagttttggatgggggccacagaggggtcactggtcccagtggagtcatccagtcatcagaaatgcaaaagtcagaaaagacatcttaaaaagccaatcttaggttcaacaatagtgatgttacttacaggagtaactggggaagttgcaaatcttgtgacctttggaaaaatgattggtaatcatgagaattcaggcccctcttgtaatcctaaatttgtacgcttttattagttttataaaggcagtttcattttgagaagggctattatcatttaaactataaactgtaataaatttctggctaggcatggtggctcacacctgtaatcctagcatgttgagaggccggagcaagcggatcacctgaggtcaggagttcaagactcctgacctcaggatggtcaacatgacgagacaccatctctactcaaaatacaaaaattagccaggcatggtggccggcgcctgtaatcccagctacttgggtggctgaggcaggagaatcacttgaactgggaggtggaggttgcgataagccaagatcgcaccgctacactccagcctgggccacagagcgagactccatctcaaaaaaaaaaaaaaaaaaagaaaaagaaaaaaaagtcaggcacagtggctcatgcctgtaatcccagcactttaagaggctgcagcaggcggatcacttgaggccaggagtttgagaccagcttggccaacatggcaaaaccccatccctaccaaaaaatacaaaaacagccaggcattgtggcatgtgcctgtagtcccagctacttgggaggctggagcacaagaatcacttgaacccaggaggcagaggttgcagtgagctgagatcatgccactgcactccagcctgggcgatagagcaagactgtctcaaaaaaaaaaaaaaaattagccaggcatgtggctctcacacctgtaatcccagctttccagccactcaggaggctgaggtgggagaatcacttgaacctgggaggcaaaggttgcagtgagctgagatcgcaccactgtactccagcctgggcaacagacagagtgagaccctgtctcagaaaaaaaaaaaaaaaagttttctcccaaagttagctcagcctatgtccaggaatgagcaagagcaatttggaggttaacagcaagatggagttgattaggtcagatttctttcactgtcataattttgtcactgttatttttgcaaaggtggtttcaccacaaaaagctttcgtgatctggcccccttgcctacctgattagcttaaccttctgcttttcctcttaaactcatacaggctactgtccattggattatgaattccttgaagtcagaaatgatgtatttccaaggcctagcacagtaactcgcatatgcttggtaaatgctacataaattaattagcaatataaaattctaataaggtcacagtgtgagagaacactgaaaaacatgtgctagtttctcatctctctgctttccattgctaagtataaataaaaacataaataaaaaacacacactgaactaaagatcaggtcccttcttcccctagtacagattcctgatcacttagacccaacatcctgtctcagtacccaccaggaagcactctgcttctccgaactgccaagtcaatgccacatttgatctctgacagtcccaaggtgccatgacaggaaaggatttggcttttccttgtatgcacagagcttttgatccgggtatgttccagacagtcaggtttctcatatttggccattctttctttctaggtcaataacttctatccggagtgaactgattccatatttagtgagaaaacagttttcctcagcttcctcacaacagggacaagaagaaaaagaggaggatctaaagaaaaaggagctgaagtccttaggtcagttcttgggttggttcagtaagaggggcaagggtagcagcacctttggaaagagtggttgggcagcttagcccagcccaagatgcctgactcaaggcagcagactatttctagcctacgaggcaagacaggcttgccaacccactgagctctgggtaagcttgctcaggcagattctgccactgtgctctcggcaacaggctaatcatgcctccagccccattctctgattcatagctctggtttggctgtgttcctcactagaccattttgcctttaaactccacctgccacttcttagttcccctgttctctaggctctaggcagccccgttcctgattaaactcaacctcttttatcaagggaaggaaagtgaaggaatgtacaattgcagtccaaccacaggccaacccaggtgtctccgtgccaggatctgaagatcggatctgtcttgtttgctgtcatatccctaatccccggcccagtcgtggactcatagtagatattctgaaaaagtatttatcaaatgaatacactgacagtacagcatgatgattaggactgtagaactgggcatcagacagttctggatttgaaatctgactgcctcttactagcattgtgtctttttttttttttatttttttgagacggagtctccctctgtcgcccaggctggagggcagtggcgcaatctcggctcactgcaagctccgcctcccgggttcacgccattctcctgcctcagcctccccagcagctaggactacaggcacacgccaccacgcccggctaatttttgtatttttagtagagacggggtttctctgtgttagccaggatggtatcgatctcctgacctcatgatccacccgcctcggcctcccaaagtgctgggattacaggcatgagccaccgtgcccggccagcattgtgtcttgaggcaggttactcagtcctctgagccccagtttttttatgagaaagtaaaagatctcaaaggatcgttgtaagagctgaaaaactagagccctggtactctgggctccaagttctgtactttctgtcatagcacagctaccagatatggtaatagagactagcagcacaaagtcaacctggctggccactaaagcctggatgctggcttgtgttatttcatgatttacaagggtcatctgttttattttccctagtggtcttgattaccggtcacatgcttttaggacctcgtattaagcatttttatatcatatgatattttagggaagtacatttcctcttttagtttgactttctcttacagattttagtgggatttcctcagggttcatgttttgtgggtgagtttcaaaggaagaagtgtgagctgtaatctcttttaaaacttagagccaagcatggtggtgcacacctgtagtcccagctgctcaggaagctgaggtgggaggatcccttgagtctgggagtttgagaccagcctaggcaacatagcaagacctcgtctcttaaataaacaaaaaaacaacttgactgagtctgtatctgttctgttatctctctctcatttatttccttggttgggtgtttgttctgaagatatctacagttttataaaagaagccaatacactgaacctggctccctatgatgcctgctggaatgcctgtcgaggagasaggtgggaagacttgtccagatcacaggtgcgctgctatgtccacatcatgaaagaggggctctgctctcgagtgagcacactgggactctacatggaagcaaacagacaggtgagagcatgagttagaaaatcatggggctcttgtcctagaawcagactgagccacttgtctgtttcttcattaggtacatagtaacttgttaagaatccctgtcattcccaaggttgagcaagacctggcacrtcaagggagactactagggtactcaggtgcagcaaaaagggaagcagggggcctggtccatagtcagggcctctatggctccagggaaaggctaagatcttcaggaaggctaacttctggcctttgggtcagcaggttcctcctgttctgttcagcatggggatatctgcagtacttacttcataataagcaggtaaatactctgtaatcattactctgatgaagtaaacataggcatacagaggaggcttccctgagaaggtgaaggagcagagtatagagtggccagatggcaaagcctcaggaaaggaatgactttgagagagaattgtctgcaaacagcattaatgaggagtctcttgctagcccctccttttaaccttgaagtttgtgagatatggggaacaaatagcttccactgaaggagaagcagtgtcctcaaagataagccaggccttaatgaaggcagggggtggagagggggacagtaaagaggctgaaggtataaaggaactctgtattgtatagtaggcccaggaggaaggttttgggagggaggaataataagactaggaaaaggaaatgcagagcagtaaagggtttagatgagaataagaaaagagtccgggcacggtgtcttacgcctataatcctagcaatttgggaggccgaggcaggtggatcgcttgagtccaggagttcgagaccagcctgggcaacatggcaaaatcctgtctctacaaaaatactacaaaaattagccaggtatggtggcatgtggctgtagtcccagttacttggaaggctgaggtgggaggatcacctgagcctggaatgcagaggttgcagtgagctgagattgcaccaccgcactccagcctaagcctaagcaacagagtgagactctgtattaaaaaaaaaaaaagaggataggaaaagataaataattgagggaactacattggggtggcattcaaggataacagaggtgagataatgaaaagattagttattgacattgctcctggtagaaccctgtgaaaatataattgcaggtgtagaccagggtggcagtggagcgcagaataatataaaagaaattgttgaaaattgggattgaggccgggcacagtggctcaygcctgtaatcccagcactttgggaggctgagacgggtggatcgcctgaggtcaggagttcgagaccaggctggccaacatggtgaaaccctgtctctactaaaaatacaaaaattagccaagcatggtggcatgcacctgtaatcccagcttctcaggaggctgaggcaggagaattgcttgaacctgataggtggaggttgcagtaagctgagattgtgccactgcactccagcctgggcaacagagtgagactctgtctcaaaaaaaagaaaaagaaaattgggattgactcctgaagaaaacctggctcaggaatctgtaggacccacaccagataaaacctcaggtgagcctcaacctgtattggttacagatccaagggagtcccaagccagagagcttatgagaaatcatagctagtcccacatttacccatgactagcatctttcacgctggtctggaaagatgttcatggataacctgagtgggaagacttgtccagatcacaggtgcaccgctgtgtccacatcatgaaagagggaccctgctctcgagtgagcatgctgggaaaagtatcctttgaagtgccaacagggactatgcagcagacgggcctgaagggccttgggtggagtgtggaagaagagaacctagggctgggggcttggaattagccttcacattccagtgtagccgtgctgacaaggcctccgtcagctagtgtggctgccacgcacagtgctctgaccagcattctgtctatgctggagaatcatagacaggcgcactacctgtgccttcctaatagactggtagccaaagccccccatacctctaacctttccaggtttctcacactggagagggaatagtgtgaacttccccttcatgttttcttttggctgggggatagatgccttctcagggtctgtccttgatttcgaatttgtctaaaatggatctcatcctcacctcatgcgtggtcacagtggtccaggaggtgaccaggaacccaggatgcttatgatcaggatgcggggtgttccttgacctgatcaggcctcctttcccaagaggtggtatgtgggtatctcaaagactggtctcagtgcctcccagccaagggacatggcattactttcaaggaggagcattcaaagctaagagactgacaataaggccatytagaagstgctgcataaataatyttggtcctagggggaatgcarcagcctcctgstccccctcactcagacaggaagctatggctgagaactccctgtatctctgattgagcactgggttctacctaaggtgtttttttttttttkttktttktttktttttattgatcattcttgggtgtttctcgcagagggggatttggcagggtcataggacaatagtggagggaatgtcagcagataaacaagtgaacaaaggtctctggttttcctaggcagaggaccctgyggccttccgcagcgtttgtgtccctgggtacttaaratcagggagtggtgatgactyttaacgagcatgctgccttcaagcatctgtttaacaaagcacatcttgcaccgcccttaatccatttaaccctgagtggacacagcacatgtttcagagagcacagggttgggggtaaggtcacagatcaacaggatcccaaggcagaagaatttttcttagtacagaacaaaatgaaaagtctcccatgtctacttctctctacacagacacagcaaccatccgatttctcaatcttttccccacctttcccgcctttctattccacaaaaccgccattgtcatcatggcccgttctcaatgagctgttgggtacacctcccagacggggtggtggccgggcagaggggctccccacttcccagtatgggtggccgggcagaggcgcccctcacctcccggacggggtggctggtcgggcagggggctgacccccccacctccctcccggacggggcggctggcctggcgggggctgacccccacctccctcccggacggggtggctgccgggcggagacgctcctcacttcccagacggggtggctgccggacggaggggctcctcacttctcagacggggcggctgccaggcagagggtctcctcacttctcagacggggcggccgggcagagacgctcctcacctcccagacagggtcgcggccaggcagaggcgctcctcacatcccagacggggcggcggggcagaggcgctccccacatcccagactatgggcggccgggcagagacgctcctcacttcctagatgggatggcagcggggaagaggtgctcctcacctcctagatgggatggcggccaggcagagacgctcctcacttcccagacggtgtggcggccgggcagaggctgcaatctcagctctttgggaggccaaggcaggcggctgggaggtggttgtagctagccsagatcacgccactgcactccagcctgggcaccattgagcactgagtgaaccagactccgtctgcaatcccggcacctcgggaggccgaggctggcggatcactcgcggttaggagctggagaccagcccggccaacacagcgaaacccgtctccaccaaaaaaatacgaaaaccagtcaggcgtggcggcgcgcgcctgcaattgcaggcagtcggcaggctgaggcaggagaatcaggcagggaggttgcagtgagccgagatggcagcagtacagtccagctttggctcggcatcagagggagaccgtggaaagagagggagagggagaccgtggggagggggagtgggagaggtagagggagagggagagggagagctacctaaggtgttttctgatctttagtgaccaaatctctgtccttaaggtgcccaaattgctgtctgctctctgtccagaagaaccaccagtccattcgtcagcccagattgtcagcaaacacctggtaagtgctagtgtggccaggacgggcatgagatgttctttgggagcatcgagacttgtttttgagaagccggattgaggcctttaagtcctgaacctcatcagccccagggaaatcacagtgggttctgagaataaaatctcactcaacaagactgcctgggcaagtaatgaccttgtaaggaagggtccattatagtgttgggactcagacacaggagctctcaatctcagcctgaaagactctagtcatgggtaaatgtgggactacctatgattctcataagctctctggcttgggactcccttggatctgtaaccaatccaggtagaggctcacctgaggttttatctggtatgggtcctacagattcctgagccaagttttcttcaggagtcagtcccaattttctttttctttttttttgagacagagtctcactctgttgcccaggctggagtgcagtggcacaatctgtcccccttctaactctgatttgagcacactctttaagagagcacatctgtatacacaagtgcatgagtgtgtatatgtgtctgttgttttattttgttttcttggcaagrgaggagggcccatgcttcaaataggtttgagttggtctcagaggtgttgtatgaccttgtggccctgagaaatactgatcatggtccctcttgctgaagtgtctctatggaaagatcccattagatcccagcttgagggatctggagggtggtttgcagttggttgagatgggtggacagagttttatattttgccttttacaggttggagttgacagcctcattgggccagagacacagattggagagaagtcatccattaagcgctcagtcattggctcatcctgtctcataaaagatagagtgactattaccaattgccttctcatgaactcagtcactgtggaggaagggtatgtttccccctgtacccacttgaggcaaagataatggaaaaatgccttcaaaattctgaaggaargttaattttaacctaaaattgtatacccaggcaaagtgctaatcaagagggcaatagaataaaaacattttcagatatcaaaagtctcaaaaactttactaggaaatttattcctctaaaatggaaaataaaccaaacagagaaagatcagaaacaagagattcaactcagaaaaagggcaaaaagaatccatgggataacagtgaacagagataagaatgacagctctaaatggggcataaagggattagttaatccaaactggaacaaaaccaaagaatccaggaaagatttattcagcaagatgcaactgataaaataccagatacatacaaacatttgaaagtcgatttaggcaactggctaaaagtttgaagttgaatcggggataacatagaaaaaacaacactatttaacaaaaacaagactgttattaactctgggaaaatgaagaagttgtacaagttgaatatccctaatccaaaaacccaaaatcaaatgctccaaaatccgaaacttttgagcaccaacttgacactcaaaggaaattctcactggaacatttgagagttcagatttttgggttagggatgctgaaacggtaagtataatgcaaatattcaaaaaaattttaaaaaatccaaaatctaaaacacttctggcccggcacagtggctcatgcctgtaatcccagcattttgggaggctgaggcaggtgcatcacctgaggtcaggagttcgagattagcctggccaacatggtgtaaccccatctctactaaaaatacaaaaaaaaaaaaaattagccaggtgtggtggtgtgcacctgtagtcccagctactcaggaggctgaggcaggagaatggcttgaacccaggaggcagaggttgcagtgagctgagatcgcaccactgcactccagcctgggtgacagagcaagactctgtctcaaaaaaawaaataaataaataaaaaataaaacacttctggtcccaagtatttcagataagggatacataacctgtataagaaatgaaaagaccatagtttgctatggatcagctacaaaatagaatttacatagtcataataaacctgactactggccaaagttatgctataactctattgaaaggatgaaagatggaaagggaaatgggggtaagggagaaaggagagctaaattctcatttttcactgtagaaagccaattgataatgcctaaagctgaaaaataaagaactagtaatacaattatgttaatacctagaggcatggaagtaataccaaattactcagcagaaagaattaaaagagttgcctctgggaagagggaaatgaggaataggggttgcaggggactgctgattttcataacaaaatcttcagaagtatttgctttaaactactaatatcagttggccaaaaatatccagagttttgtggtacgctgctaccagtggtatgctgataaattgttgacaaccagccctccaaaggaaaaaataagcgacataattcgaaacatttgctaatttctgtggtgtaaattattccactatagccaatgatatcacctaacgctgagttgagaagagatgctaataattgcctctcccaagctaaaacaagccagcgtcagcacaccactaatagagacccctctcaagcatttcactgatttatcagatactaacagacccactctctgattaagattgtgctaggcagtgaaagaaacaaaacgacataagtcttaatctcttccctcaaggaatttatactatgtgcagtaagaagtgataggtgctatggtagagatctgtaaggtcagaagggaggaaagggtcaggaaaggcttaaggaaatgacccttgagctgaatcttggaaaatgagtagagccacctgagctggagaaaggagtggttttgggggtagtgtttttttgttttttttcaagacagggtttccctctgttgcccaggctggagtacagtggcatgatcatagctcactacaacctcaaactcctgagctccaacagtcctcctgcctcagcttctcaggtagctaggactacaggcgcacaccaccaggcccagctaatttttttaaaaaattttatagagatggggattttactgtgttgcccaggctggtcttgaactcctggcctcaagcagtcctcccacctcagcctcccaaagtgctgggattacaggcatgagccactgcacctggccagaggtattctagatacataaaaagtgaagtggccagccacattggctcatatccatagtcccggcactttggaaggtcgaggtgggcagattacttgagcccaggagtttgagaccagcctgggcaacatgacgaaaccacatctctacaaaaactacaaaaattagcctggagtggtggcatacatcagtagtctcagctactcagaaggctgagatgggaggaccgactgagtctggtatgtcaaggctgcagtgagccaagattgtgctactacactgcagcctgggtaacagagtgagagcctgccttaaaatacatacatatacaagaattagttgagcatggtggtgtgcacctgtaacccctgaggtgggaggatcaactgagcccaggaagtggaggttgcagcaagcaatgatcatgccactgcactccagcctaggtgacagagtgagaccctatctcaaaaaaaaaaaaaaaaaaaaagattgtgaagtatgaaagagcatatcttattccagaaacatctccctattttgatcttagctcaaatgtcacctcttcagaggaaccttccccaactaccctattggaaataatctgtcccactaaccaccatcacatcaacctgtttcatttccctcataacaccatcactatttagtcttatctttacttgtctctcacaagtaaaacattagtttcagaatgtaagtgccttatctctcttgttcacttttatatcctgagggcctacaggaactcaataaatatttgttatatgaaagaatgacaaacaattcaccatgaccagaatataaatcagagagggatggatacaagagacaaggctatacatgcagatggacaagggccaagtaatggattgttccctgaggcgtttgataggtaatggtaatttaagagcttaaagcaaaagagcagcatgattaaattagcatttcaggaagattatttgggctacattaggaaggttggcctgaacagggtaaacatggaggcaggaaggccattgaaataattctggtaaaatagaagaggtcctaaactaaggcaataaatagcagtagagatggagaagacagacaataaggtgattaaaaactataaaacatgtgtctgcctagatatatgaggtcaaagagaaattaaggaaaaaaacagatttgttgcttgagcaatgagatttctggtgtgctattcaagatagaaattagtagaggaagagcaagattggcaggctgggagatgggaagagtataaattccatctgggacaagttgaatgcatggtgacgtacaggaggccttgatctacagggctggagcttaggaaagaagctgtgcttgaagtacgaatttggaagtggcaggcacagaagtggtaactgaaggctgggtgtggtggctcatgcctgtagtcccagcactttgggaggctgaggtgggcagatgagcccaggagttcgagaccagcctgggcaacatggcgaaaccccatctctaccaaaaatacaaaaattagctgggcgtggtggcacacacctgtaataccagctactcgggaggctaaggcaggaaggtcacttgaaccctggaggcagaggttgcagtgagccaagattgcaccactgcactccagcctgggtgacagagtgagactctttctcaaaaaaaaaaaaaacctgagaactgataactgaagccttgggagtagagtagatgaaatcacccaaggagagtgtgtgacatgaaaagaaaagaaaccaaacaaaaccttggggattgggaactaacagcaagcaattttagacataagaaaaggaatctaaggagactgacaaggaatgagcaagaaggggacatgtggggtaagggagaggagagttgacaggtgaagcccaggtttccagttacggaaagagtggatggtggtgcactcactgagatgaggaaggagggacagatttgtgggagacaaggtctgtgtagggcacaagaggtaggaagtgcctgtagggcatcaagtatgtggagatgtctggtattcagtttgtggttagagcttaggaaaagaggtcagacccagagataaagtctttgtctctttcccaaatcattcgtgtgatattctctctctctctctctctctctctctctcttttttgagacggggtctctctttgtcccctgggctggagtgcagtgatgttatcatggctcaccgcagcctcaacaccctgggcttaggtgatccgctcacctcagcctcctgagtagctgggaccacaggcatgtgccactatatttttagtagagacgaggtctcactatgttacccaggcttgaattcctgagtgcctcctaaagtgctgagattacaggcatgagccactacaccaccatattgtggtgttctccaacttatttttcctgtcttcatcattcttcgtcttctatatttacccttcccccattgttcttatgaattagaacatgagctttgagtcagactgccaaactgaatcctaggtctgtcactttaattagtctcttaaagaattggccaaattagccaggcgtggtggctcgcgcctatagtcccagatattcaggaggctgaggcagaagaatcgcttgaacccggcaggcagagattgcagtgagctgaaatcacaccactgcactccagcctgggtgacagagcgagactccatctcaaaaaaaaaaaaaaaaaaaaaaaaaggccttacctctttgtgcctgattttctcattataaaatgggggtaaaactgaactaccttgtaggtttattgggagtactaaattagttagtaaatataaagcttttttttttttccgagatagtctcactctgtcaccaaggctggagtgcaatggcgtgatctcagctcgctgcaacctccgcctcccaagttcaagcgattctcctgcctcaaactcccgagtagttgggattataggtgcgcacccccacaccctggtagtttttgtgtttttagtagagacagggtttcaccatgttggccaggttagttacgaactcctgacctcaagtgatctgcctgtctcagcctcccaaagtgctgggattacaggcatgagccaccatgcccggccatataaagcatttaggatagttagttgctatttttatttatttattattgttgttgttattatattactactttatcccatttcacaaggatggcatgttgccaacattgtctttctaaagaatatctctgatcacatccttgttctattaaaaaccttttgaaagctccctcttacctttagaagaaattggaacttcatgattcctcatggtctggctccagcactgagtctggaatgctagtgtgagatgaggccttagaagtcatccagctgaactcctgaatttttatagatgaataaatgtagcattccagacatttttcttgttgcacccctgctacgccatgtcctcttccagactcctggataagactgacagacatcaccattctcttaaaccagaactacacttgccttcatccatttgatcacctggttccaggtaactcatgagctttgtagcttcccttctctcagaccttccaaggaagacaatggcataattttccccatatgctctaattagcaacctttccctgcccttctgtgggtgggcagggccggacacagtgggtcacacctgcaacctgtaatcccagcactttgggaggctgaggtgggcagattgcctgagctcaggagttcaagacagtctgggtaacatggcaaaatcctgtctcaaaaaaaaaaaaaaaatccagtgttagtgtcctaattgatatgaagagacttggcgaggaaaccatggctccctaagacactacagctttctttttttttttttttttttttttgagacggagtctcattctgtcacccaggttggagtacagtggcgcaatctcagctcactgcaagctccgcctcccgggttcacaccattctcctgcctcagcctcctgagtagctgggactacaggtgcccgccaccacgcccagctaattttttgtatttttagtagagacggggtttcaccatattagccaggatggtctcgatttcctgatcttgtgatccgctcgcctcggcctcccaaagtactgggattacaggcttgagccattgcgcccggccaacactacagctttctatgtgagaaaagaagttcagagaaaaggcctagcatatctcatagtcatttgccgtcttggaggagacaagttttcattctgtcacccaggctagagtgcagtggcgcaatcatgacttactgcagcctcaacctcctgggctcaagtgattttcccacttcagcctcccaagtagctgggactatgggcgtgtgccactacacggcaaatttttttttttttttttttttttagagacagaatctctgtgttgcctaggctggctacttctttttttwaaaataaaaaagttgaggtaaagctatagacagcccacacaaggctaatgactgggaaggccattagcaattacccaatcctgcgaatgagttcctgctgataagatcagacatcctacatcccatatgaactttttcccattattttggggtcacttaattttaattacttacggcaaacctgggaaaggtaattaaattgcagtcaagtgagacttgattaccctgctgctattatgtcttggctaagtggcagggtaggagcataaaattgttcagaagggagtttctcatattcgttatgtgcttgtctctgccagcagtggtgggctgctgaggcttgaaagcttgctgaggctttctggacacctgcccaaggtcttcagggcttgagggatgctaataggaccaccttggagaaggtgtaggcgagactattcagagaaagctcctgcccatctttctcatgttctggcattttatatgacagctgatgctcaggaatccacaatgtagtaaacacttcattgtcaaagcttgagtgtcagccctgtattctgcatgtttggtcccctggtcccaagcaacctctcctgcatttccccctaatccaaggcacatgacccaagcagcagtctagagtagcatctkcasatgctgacaggctagaaagccaggttctcacctaggttttccatgctttttgcagttagcaagtgtagacctcagagccaggtaagaaattactacttctcatcattaccctgagtgtacccttcacctgcactcaactgactgactgccctgcccactgggttccttacattcctacttccctttatttctaacattcactctgcctgaattgcctctctttggagctctttcctgtaaaaatcctacccatcttgcaagatccaatgcatattccaactcttccatgcagctttcttaagatgtcatagccggccaggcatggtggcttacgcctgtaatcccaacactttgggaggccaaggcgggccaatcacctgaggtcaggagtttgagaccatcctggccaacatggtgaaaccccgtctctactaaaaatacaaaaattagctgggcgtggtggtgtgtgcctgtaattctagctactcaggaggctgaggcaggagaatcgcttaaaccggggaggcagaggttgcagtgagccgaggttgcactattggactccggactggatgacagagcgagactccatctaaaaaaaaaaaaaaattgtcatagccataaactattttccccacctctgtgctccctatgcacccataacactttattcatgctcacatggtactgtggcacttactgcatctttcttccctcttcaactagactataaatgccttcaatatagttttgtttgtttttttttttttgagacagaatctcattctgtcaccccggctggagtgcaatggcacaatctcagctaactgcaacctccacctgccaggtttaagcagttctccagcctcagcctcccgagtagctgggactacgggcacgtgctaccatgcccagctaattgtttgtatttttagtagagatggggtttctccatgctggccaggctggtctcaaattcctgacctcattagccgcccacctccagcctcccaaagtgctgagattacaggcgtgagccaccatgcctggctaaatatagaaatatttttatatgtctttatatccyctaacttcttaatactgcactttttacgtagtagatatcttataagcatttactaaatgaaaaatggagatctctgatttaacccctctactataactggctaaatatctgttaagagatccctctctgcttctagaaaaaaatattgtacatgattatagagagggagaaaaaaataaataaataaaaattttaaaagttggtaccaatgatggccaggctcagtggctcatgcctgtaatctcagcattttgggaagctgaggcgggtagatcacctgagtcaggagttcgagaccagcctgaccaacatggagaaaccccatacaaaattactcgggcgtggtggcgcatgcctgtaatcccagctacttggttggctgaggcaggagaatcacttgaaccccggaaggtggaggttgcagtgagcccagttcgcgccattgcactccagcctgagcaacaagagcaaaactccatcttggaaaaaaaaaaaaagttggtaccaatgttacaaatacagaagaaaatttgtggatgagtgcttcattccttaaagctcaccaaattgaaaaaacaaaaccacagaaggaagctttatctataataaaatgaaataacctactcatacctatgcacagactacagaatatctgccagatacagtgaaatttagattaaatccaaagagaacaccaagattcaacataaagagaagaaggaatgggaacatgggtgaaccaaagaaaagacatcaaacatccttttttcaaaataccaaggcatgcagaactgaaagaaaaacatcaggccacatagaagggagaaaatcaggctggcttcacacatttctttttttttttttaagatggagtctcgctctgttgcccaggctggagtgcagtgacaatttcagctcactgcaacctccacctcccaggttcaagcaattctcctgcctcagcctcccaagtagctgggattataggcgtgcgccaccacacccagctaatttttgtatttttagtagagacagggtttcaccatgttggatcaggctggtcttgaactcttgacctcaagtgatccccctgccttggcctcccaaagtgctgggattacaggtgtaagccgccacgcccagcctggcttcagacttttctatgataacatttcaggccagaagacagtgaaacaacatttagagaatttagaagggaaacatttgtgacctaagaatcttataacctcccatatttcatccctacaaggaaagaaaacacaaaagaatcctatagccagttatggttgctatgtaaaagcatcagaagtattccagggctcaggacctgtgtcacccatgaaccctctggaaaactctacctgaagacataatatagccaaggaagaaatgaaaatggatagtttaaggtataaaagtgaatcctcttaaatataagtccaattagaggtaattagagttgcagaaaagtacataattgttaaaagaattctttttggaggcagagtctcgctgtgtcacccaggctggagtgcagtggcatgatcttggctcattgcaacctctgcctcctgggttcaagctatcctcccacctcagccttccgagtagctgggactacaggcacacaccatcacgccaggctaatttttgtatttttagtagacggggtttgctatgttggccaggctggtcttgaactcctgaccacaggtgatccacccgcctcagcctcccaaaatgctgggattacaggcatgagccaccgagcccagcacttctgtcatactcttaaaaacaccaaattatgacactttgggaagatcccctggattaaaggggctcctaatggcttttggttcattccctacctttgaaccatttgcactaaacccatcttagatgaagaattctgcagcttaactctttaaggctgttacatctttgctttgatttcccctaaactccctagcctctgcttagggaatacaaggacttagatttcttaggagggagccatttctcaccacaaaatcttatatagtgaaggggggcatacagaactaaaaggaggaaattttcagcctgctcactggagtcagtaccttttaatctagaggacccaagagcaagagtgaccagaaacagggaaaaggtaagatcatttcttcaagtattatatatatcattacctgaattaacctggataaatcacaaatatgatgttgaagaggggaaagcaagttgcagaaggatacacagaacggtaacatgtatgtacaattctaaaacattaaaaatattgtatgtttaataaatgtagtaaaaatacttaggaacaagaaacaccacagtccaataatggataccctggtggaagaaggaaggaaatgggatgaaagaaagatgcttagcaagttggattgtttgtttctcaagctgtttggtggatacacaggcgttctttatattattctctaggtttttttctatacttaaaatatttcattaaaaataatacatggttgccagatgcagtggctcacacatgtaatcccaacactttgaaggctgagacagaaggatcacttgaggccaggagtttgagaccagcctgggcaacatagcaaaattccatctctaccaaaaagaattgttttaaattataaataataaaaaataacttttaataaaaataacacatgattctttctctagagagatacttggaccagcttagaagggcttaggttaggaggctcccagtacctagagagattatgggtgactcagccataatctttcggccaaagtgttgagttggcctagagcagaccttagtcacatgcctagaaaagctacacatatcttcagtttcattctcttttcttcccccagggtcatgagtagtttagaaagcctgtcaactcatcaaaaaagaaaagaacctccccatcctcagttactgagaagtttcatggctctttgccgaatattctctaagtcaatatctgaagcaggagcccgtgatacagtggagtgtcactttaggcctgtgcacattgcctaacatctgtgagtctcaattttctctgtaaaaattggaataaataccaccatccctgcaagtttgctgaaaggattcagttataaaatgagtgtaggctgggtgcagtggctcacgcctgtaatcccaacactttgggaggctgaggcgggtagatcatgaggtcaggcattcgagaccagcctggtcaacataatgaaaccccatctctactaaaaatacaaaaaattagccgggcatgatggcagatgcctgtaattccagctacttgggaggctgaggcaggagacagtgagccgagatcgcgccactgcactccagtccgggcgacagtgtgagactccatctcaaaaaataataataataaatgagtgtaaagtgctttatataatgactgagatgtattagacattagatatatgtgagttccctttcctcccttgaaataactgaaagaagtcctacctaaagccagaagaggagcaagaatttggaggcactcttgcttctcagttagccttcttcctcaggtgatatgccacaacatagtatagtgtggtgtgcctggccaagcagtgatcttactgtagtactctgtttttctcatggcctcctttccactgaaacgttacagttttcagagtaattttgcaaagcctgcctctgtgcttgaaatttgaacctaccaaggagaaatgaggaccaagtctccattagtcttagccatcactgagcagcgtcttagagaacacagctagacattagcacagcggagtgcttcgtgccaacctgagagttaaaactaggatgcagaagctgtaattctagtctggaacaagctcttttgttggactataggaactcacctcttctctctccttaggcactaaacagaaaagacagagtccttgctgccaattggcaacctagagagggtttgtttgataaggtcctatctttccattccctgtagcatgaacagatacactcccagtaaagtccttgatcctggagtttcttcttggatggggaaaagctgtgttgggttgaaatttttccaaagtacctcagccttgctattggaggtgatttgggctgcacaataatactggggaacaattgaggatacaaatggtcagaaaagagcttcacaaccagtaagctgttttcaggtattcatctcaaagccttccacagatccacttaccaggagcctcaggagagcccacagctttccatccgtcaccccactttccctatcatatccgcaggctccacagcagtggtttatgtgtctcagaaagagctacacatcaactggatgagacagacaatgtgggaggttcctgaagaccccaatcagatccactaagcctaaggaaaaccaggctgtttattgctatggaaatctgacctcagttattcttgtctcttycttccagaaatctctcccacttatatcccagattccaaaatagacatttaattgtctctaattatggctgcttgagttcctgttggctgtttcttgtctgctgactatgtttacctcttgcctagcttcagagcatacattctttggctcttacgactgagtaggaagcatacccctactaccaccttggaaaaagaaataagacttttccattataaactagtagccaactgaaaggcagctctgtcccaggagcctctgtatctaaagctttctatacttccctattaccccttttggaggaatttcccccaaaaagcaggaaccaccctaactgaccctaactgcttactggactgctttgcaagttaggcaagttggaaagttatggaagctctcttaaaagcccacccactgagtgtatcccaagtctgccaaagggcaaactagtgctgtctctgcccatctctagcctacaccacagaggtgctgtggttttggccttttgctactttccaaaaggctttaacctcctaggagaacagagataaagaagactctgaaatgccttaaagtgctagtatttctttttgcattttactaagttttggcatttgggaagaatcttttttaatggtctgtgtatcagtgtttttagtccttggaatgtcctctttcccaccccctcatgcctcttgggttgggaatttttccttagttttgttttgttaaaagggtgcttacaccctctctatcctcctccttctcccttccagctgcccattttttctcttcccatttctgactcgggtactgaatatccccttgttaggaaagagcttcttccactgagccatatcagctcagaataaggcagttctaggtctcttctagtcttttcttaatttctttgtattgcattatgattaaattatggattctgaagtcaggcagacctagatttaaatctgttactagcagttatatggttttgagtgaatggtttaacttctctaaatctgttacctcatctgcaaaatgtggttgctcttttttagtgcatcagagataaaaatagtactcccagaatcatctaggaggggtttgcttctagttaaatacatttagctcctatccgagacctaccaaaataattgatggggggccaggacactgagggtggcattatttgtcattgtttacactactcaggtgattttcagatgaaattactagatttgttagccaggcatgatggcgcatgcctatagtctcagctacttggggggctgaagcaggaggatcacttgagccccagagatggaggctgcagtgagtcaagatcacgccactgcactccagcctgggtgacaaagtgagaccttgtctcaaaaaaaagaaattactagatttgtggccaggagcggtggtcatgcctgtaatcccaacactttgggaggctgaggcaggcagaggtttacttgaggcagatcacgccaccgcactccagtctgggggacagagcaagactccatctcaaaaaaaaaaaagaaggctggatcacctgaggtcaggagttggagaccagcctggccaacatgacgaaaccctgcctctactaaaaatacaaaaaatgagccaggtgtggtggcaggcacctgtaatcccagctacttggggggctgaggcaggagaattgcttgaacccgggagacagaggttgcagtgaactgagatcacgccattgcactccagcctgagtgacagagcgagactctttgtaaaagtcagtcctataatgtacagagagtatttatttagcacaatacctggcatagagtagatgtacaataaaggttagtcataaatttcttttttcttttcttttctttttttttggagatagagttttgctcttgtcgcccaggctagagtgcaatggtgcaatcttggctcactgcaacctccgcctcccaggttcaattgattctcctgcctcagcctgctgagtagctgggatcacaggtgcgcaccgccatgcttggctaatttttatatttttaatagaggcggggtttcaccatgttggccatggctggcctcaaactcctgacctcaggtgatccacctgccttggcctcccaaagtaccaggattacaggcatgagccaccgcacccagccaggttagtcgtaattttcaaaaggacatttcctccaacctggcagtctttaagagccaagaagatgctccgtttatgacaagatctccctctattgcccaggctagagtgcggtggtgcgatcacagttcactgcagcctctacctcctttgcttaagcgatcctcctacctcagcctcctgaataactggtactacaggcatgcaccaccatgcacagctagcttttttattttgtgtagagataaagagtctcacaatgctgcccaagctggtcttaaactcctgggcccaagtgatccttccacctcggcctcccaaagtgctggtattacaggggtgagccaccacacgtggcctaggagaatgctttttaaatacatttaaatgctgtgagcaagtggcgctgctcttggtgtatgctttagggtctggagtagtcttttatgtggaatggagttggcttttaaaaaatcctttttagccaggcatagtgatggacacctgtagtcccagagacttgggaggctgaagcaggagaattgcttgagctcaaatttgaagccagcctgggcaacataatgataccttatctctgaaaaaattgtttaggccaggtgcggtggctcactcctgtagtcccagcacattgggaagccaaggcgggtggatcacttgaggccaggagttcaagaccatcctggccaacatggtgaaaccctatctgtactaaaawtacaaaaattagccaggtgtagtggctctgtagtcccagctacttgggaggctgaggcaggagaattgcttgaacccaggaggtggaggctgtagtgagccaagatcgtgccactacactccagcctgggtaatccgagaccctatctcaaagaaaaaaaaatttttttgaatgagtatggctttgcttaaccagagtctgtggtgagagtgtggggagcccattgtttccagagttgatgtcctaggaggatttgtgatttctgagcctcaaatgaaatttggtatatattcccagatgagaagcagcagtgatgggtcagcctaaggaccagccccagaccaaagaacagattggatggaatttagacctctaggttctgggatcctaaaraactgaagtaattagccagacatggtggtgtkcacctgtagtcccagctacaggttraggtggraggatcacttgaacccaggagttttaraggctgcagtgagctatgatcacaccactgcactccagccccagggccacagtgagaccctgtctcaaaaaaaaaaaaaaaamaaggaactgaagtgaagtcagaatatcttcttttcaggccttagagaaagatcgttatgagcatagtcccaaatctggatttctctgaagccaggtcctcccttggcttaccattctgtcttccactgataacttgaggcaygtagccattaactggactgcccagctgttcctggcctagggaggagccagaacccccaaccaatagtaatgaggatggtgatgcragccttgggtcctccctaacttggctactgtgttacagaagcaatatccaaggcagtgtcatctgcaacaatgctgtgatcgagaagggtgcagacatcaaggactgcttgattggaagtggccagaggattgaagccaaaggtaaaccagattacaatcacagattccatttttacttctcacaccagcactgataatgccaaaggctggtgaggatgtgggaaacaagcacatacgtacactgcgggcgagaacataaattgataaagccatctttggagagcagttgacatcactgtcaatttttttttttttttcggagtttcactcttgttgcccaggctggtgtgcaatggtgcaatctcagctcactgaaacctccgcctcccgggttcaagcgattcttctgcctcagtctcctgagtcgctggaattacaggcatgtgccaccacgcccagctaattttttgtatttttagtagagatggcgtttctccatgttggtcaggctggttgcgaactcccgacctcaggagaactgcccacctcagcctcccaaagtgctgggattacaggcgtaagccaccgcacctggcatcactgtcaaatttttttactttgacttaacagtttcatttctagaaattaatcttatagataagcttatacatgtatgcacccttaatctcaaaaccttgaaaacataycaatagatctaatggcccaggttggcaccaatactgtacagtgattcttgaagcctaggcacagtggttcatgccaataatcccaacactttgggaggctgaaatgtgaggatygcttgagcctagacaacatagcaggaacccatctctacaaaaaaattaaaaattagccaggcacagtggcacacacgtgttgtcccagctactcaagaggctgaggcaggaggattgcttgagcctgagaggtcaaggctgcagtgagctgagatcgcaccactgcactctagcctgggtgacagagggagaccctgtcttaaaaataataataaaaattaaaatgactgattgcttttggtattattcctaaacctaaaataaggtggggaggggagttgctgaaggaattaaccccaccaactctgtagacgccacatcatttccttcttcagtttcttcccccttcccttttttaaagtcatatgccttccttttgggctttagaatcaaacagacctcagttcacatctcaactcaacttagtggctgtgcaccaagtgaaatttttaatcattaagccctcagattttccttttttttttttttttttttaattttaattttttgagacagagtcttgctctgtcgcctaggctggagtacagtagtgctatctcagctcactgcagcctcctcctcctggatccaggtggttcttgtgcytcagcctcccgggcagctgagactacaggggcacaccaccacccttggctaatttttgtgtttttagtagagacagggttttgcaatgtcacccaggctggtcttgaactcctggcctcaagcaagccacccacctcactttcccaaagtgctgagattacaggtatgagccactgcgcccagccccagattttcttaattagacaattgggacaataatagctaccttggagaattgtgagaattacatataattaaatgacaggtrtatgcactactccttgagtgtaccaaaagacttagaattcctcatacataccgtgccattatacctctccatgcttttacatgtgctctctctagatttcctctcttgaagactccgaccaagtgttttctcctttgtagaaccttctctgcctcttcccatgactccccatagcagaactacacattccttccactgtgtccttgagctttgccacacctttattaaagtatgtttcacaagccatggcaattatccrtgaatcagccttccctactaagatcctcaaggtcagctgggcatgatggctcacacctgtaatcctagcactttgggaggccraagtgggcggatcacctgaggtcaggagttcgaaaccagcctgaccaacatggtgaaaccccgtctctactaaaaatacaaaaaatagccaagtgtggtagtgcatgcctgtaatcccagctacctgggaggttgaggcaggagaattgctggaacccaggaggcggaggctgcagtgagctgagactgcaccactacactccagtctgggtgacagagcaagactccatctcaaaaaaaaaaaaaagatcctcaaggtcgattgtctcataactatatgcatccctagctctcagaacaggtcctgatttatggtaaatgctcagaaggggaaaagagtgaatgaatgaatgttggatccatgaaacatattttgggggatttcagggtataaagttagggttccaagaaagrcctctgtgcgatggttgcaatcatcatgagatgggcttcataaactcctgggctttctggctttaattaacactatgtgtccaccttttagcaaggagaccctttaatggtcctgctgaaggagggctggccagggaagtcatcttgtctgggctctaaactggacaaccccaccacttccttctctctgtcctctgctggaaggaccagtgcatccagcacagtggtcagtgccctcctgccacaggaactccctggccagttgcctttttccactattacttcttcttttttttttttttttgagactgagccgtatggtgaaagcaaactcctaaccatcagtgcagcactcaagacttgttactataggtgacctaggcaaacaccaacaactcacatccttaccagcaaagagctcaatagatggcaaagtcttccgtcagtcttcctcacatgaaggggtttcaggaaaaaacattcatcctaagaaataatgcagtctcagccggatgcggtggctcatgcctgtaatcccagcactttgggaggctgaggcgggtggatccctgtggtcaagagttcgagaccagcctgaccaacatggagaaaccccatctctactaaaaatacaaaaaattagccgggcgtggtagtgcatgcctgtaatcccagctacttggaaggctgaggcagaagaattgcctgaacctggaaggcagaggttgtggtgagctgakatcacgccatcacactccatcttgggcaacaagagcgaaactccatctcaaaaaaaaaaaaaaagacataatgcagtctcctctccaaattctaatcattttcatgctccagagtcaccacatccatagcagtctttttccccaaaagtatggctcgtaactcagtgtaggcctccctaccctcttctagcaccaacacgaaaacaagccattttataacaactctgacttttctcaccccatcccaatactctcattggttatctctggcaaaaatactggcagccaaatttgaccttctcaagcagtagaatggctacagctaacagtcaaaacctaaaaaatggctgggtacagaggctgtagctcacgcctgtaatcccagcactttgggagaccaaggcgagtggatcacttgaggtcaagagttcgagaccagcccagccaacatggtgaaacctcatctctactaaaaatacaaaaattagctgtgtgtgatggcacacacctgtaatcccagctacttgggaggctgaggcaggagaatcacttgaacctgggaggcggaggttgcagtgagcagagatcataccactgcactccagcctgggcaacagagcaagactccattcagaaaaaaaaaaaacaaaaaaaaaaaacactaactgctaaaagcatgcttcatctgagtctcttcttacagtcagtgacagaacttggatctcttccctatggccagagtgatcagttctttgaccatgaaagtagacctggtataggtcaggctgttgatgtatacttgacacaggtcaaatcctcctggccagcaggaagctttcccagtttcccaacagtgcaccttttatttgtgatgtttttcccttctatcccattgctattttcccaacttatcatcctcccttgtatttttccccttgggatctttcccaacctgattccagcccaaagattttccagtgtatttactggaccctactcccatccctgaccaagcatcactagctttgcttagttttttgtttttttgagacagggtcttrctctgtcacccaggctgaagtgtaggtggcacagtcacagctcactgtagccttgacctcccgggctsaagcgacctccctccctggcccctgagtagctgagaccacaggcatatgccaccacatccagctaatatttttatwttttgtagagatggtgtctaactattgcccaggctggtctcaaactcctgggctggggcaatccacccaccttggcctcccgaagtgctggattgcaggagcgagccaccacgcccggcctagttctgcttgttgtgcctctacaggtttcctccaacttactgaatcaccatgaaaatacatcaaccccaacatgccagatatagtctctgttccctggctccccctgccccttccaggctattggctcactgcctcctttctatagttctttttccttgaaagttttctatagctcttcttacctttcaccgcatcattgatcagcttccagggtacttccctacatttattaagagctttagcctrtggttcacagtcttcctctcctctccctcacttstccataacatcttggacaacttaaacatattcatcagtaaactgtccagctctccggcttcatgattccctgaacttctctaccaaccttcatctgcattcagctttagctctccagttatatgaccatatcctatcttagtcattacccaaaacctctaaaatcatcatgtggcagtagctatgctagacactggggatataatcataactacactgttccatctctcctctcaatgttcttggtttgtttttttttttttttttgagacagagtttcactcttgttgcccaggctggagtgtaatgctgcgatctcggctcactgcaacctccacctcttgggttcaagcaattctgctgcctcagcctcccgagtagctgggattacaggcatgcgccaccatgcctggctaattttgtatttttagtagagatggggttccatcatgttggccaggctggtcttgaactcccgacctcaggtgatccacctgctttggcctcccaaactgctgggattagaggcatgagccaccgcgcccagcgccctcaatgttcttatagtgaagtagaggagagtggtataatgatgtaggaatagagatatatattaggtacagtggtttcacaaagcargaaatggacagtgcaaaagggaaggcatcgcatattagaggtgctacgttagggcacatagggtagtaagagtgcaacaggaaaaaatggagggggaagcattctaggcagagggttgtgccaaagttcaaaggtataaaacagggccaagtgcggtggctcacgcctgtaatccagcactttgggaggccaaggcagggcagatcacttgagcccaggagttccagaccagcctggccaacatggtgaaaccccatctctactaaaaatacaaaaaaaaaaaaaaaaaaaattagccatgtgtggcgtcatatgcctgtagtcccagctactggggaggctgaggcgggagaatcacttgaacccaggaggcggaggttgcagtgagccaagattgcgccactgcactccagcctgggtgacaaagcaagactccatctcaaaaaaaaaaaaagggattaaaacagtatggcttactggcaaaatggagaatagtgggaaatgaagctggagaggtaggcaaagatgtcatggagggccttatgggtttgacctttatagaaataataatagccacaacttattgagcattcacttacctttaactcattgaattctcacaacaaccctatgcagtaggtgtcattatttccatattatatatgaggtattgccctttcttatctcygtttatccttttagcctcatttcttacccttatcccctcatttcctattctctggccacaccacagtatttcatggtcccctttctcccatctcactgtctttgcccttgctgttctaacagcctagaatcccttccatcactgcctgtagaaactattcaccctttaagacccagtttcagttctcctatttaaagcctcaccacagccaggtatatagacagttggtcccatcctcctgcataggaaggtgctctctctctcatatccctatttccaagagcttctcaagatcacagccacaatagtagagaaataaatttttgtgaacacagaattagaagcagttgggtttggctgggcgtggtggctcatacctgtaatcccagcactttgggaggctgaggctggcagatcacctgaggttaggagttcgagaccagcctggccaacacggtgaaaccccatctctactaaaaatacaaaarttagccaggcgtggtggcgggcgcctgtaatcccagctactcaggaggctgaggcaggagaatcgcatgaacctgggagatggaggttgcagtaagccragattgtgccactgcactccagcctgggtgacaagagcgaaactcggtctccaaaaaaaaaaagcagttgggtttgaaatgtcatcttgctgccagttctcagaaaacttttttccttttcttttgtagctaaacgagtgaatgaggtgatcgtggggaatgaccagctcatggagatctgagttctgagcaagtcagactccttccttttggcctccaaagccacagatgttggccggcccacctgtttaactctgtatttatttcccaataaagaagggcttccaaaggcatgctggagacttgtggagcagtccaaagctccatgtcaggtgggctccaggtgtacacagtgtatgttcatgtgtcatgtggtaaagatcatctggagcaagtgtgtgggacaggacagatacagtggcctaactcttgtgtgccaagatgtatcggtggggcagcagctgtccaatgtaaagctcctaggaaggctactttctgactggctgacccaacccagtcctgaaagtatccctcacctaaaaggacctgggagtacttcagtcccttatcctaatcagcctttctagacccataggcctagctgctggcagtgccacgcctgagcatcagcccaggactctgctcccatacctaccatacagattcccagccccttcccccacctcacccacagccccaccctccatgctcaccattcactccctctcctcccagcctctagccattttccctagttcaactaatatcccttggagactgaacagaagcaggggcagcccctgcctagccaacaagcctattcccacaggttctagtggagataagaacatgaagagccatggtctgagccaagccagaccccgctgcacctcacctcactgaggtttgcccaacctgggaaggaagagccaggaacctgtatcatggcttgaaattccttctgactctcctccagctgcactcctttatatcctaattctgcagactctcctgcttcagataattgaggaatgaaatttccatactcacagcccttctagaggcctatccaccttccctccaccacccctgctcccaaacacacattcactctgctctctccctgcattgcttttacagcctgcaggtgtttggtggaagataaaagtggttcctggggtgagatttcacctcctagaattatcaaagtaaaggcttctcttgatgtcttcactgtgggtggcagtaattagaaagaattatttgaaatactggtttctgcattgcttcaaaaacctcaaggctctcaagtttacttgagtaatcttgcctatcttagtcatagaacttgtgagagactccgtgagtatttctaccctgggggatctccacctctgtcagccttcttgagagccctggtgctcccactggtcagaacaaggctcctgaaagtttgccctaatcaggcaggagctgaaatggcccggcagaagtggttgaaaccaatagggctgagagggatgtggggataaagagctgtggtggtgcccaacatggtcccctttggaactgaaattaaattggtggggcctagatggtgctggagacagagtcctggcctgggtggaagaaaatctgtcctctgtaatgttgtttggtttgggtcaaatcactctctcctctctgaccttgagtgtttccatctgcaaaatgagaaagttcgactgtttgaatgttaaaggcccttctgtttctcaggttttgtcctctttcccagagctttcttccccttagggtctcccaaggagccagaagattgctccttgagcagagaaaagggttgggagggaaagtgcggtggaggagtaaagggcattgattaaactgtctcagagccctcctatgtaccctttcctgtccttccccatggagcccttagaacccctgacagtgagacagaggaaaaacctctcctgtgccttccctttgcacaagtccatggaacggcctctgcatcaaggaaaggaaggagctggagaaaacaaaaggtaaaagctttcccagaggaaggtgttgttgagtttgagtcccagctgggagcagcccccagctcaggacactgctgctattgtctgacagttccaggactggctgggtgcccaagatgctttgatttttcttctctttgccctgtttgtctgccagaaggcagggacagtttttgttttcttttggtagcagctacagaggggctgagtatgtctgaaacatagtgagcaactgaatgtccactggccggccacctctccatggacagaaatcagaaaagcaaggcaggcagaagagttaatagggtctgccctgcctctcccagtgatgctcaatgagggaagtggaggaagaggagaaaggggacctcgaatgccgaatcagggaggaccctggggatgtgctgaggaacagggttccgggagcttgccgggtcagacaaaacttgacagctgctactccaggaatccatcccccagttacaattcatccttgcctgctggcaagagttccttgagccgagaagactgccactacccaggatgattgcatcaggggccttctgccatggataaatggggagctgctgcattggttcttagcctctctcctttccccatacttgaagtgagggcccataagctcctgtgagcctataagactgccaagattgccctccaagctgttccccaaggccaaaggtcgaacttcttcccagttcttcactactttactattaccatcccacttccatactcagtggagagagggaaattgtgtttagctgtagccccaacaggaatctagggcctgcatggcctagttgagaagttgtttctatttccagagaattgcaggggatacactttctttatccacagctatccctactcctaaggaggtacataaaccaggcctttgtatgcagctttctaaatagttaaatgtgtctgaggaagggggaggcccatggaaaggaccacccagacagaaagtctagaaagctctgctctaatgaagctgacccagagggagagagactgggcaggagaacacattctactggaagccagtatgacctgtccttggcctgagccatctgccactacccaggatgattgcatcggggcctttctgccatggataaatagagagaggctgcatttgttcttagcctgtctccttcccccacacttaaagtgaaggaccattccctaatctctggctgcagccctggcaccaaatacttgataggtacgccaggcgcggtggctcacgcctgtaatccctgcactttgggaggccaaggtgggtggatcacctgaggtcaggagttcaagaccagcctggccaccatgatgaaaccccatccctactaaaaatacaaaaagttagcccgacgtggtggcgggcgcctgtaatcccagctattcaggaggctgaggcaggagaatcgcttgaacccaggaggtgaaggttatagttagccaagatggcaccactgcactccagcctgagcaacaagagcaaaactccatctcaaacaaacaaatacttgataggtgctattggcctcaacctgcccacagggaaggagcatacatacccaggcttggcccctaaatataacaggtggtgatggggctgcccaggacccccacttccctcctccacatctcagggtcattgactctgcttggcctagataacagaagcagccaaaagctggcgagtgagaagcctagaggaatgccagagaaagcaagcctgccttgcctccaccatgaattaactcccacatgaacccacccctgaagccagactggtcactttacccagcactgtgtgtatgtgagtgtgggctgcctcacttttcctggcactgttcctcagccatatgtattatctcatttaatccttatgttaatgtcagagattatgtgacttccctgagatctcacaaccagcaaatgaaagatccagaccatgagccattccttttccttttagattctgtcatcctcccacctctcccatccagttcctttcacttctggaaacatccctgagtacccccaactcagtggtttcccctgtggtctctgtgctccccctcaggctatgaacttctaaaaagcaggtaccctgcaacaccagaacccagcaaaggaatggacacataagagatcccaaggctgggcgcggtggctcatgcctgtaatcccagcactttgggaggccgaggcgggtggattgcctgagctcagagttcaagaccagcctgggcaaaacggtgaaactctgtctctactaaaatacaaaaaaattagccaggcgtggtgtcacgcgcctgtggtcccagctactcgggaggctgagatgggaggatcacttgagcctgggcagtagaggctgcagtgcaccaagatcatgccactgcactgcagcctgggtgacagaatgagaccctgtctcattgaaaaaatttaaaaaaaggagatcccaagacgtttgtttcatgagtcagtaatgagatttaattagattgcttttatcctgttatttggagaatatctctagtttaggcccaaaacacgtacccaggaccagtggaaatgacagtgaaacaagctgttctatcataaaggaggctgcttgcagaaagagaagagaagcctctttatcccttcctattcctggggtctatggctttggctctggctgagcttagctgggctcaggaaaccattttgtttgggagaagacaggtcattttgtagcttggagcagccagacagcactaggccctaggttggaaaggctggaaactgtagacccatttcttccatcctagtctttgaactataaggcaagaggtttccttaatagacagacttggccttggaagcatccatagaaatggtggactttgtcacaattgttagcagtgatgggcctatgatgaaagcagagtcccaaggcccaagtggttacaaatctatttatccatggaccttatgtcttgcagagtctggtaaaaaggaaggagattaagacttacttaaagcatagcatcgggagttgtactcctgatgacaaccagtgctgagtccaggccactccctgtcttcagctattgccccaagagcaaactaggggcccatacagacttaagttagaggctgtttctatttcagagacttgctaggggtacagttctttttaaccttaaattttttatgttatcattattattgttttttgaggcagggtctcactttgtcgcccaggctggagtgcaatggcacaatcacagctcgctgcagcctctatcaactctcctgcctcagcctcccaagtagctgggactacaggtgtgcgccaccacacccagctaattttttattttttgtagagatggggtctcactatgttgccagggcttgaactcctggcctcaagcaatcctcccgcctcagcttcccaaagggctgggattacaagcatgagctaccatgccactttatgctcagcaggacacactctataacagggagaagaaagtgctattcaggtaggctgcttttcatgtgcagttactgtttggccaacagcatcatacatatattagttcctccataggcatttttctgggtgaatggacaaatggaaatggcaaacctgttaggtgttcaccccttcaacctaaatgttcctcttccccaggactgaggctctagagatgatgttaatttgcacaagctttcaaaaaatcagttgagcagtgtgtatcaagagccataaaaatgttcatactctttgacccaaacaacccacttctgggaatctgtcctaaggatattctccaaatgattgattacaaaaactacatagtaacatgaaatatttatgatggaatgattttttttaagtctggaagaactgaccaagaaatttgccagagataatagtagttgtgttagaaaaattagcttattgtagattcattttctctttctcaaactttacatattggaatattgattttaccctactctgccacttgaggtttatcaatcaggaacccaatagaaacagcacactcagataggatagttgaaagtttaatagagggactattgcctctattcttcccaatttccaatcctttacaccctgaattctgcaactcttagtgactcactcaacaattattaagcacctatttattgtctggtgaagaaggcagactttcaagtacataagtttttgtgtcataaatgcaattatacatatataaattgagttgttatgcagagcacaaagaagcaattatctgccaggagagagacatgaatcaaggaaggtttcaaagagggggtaggctgggtacagtggctcacgcctataattccagcactttggaaggcccaggtgggcagatgacctgagcccaggagtttgagaccaacctgggcaacatggcaaaaccctgtctatacaaaattacaaaaattagctaggtgtggtggtgcacacctgtagtcccagccatttgggaggtcgaggtgggaggatcccttg

SEQ ID NO: 96855 - DNA, 25426 bp, Homo sapiens
cccagctactcgggtggctgaggcagaattgcttgaacccaggaggcagaggttgcagtgagccgagattgcgccactgcgctccagcctgcgtgatattcaaactggaagagcagagcgagactgtctcgaaagaaaaacaaaacaaaacagcttgaagcggcagggttacagctctgcgacggcccctgcaggcggggtgtgctgggcagagtgtgctgagagcagcagctcaggacagttctgcagccacatttacacccacttttaatttcatgtagattaaggggcagcccaggcaaaagtttctagggaaggggtagtaacttttgggtcgtggggtcattgccatggaaaggggtagtaactcccaccatgcctggcctgtttactttcacttccagcttgcccttgaattgtttcctgggcaaagccaggaaccctcgaggggctcagccccactgtgggtcttgcctgccctccatcaactagaaggcgacgtagcattgagttaatccaccattactttaaatggcatggataccactcatatagtattgagaaaaggaagtcagatacaaaagagaacatgcaatataattccatttatataaagttcaaaataggcaaagttagtatgagggctagaagagtggtgattttaaacctccgggcctttgtacacgctgttccatctaccaagggtgccctttcctcgcaccatgtaaacgcaaacgtatggatcaagttacctccttgccaggcgcggtggctcagtgtcatcccagcactttgggaagccgaggcaggcagatcatttgaggtcaggagtttgagaccagcctggccaccacggtgaaacctcatctctactaaaaatacaaaaaattagccaagtgtggtggcgggcacctgtgatcccagctactcaggaggccgaggcggagaactgcttgaactgggatgcagaggttgcagtgagctgagatcatgccactgcactccagcctgggcgacagagcgagactccatctcaaaaatgaaaacaaaaaggctttgtggctcacacctataatcccagcactttgggaggccagggcaggcagataacgaggtcaagagattgagaccagcctgtccaacgtggtgaaacactgtctctaccaaaaatacaaaaattagctgggtgtggtggcacgcacctgtagtcccagctactcgggaggctgaggcggaagaatcacttgaggccaggaggcggaggttgcagtgagccgagatcacgccactgcactcctgactgggtgacaaagtaagactccatctcaaaaaaaaaaaaattcgcctcctaacctcactgagttaactgatcaagacctctcatgctctgccgctgcacagctgtccctccagcgccttgtctgtgtgtgtggggggtggctggtgttttgaatatcttccggttcccagaggctagctcagtgtctgacagggccctgtgggagtgtctaattctcacagcatctccgtgcaggagggaaggagagggtcacgcctgggccctgaggcatcttgtatctgaggcccccacatcagcacggatctccagaggcatatactgtcctgccgactggtctgctttctgtctgattgaaattggaggctcaaagccaagaccttctcacttgcagtgaagaacccttatggggcaaagttttcccctcaacctgctctatcatgagctcctcctgctaagtggcagagcttagcccgtgaatcagaggatacgctacatttcaaaccttaggagcagtcctgtcaccaaaattcagctggtcattgtcagtttaactacccactacgtaaccactcacgtatgaacctgcaacagccaccaatcaagttgaattctcaaatatttgctacttcatcctcaatgttttcccatttctttttttttttttttttgagacggagtctagctctgtcgcccaggctggagtgcagtggcgcgatcttggctcactgcaagctccgcctcccgggttcacgccattctcctgcctcagcctcccaagtagctgggactacaggcgcccgccaccacgcccggctaattttttgtatttttagtagagacgcggttttaccgtgttagccaggatggtctcgatctcctgaccttgtgatccgcccgcctcggcctcccaaagtgctgggatgacaggtgtgagccaccgtgccgggccagtgttttcccatttcacgtgctgcgtgtgaaaatccactgcgtgcgacacttgcgctatgtgcactttatgtacacatctcatactttgttaaaaaggcactttcagacaaacatattatttatttatttagagacatggttcactctgtcacccaggctggagtgcagtggtgtggtctctgctcaccgcaacctccaccttctgggttcaagtgattctcctgcctcagcctcccaagtagctgggattacaggtgcaggccaccacgcccagctcatttttttgtattttttttttgagatggagttttgctttttgttgcccaggctggagtgcaatggcgtgatctcggctcaccagaacctctgcctcctgggttcaagcgattcttatgcctcagtctcccgagtagctgggattacaggcatgtgccaccatgcctggctaatttttgtattattagtagagacggggtttctccatgttggtcaggctggtcttgaactcccgaccgcaaatgatctgcctgccttggcctcccaacatgctgggattacaggtgtgagccactgtgcccagccatttttttgtatttttagtagagatggggtttcaccatgttggccaggctagtcttgaactcctgacctcaaatgatccgcctgcctcggcctcccaacgtgctgggattacaggcgtgagccaccgtgcctgacctgagtatatttatagaagtagaacaggcacaggactctccacccaaagtcaccctggtgcctctctccccggggtctgacttaggccttcagcaccacggtgttttctctagatggcatctcatgaacactgggggtctcttgcctcagcctgtccctggattccctttcatggggaatgtaaaagctccctatttaagctaacgtgtaggctggtggggctggatgtgagggaggggcaggtggagaaggaaagggcagcatccctcagatctgtgtggagcaggatcggaaggaaaggcacactcgagtcggccaggacccggggaaatgagcgagaatggtcagctctggggcggtatataaaactgggggtgggaatacttccatatactcccaattccacagtgggtgaactgagtaagtttaaaaataagataaagacataacgaggtgaggcaggtaagttcaaaaataaaaatgaaggccaggcactttgggaggttgaggcgggcgaatcacaaggtcaggagctcgagaccatcctggctaacacgctgaaaccctgtctctattaaaattacaaaaaaaaaaaaaaaaaaaaaattagccgggcgtggtggcaggtgcctgtagtcccagctactcgggaggctgaggcaggagaatggcttgaacctgggaggcggagcttacagtgagccgagatcgcgccactgcactccagcctgggcgacagagcgagactccatctcaataaaataaaataaaaatgaagacatacctttcaggggctgtggccgcactgtccaggagggaggcccggccacagacaccatgctggccgtgcgctcagcacctatacatacctgggcaccttccccacaaggtgtcacaaaagggagcccaacagccattttaaacattttcttcactcttatgagaattgccacgaacaaatctaagagatcatggcaaagaaaagaatgaaatgaaaccagaacatttcagcagcttttgcaaagatgtcaagagaaccagtccaggagtcagactggcggcatccttccagcttcttgtcatgaattctaaacctcacatccagactccaaagcttagagagttaaagaatcagctactggtcaccaagctcacgtgtgcaggatgagggtcacagccaggttggctgccttccagccctgagctttcttgggggtgtgtgtgtgtgtgtgtgaaccaccttctttttgagacggagtttcttttttcttttttgagatggagtttcgctcttgttgcccaggctggagtacagtggcacgatcttggctcactgcaacctctgcctcctgggttcaagtggttctcctgcctcagcctcctgagtagctgggattacaggcatgcaccaccatgcctggctaagtttttgtaattttagtagagatggggtttcatcatcttggccaggctggtcttgaactcctgacctcaggtgatctgcctgccttggcctcccaaagtgttggaattacaggtgtgagccaccgcgcccagccagagtttcatcttgttgcccgaactggagtgcaatggtgtggtctaggctcgctgcaacctctgcttcccgtgttcaagcgattctcctgcctcagcctcccaagtagctggaattacaggtgcccaccaccatgcctggctaatttttgtatttttagtagagatggggtttcaccacgttggccaggctggtcttgaactcctgacctcaggtgatccacccttctcggtctcccaaagtgttggggttacaggtgtgagccaccacgcccggccagaaccaccttctttaaagatgatcaggccgggtgtagtggcttatgccagtaattccagcgatatgggaggctgaagcaggaggatcacttgagcccaattcaagaccaggctgggcaacacagggagacctcttctctacataaaatacaacaattagccaggcgtgctggcgcctgtggtaccagctacttgggaggctgaggcgggaggatcactggagtccgggaggtggaggctgcagcgagctgggatcgcgccactgcagtacagcctaagcagtggagtgagaccctgtctcgaaaacaaatacctaataaaggcagtcagaggagaggtttagcaaattgctaaagaacaaatctgagataccgttagtttccttacttgcaatcttcatctgccaaaatgtcaattctgtgaattgcggactagtcaaaaacttaaagaaaacccacttttgtggaggtggggtcgctttgcgtttcccaggctggtctggaactcggcctgcgcccctcagtgccagggctccaggcgacgctcgggtgtcggcagcagagtggacgcaggagcagctcggaccgcgctcagaacactcgggacgaggccgcggctccgcaggccttgcgggctggggtcccacgaaacaaaggcggcagccagtggccaggacgggcagcgtggttcacggggccgtggctccctcgggggtcgcgagctcggcgcaaacgagcccctctaccaaggtcgcctagagtcgcgaccccgacatgcggagccgccccaggggggtttctcccgggtccctcctgtcccgaggcggccgctttctccgggggccgcgccccgcgccccagcaaggcccgacccgcgcctgcgattccgcccccaaggcgctgccgcaccgggccccggcctcttcctccgaggattctcaggaattgctgagacttgcgtgccagtgcgaggcccacaacacgcacacgcgcccgcgcccgccagaccccgcccccggcaccaagccccgcctactggggagaccacgcccccaagcgagacctccctcaccgagccacgccccaccaggccccgccgctgcgccaagactgtgcttagccgagccccgcccgccgggccccgccccgaccccgagactactcccgccaggccccgcccccgcgccgagccccgcccagtagtccccgcccacgcacctgaccacgcccacgagccggctcgaacacgcccgcgccgctgactggcgggtggggttgtcgacacgttcaacccgttctgctggctcgagaacgaagtaggccgtctcgctctgggtctccaggcccgcgaccgtccgccagtcgtcccgaggtcagtagctccagcggtgcgtcagcgtctagccaggcctcgcccacgccggccttggtcgggcttcttgtagacgcgggcctggcgctattgaggccgttgctgcgcgggcgagtggcgcgctcccgtggcggggcggggtcgggcggggcaggggtccggggctatcgaggcggggccgaggttgcgctgggcagctgcgccgccgggcggacgtggcgcgccttgaggacgtcatcgcggtgcacgctcccctttggggcttgccggaagtccttgcccggggcgcggggctgcgcctgcgtggttcgtcctcacgtggccgtcaagccctctagtgccttagattccagcgagctacgcaagcaatcctggcccagccgagcttgcttccccaaatcccgtaatccttgaccttattcccccaaagaagcggcctcccgggaaggagcgccctggcggagaagactcgaacggctcccacagccgggcgttgggggaaaggtgggcggtcttggtcgtgcgaggtcggggagggagggtcctccgctctccattgcggagcttcgctccgggaccaccgggggaccggacgccgggccgcgaagctgccgcctggggctgcggggaggagagcaacataactggaatggcacttaggggccggtgtmagggttgtcaccggggttggcggaaatgacgaaggggccccaggcacgtcgtgttactgggcgaggttccagccaaggtgcccacgcgccttgggggaaaccagaggacttctgcaccgtttcccgaggacagtttggcagtgtttcagaagggccttagaaccaggcaggcccccttctaggatggtggaaagcctaaagatctgaaaacggtctcaagtgtcgtcttagcgattggctgactaaaccgaatgcaagccggagactgcacacgatgttgccgttaacagttacactgggccgggcagtcagaggcaggcggatcacctgaggtcaggagttcgagaacagcctggccaacatggtgaaaacccgtctctactaaaaatacaaaattagccgggcgtggtggcaggcgcctataatcccagctacttgggaggttgaggtaggagaatggcttgaactcaggaggcggaggttgcggtgagccgagatcgtgccactgcactccagccggctgacaagagcgaaactccttctcaaaaaaaaaaaaaaaaaaaaaaagttacattaggctgggtgcgctggtgcagcctgtaatcccagcactttgggaggccgaggcgggcggatctcttgagcccaggagtttgcgaccaacrtactgagtttggccaaaatagtgagacccccgtctctacaaaagatagaaaaaattagccagttgcggtagtgaacgcttgtagtcccagctacttgggacgctgagggaggaggagcacttgagccctggaagaggaggctgcagtgagctattttctcatccctgctataacgaatttgtcacaggctgttttataggcctggagctcagaagcccgaagtgagttttaggaggttaaaatcaaggtgttggcaagggtagttccttctggagtttcccaaggagaatctgcttcttttcctcttccaacttctagaggccaccttcttccatcttcaaaacctactgtctctgcataagaactctcatgattatatgccggccgcccagacaccccagggtagccttcacatctcaatattcttaatatttgcaaagtcccttttgccacttaaggtaacaccacaggtttggagattaggaggtggacatctttcagggccattcttattttaaaaaatgtactgtcgataagaatagttaaaatgtaaaatatttgaagggatttattctgaatcgaatatgagtgaccgcggccggtgacacagccctcaggggatcctgggaacatgtgcccaaggtggttggggcagtttggttttacatgttttagagagacatgaggcattaatgaaatacatttaagatatccattggtttggtccagaaaggcgggaccaaacaaaaaaaaaaagattttgaacatgcttcccgagctcaggcatgaagaactcttgactgacagaaacggagggtgtgtccaaagttttgaggacggccgagcggcgctccaaaacccgtcctcacagcctcgccccgttcgcctcagctacaacaaatcatcgtcaacstgttccaccttctccagtctggtagcaaaaaggggtgtctcaggtttgctttattttattgtttgggcaattcctggaatccggcctgcttgtgggaggaggcaggggccggtccctcgagggtggtgggagctgccagagctggagggatggtctgggggaaggcggctgtacggtggaaaggctggttggggccagagtgggaaacgggatgcggacgtcaggcttcacccccgacccaggggggagtgggaaagctggggtagtagctgggacgaggcccgggggctgagcccagagggtcgagtgggcgacgactagcgggcgcggcccccagggtggactccccgccagccccggcmtggaggctccgcccgcccccgcctgggcggaaggaacgcggagcggctctggcyttgggtctgsggcggcggcgtcgggtgagcgtcccgggcggagcgggcgcgggcgggggcagagaggcagrggagacccccttcgtgtttttgtgaggtttcctcccasccctttagtctgcagcagggtgtccagaactagcaggttcgagggactcgacgcgggcgcgggcgggggtcccagggaccgggaacttttgcgcgtcgcctgagcgtggcccgtgtctccctagagggtggccccgcgcccccgtcacgtcggaacataaggacctgaattggcctccagacggcccctcccatgtggctccccagggtggggcccaggccttgggtgctgcggagacctccctccgtaaggttgagaaagtctggtctccggataagggaccgttagggcctctgttcagatccctgcctcaaccaaagcaggctgccagctggtggtagtgggttcctgaatgtgcttttagctttggctgtgtagggagccagggacttctccagtcacagagaagggcgtttactcccgcattttcatggggtcctcagtgggatccgtgacccacagagattcagaagggcctttctgggatacaacagggtctggccaagcctgaggggtagggacggggctactcccgcagcgctagttgcagatggtcacgggagcactggccaccctgagctcccaccaagctttcccaggaggaggacaccctggggccacctttcatctgrctgcagaggacacaggagtgtcaggctggatttggggagcgtgtgcaccctgggcagccccctgaggctctccttccacccgccctcccgcccacagtgcctcctgatgactagattctggagtcagaatttgggtgaccacaccctggtcggttttgctcacgtgcttcgggtcggttggattcagttcctccatgtggggccgtgggatgtcaccaccctttgccactgtccttgcaggccgggcgcccaggcgtgtggacccgagcccagccttgcgtctttcctcccagttggtaccaggggcctcttgcctccactcatscagagtggaccagccgcctctgaagcagccccggggagaggagtgccaggcacacagactcaggaagctgggggtgtcagggcaccaggagcctctcaagcggtcctgttggccgtctttctgaagggcagctggggttgcatcatttccccaagtggatcctgccaactttctggggcttctggatgagagccctctccccaccccacccacccctccccgcattgtggcatcagtgctgctgcttccagggagccttcctggccatccaagcctcctctccaggttcctgccctgctgtagtccccaggccagtgcttggcaggtgctcagggaatgtatccaccaaccaaggtttggggtggctgtctctgcctgaccactttccccaggcccctggcgggtacctgagctgtgctctcagggcctcaggaacctccttccatattcagggcctgtgcctggggaggcttcagggtgtagcagctgtgcccatcccaggctgacccacccagcttgcctggtagcccagcctctgggctagtgtgccgtggggcaggggatgtgctgtagcctggtgcagagtccccaaccccagaagggggccatggaagctgacaccccaagtggccgcccccctgctctgtcttgcttcggacactrtggccgggtccaggatcctggcatcctgggaggtctctggctttgtgggcagcctgcctggcccgcacagtctgcctgtcctgagggtgagacacaggtcaagcccacagacccccttgctcccctgctggggcctccaggctcacagaccaccccaccctaccctgtccttgcccaagcaaatgagaggcaggggcttcccgggctgctgctgtcccgccctctgtggggcaggaggaggtgcccacagaggctgggtggtgatagccaggagatgggctggcatctgcattacccaagctctgctgcccatggtggcctttctgggggtgggtgmtggtccctgccccctgccccacccstgatgtctgctccagagacaaaggtggggagggtgctgaagaggaagtgtttgcccagggagaggctgcggctcctcctgaaacatcakccctgtgggtcctgtttgcagaatctccggcctgtgaaactgtgaggggattcrgccaagacgtcctcttccctctgcctcccacccaggccactcttcacctccaccatgagcctggacatccagtgtgaggagctgagygacgctagatgggccgagctcctccctctgctccagcagtgccaagtggtcaggtacgcttgctctcggggtggccttggggtgctggtggggcaggctggygggtggcggctccctctgaagggtgcattgctctggaacgccttgtttgtggacatgaagtatgaattctgtgcagctaccacgtgcatgagatgtgattcttgtgtttctttttgacaatttaggaatgtaaaacccattccaggctcatgcagcatgggctgaggtgggygggccgaggtgggcggccactggccagtgggtctctggctccggtgtctcagctcctctccctcccttggagacacgagggcaggacacagcttgggtcccctccgtgagcctccatggggcgctgcttgtccctgccaagctgggggctgggagtcctcggccctcgaggtcctcacaaacccagcagcttcacaagcaggacacgagtgcctgggtgggccgcatcttttctctttttacctggtgatttcaagtagtgtcaggtttgcggaggagttacgaggaccggacggggctccctggtgaggtggtcctgtgtacctgcggacgctagctctggcccagcacctccaggcagggtctgcttttcygccctgcccttttcgtcttcctcactggtccaggattgygtggccctcagccctctgtctccttagccctctcccgtctgtgactgtcccctcgtctctctgggttcttggtggtctgagggtctggccaggctcctgcaggacgtcctctgttggggcttgtctggtggtttcttgtggttgaagtcctacagttttggcaggaatgcagggagatgccgtggggcctgccaggagcgtcctgtcacaggcgccgtctgccaccctctccactgtgacgccactgcctttcctcctgtgactgatcagtgccttcgagagatactttaaattctttttatttttagagacagggcattgctctgtcacccaggctggagtggctccctcatggcttatgcggcctcaacctcctgggctcaagtgatcctcctgcctcagcctcccgagtagctgggattatgggcatgcgccaccacgcccggctacttttgtatttttagtaaagacggggtttctccatgttggtcaggttggtcttgaactcccgacctcaggtgatctgcctgcctcggcctcccaaagtgctgggattacaggcgtgagccaccgcgcctggccacgtgcgagcatcttaaacaaaactttcatggaacagttcctcctttttgtttcatttctgaaatgtcttgtrtgacttgccttgctgtcttctgggcccactgataggttgtaacctgcacgtggggtggtggtggaggctgaggccagtgctgtctgcgtggtccacatgaccctggggtctgctcacaggctggacgactgtggcctcacggaagcacggtgcaaggacatcagctctgcacttcgagtcaaccctgcactggcagagctcaacctgcgcagcaacgagctgggcgatgtcggcgtgcattgcgtgctccagggcctgcagaccccctcctgcaagatccagaagctgaggtgaggcggggcctggcactgcctctggcctggtgcagtctgctttggtagcccggcagcaggggacagagccgccaggggcgcgtgggcagctgcaggtggacaggcagtggcagcagacatttccaacatcagccagaggcacacaggcctggcggtctcacagcgggggggacagggcccttcctgccttatcccagcycccrcacccaagatctggccctgcccgccatccytagccttccagcatcaccacagacccccactgaaaggtgtgtctgcagacaaggtttccctgggtcgagccacatgcgtgccctccttcactcggcctggagaccccagaccccagagccccgtccagggaaggagcaggtatagacctgcygcctgaagagtgctgctccgggctctgggctctggcaggygaagggcgtggcagcttggctcaggggagccctgctgacagccaggtatgctccagcctccaraactgctgcctgacgggggccggctgcggggtcctgtccagcacactacgcaccctgcccaccctgcaggagctgcacctcagcgacaacctcttgggggatgcgggcctgcagctgctctgcgaaggactcctggacccccagtgccgcctggaaaagctgcagtgagtttgtgtcctgccccagggcccatgctggccgctgcctgtcccccagccagcmccctacatagaacatcgcctgccaggagccgtgaggaggggactcaggtcacaggggccttgtggtgctctcctttccccatgatgctgggtctggggccttgtggtgctctcctctccccatgatgctggggctggggggatctgtcatcaccctccctccccatccagttgtcctttgcaaggcacagctgccccaggacccgacggtgggaacagatgcctggccgtgagtcaggttccactcaccgcctcagtgtgtgtgggggacccggccattgtgagttgaccacagcctgggacgtgcaggtggccctgccctccagaggctggtttctttctcccgggcctggttgggccccaaagtctgaggtccgggagggggtgaggggtttccagaaggaatgccggtgtccacagaggcccgggcctctggatgagtctgtgggggtccctcagcactgacacctgatgcccaggcagaagactgaggggagatgagacaccagcacaccccgtgctccctggtatcacacccttggctggtgcacattcctgtgtggtgctgagytctgctgtcccccaggctggagtattgcagcctctcggctgccagctgcgagcccctggcctccgtgctcagggccaagcyggacttcaaggagctcacggttagcaacaacgacatcaatgaggctggcgtccgtgtgctrtgccagggcctgaaggactccccctgccagctggaggcgctcaagtaggcactgggccttgggggggtgcggggtgtgggctrgggggggtcccgtgctgcctcacgtgtgacccgtgtccccaggctggagagctgcggtgtgacatcagacaactgccgggacctgtgcggcattgtggcctccaaggcctcgctgcgggagctggccctgggcagcaacaagctgggtgatgtgggcatggcggagctgtgcccagggctgctccaccccagctccaggctcaggaccctgtggtgagtcatctccgcgaggcctccttcccggagggtcgggcggcgggccgtcctcagagctctcccccgcccctgggctcatctcaggccatgagacggtgctgaggaaagtctgtggtggtccatgtcctgcaggatctgggagtgtggcatcactgccaagggctgcggggatctgtgccgtgtcctcagggccaaggagagcctgaaggagctcagcctggccggcaacgagctgggggatgagggtgcccgactgctgtgtgagaccctgctggaacctggctgccagctggagtcgctgtggtgagtgtggctgtyggggcagggccctgtcgcccaagagagggccagggtgaccgaggagaccaggggaggartgagcgactccagggaagctgctgggctcagctccgaccttcagaatgcataggccagggagcagcctgtggtttgatgggaacagtgcttggggccaaggaccaggtgtaggtgcccacttgctgggaggctgtcagatgtttttgctcaggtccacgtggggccttcaggggaagggccagtcgcagctgtgggccagcctgggcccctgccaggcgtcagtcctgtctgtgtccacagggtgaagtcctgcagcttcacagccgcctgctgctcccacttcagctcagtgctggcccagaacaggtttctcctggagctacagataagcaacaacaggctggaggatgcgggcgtgcgggagctgtgccagggcctgggccagcctggctctgtgctgcgggtgctctggtgagtgtgtgagggacacgagtatgcacatttgggagatcatatgcccgtgtgtgcacacaagggcgagagtgcacgagtatctgtgtgagcacgagtgtccgtgtgtatgtgagcacacatgggtgaggcgagtgtgagcacgtgtgtgagcatatgagtgtgagcatgggtgtcygtgagcayrtgagagtgagcacgtgtccgtgtgagcacgtgagtgagcacgagggtccgtgtgtgagcacatgggcaagaatgagcacgagtgtcygtgtgtgagcacatgggtgagcacgtgtgtgtgagcacatgggtgagadcaygagtgtccgtgtgtgagcacgtgagagtgagcacgagggtcagwgtgtgagcacatgggcaagaatgagcacgagtgtccgtgtgtgagcacgtgagagtgagcacgagggtccgtgtgtgagcacatgggcaagaatgagcacgagtgtccgtgtgagtgtgagcacatgggcgagagggagcacgagtgtgtgtgagcacatgggcgagagagcatgagtgtccgtgtgtgagcacatgggtgagagcacgagkgtcygagtgtgagcacatgggtgagtgagcaygagtgtccgtgtgtgagcacgtgagagtgagcacgagggtccgtgtgtgagcacatgggcaagaatgagcacgagtgtccgtgtgtgagcacatgggcgagagtgagcatgagtgtccgtgtgtgagcacatgggcgagagtacgtkagcacatgggtgagagtgagcacgagtgtccgwgtgtgagcacatgggtgagagtgagcaygagtgtccatgtgagtgtgagcacatgggcgagtgagcacgtgagtgtggcacatgggcgagagtgagcacgagtgtccatgtgagtgtgagcacatgggcgagagtgagggtgcatgttcatgtactgggaaaggcgggctggcggcaccactctggcttagttctcattttaactctgaaagtcagaggtcatgtttcatgaagcctgagagcttcacggagctscagcctacctggccaccctgtggtccatcttcctggaagccccgcccacctttctcccttgcgggaaccccgcctgtgtcaggatgtttttccagatttgttttctttgttaaagcacgttcttttgcagctttctaagaaaaggttttgcaggaggtaatttttggggtcttgtgcccctgttctgtccttggatcatttagccgggtatagcatgcaccattatgcccggctaattttattttgtttgtttttttgagagagtcttgctctgtcgcccaggctggagtgcagtggygcgatcttggctcactgcaagctccgcctcccaagttcatgccattctcctgtctcaacctcccgagtagctgggaccacaggcrcccgtcaccacaccaggctaattttttgtacttttagtagagatggggtttcaccgtgttagccagtatggtcttgatatcctgacctcgtgatccgcctgcctcggcctcctaaattgctgggattacaggcgtgagccaccacgcctggcctaatttttgtatttttagtagagatggggtttcaccatgttgggcaggctggtcttgaactattgacctcaagtgatgagcctgcctcagcctcccaaagtgctgcgattacaggcgtgagccactgtgaccttgtgtgcacgatctgctttttctcgttggcagcttttcaagctctctttgttcactgtgttmggggttccatgtgcttggccttgatgggggtcttggttctttgtgctggatacttggttctactaagaaaatatacytttggtgatttttttctctctcctttcttatgtttcttttttsgtgtgcccatgagcctgtcctgatgtcttgtggagtgaccctctaattatgttctccaaattttcttttcgatgttttgttttatttttgggagatgttctcatttaccagccagtctactgaatttccaccctcagtgttttgtcttttgtttgctgtttcccgtgtgcctctcgccagsggctttccgtgggtggctggtcatcctgggctgggcaccaggtgcagagtgaggcccgggagccctrgacagtgagccctgcaggccgagtcatggctgcgtttctcgagggcttcctcctgatgggggattttcagttccctgccaggggacaccatcctggctgccaggaccttgtgggtgttccagatgtggagaggaaccttgggtcctggtcactgcagacttgttccccctgagccactcacagggtgggggtcctgcagcttccctggcccccaccttggagaggtccagtgcaactccttggccctgctgtccggcctgtggcggctccaccccgggaagtgggtgttgggtcttctctatcccatcctcttttgtctgacccgttctcttgtctctctctggagcctaaagtctgttgtccactctgttcttgtcttggtaccctccataccctcgtttccccacagctgctcctcagtctctggctggcttctcctttgaagcccacgcagccagacggtgtcgaggtgacaagggggtgggtgtggctctctgggtggacgacatctctctcctgtcctttctcctccctgcagaagatctcaggcgagtgaggctgcttgtgcctcgcttgtctgtgccttccttgtccgtggtggggaacctgcccagggccacagggacggtgagccttggggacggccccacctgagggtcctgagttgccgagcacaggtgtccgtcgcgccccccaggcccaggcctgctctgccggtcagygcggtgccaggcacgcccggcaccctgacccccgccctgcttcacmcaggttggccgactgcgatgtgagtgacagcagctgcagcagcctcgccgcaaccctgttggccaaccacagcctgcgtgagctggacctcagcaacaactgcctgggggacgcsggcatcctgcagctggtggagagcgtccggcagccgggctgcctcctggagcagctggtgtatgtgcacgcgctgggcgggtggtgcggccagggctgcccagggaggaaggcgggggtgggggaggacacgggcccatgcctcccttctggcctgtgtgcagcctgtacgacatttactggtctgaggagatggaggaccggctgcaggccctggagaaggacaagccatccctgagggtcatctcctgaggctcttcctgctgctgctctccctggaygaccggcctcgaggcaaccytggggcccaccagcccctgccatgctctcaccctgcatatcctaggtttgaagagaaacgctcagatccgcttatttctgccagtatattttggacmctttataatcattaaagcmctttcttggcaggagrggctcttgtccttcctggggtccttgcgaggcgctggcattggagacgacaccaccccacttggcttctctccctgcctaagggaccccgcaccagggaagcagcccaaggccctggctgtgctcagctgggtcccctgagctgcacccacccacactggggagcacagggcaggccctgcccagggtggagggatgccccttggctctgttgcccgtgcagggtgacgcctgctgggagctgcctgcaggcccagctgctcccgcagcttccaccccggagcctcaggagcccccagcactgccctgactgccccccagcccagcccagcccagcccagcccagcccagyscrgcccagcgcggcccagcgcggcccgggttcctgcccggagcccagtgctcgccccagctctgtgtgggatgatggggcagcccatcttgcccacgggtggacagctgaccaaggtgggccagcccggggtgccctgccctgccaagccaagagggggacgctcaccagctttcaaaggtccgatgctgagtcagcaactacaagttcattgcaaagaagctgcctggcaatccccctcttttggacagggtctctctcttgcccaggctggagtgcagtggcgcaatcttggctcactacagcctggacctctgggactcaaaccgtcctcccacctcagcctcccaggtagctaggactacaggcatgcaccaccacacctggctaatttttgtactttttgtagggacagggtcttgccatgttgccgaggctggtgtttggtcttggcctcccaaagtgcgggtattacaggtgtgagccattgcacctggctataaagccctttaaagtgacccaggggctgggcgcggtggctcatgcctgtaatcccagcactttgggaagctgaggtgggcggatcacttgaggtcaggagttggagaccagcctggccaacacggtgaaaacccatctatactaaaaatacaaaaattagctgggtatggtggcgcatgcctgtaatcccaggtactcgggaggctgaggcatgagaatcgcttgaacctgggaggtggaggttgcagtgagctgagctcacgccagtgtactccaaccagggcgacagagtgagactccgtctcaaaaataaataagtaaaataaagtgacccaggatcttagtttcttaactatgacctccagtggggaacagagctccttggggaaatgggtgacgccaggcctggggcgagagatgcccaaggtgagtccggagcatctcagcgcgtgaggaaccagagcccctgggcgctgtctggggttgagttgctgccggaagggctcccaggggctgcctttgggacacgggcgccggaacacaggactttaatcacaagccctgcctcgcccccctcgggaagagcagacggtgaccgtgagcggggcgccacccccacctgctaccacctggctcagagcatcagcggggatggacagcgtgggtggagtgacaggacccgcagcgcgtgagggggggagtgggggcccctgcagtggggagatcaggtggcagttcctcctgagcgatcaaagctgccacctgcaaagagcagaatgctaaggccccatgtgtcctgcagcacgcagggcagggcagctggaagaactcatccgtgcagggccacggaggccaaagctgtgagtggccgtgactggaaagaggactgctaggcgcggtggccacaccggacgtcttcctgctgagccccagaggctgctcttgtgtgtgctccacattacagcccttgacttagagggcttgaaattttccccaaaagtagtcaaggaaaaatactaaaagtaaagctttttgacgcccggggccccgaggcagacccgggggtgtgggtgcaaatggctcccggagtccccccaggctgtgtccaatcagccatcaacaccccttactaccccctccagctaggaacagggctcagggaaccccttttctctccatttgtgtttgaaaattttcatggtaaagttttagaaatagtggcctggctgggcgcggtggctcacgcctgtaatcccagcacttcgggaggccaaggcgggtggatcacctgaggttgggagttcaagaccagcctggccaacatggtgaaaccccatctgtactaaaagtactaaaattagccgggcatggtggcatgcgcctgtaatcccagctacttgggaggctgaggcagaattacttgaacctaggaggcagaggttgcagtgagccaagatcacgccactgcactccagcctggctgacagagtgagactccatctcaaaaaaatagtggctcaagctgggcatggtggctcacgcctgtaatcccagctctcagggaggcagaggcaggaggatcacttgaacccaggagttcgagatctgcctgggcaatatagcgagaccccgttctccacaaaaaggaaggaaagaaaaagaaaaaaaaacataaaaatagtggcccgagaaggcggctgcccctccccaggaatcctgtgtccactgcccagtgtctgccagcctgggacaaacacagcaccccaggaatcctgtgtccactgcccagtgtctgccagcctgggacaaacacagcaccccaggaatcctgtgtccactgcccagtgtctgccagcctgggacaaacacagtaccccaggaatcctgtgtccactgcccagtggccgccagcccttggacaagcgcagcagagggtgggtgccacctggaccctcctggagaatgggagaggggctgcatctggcacctgctctctctggggggtggggcggggcaggcgccaagtctttgctcaggtgcagaggctgagtgcctcctgtcctctgtgtggttttccccaagtgggcactgggcatgagggcaggctggagggctgcactggaccccaaagcaggacacggggagctggggggagggctggaagcctcagacgttcgttgtcactttattggttctctttgctcgtgaagatgaccctcaccttggagccacggaggcagcatgaccccagcacccgggttccaggcccccttgaggggcagctcagtgatctctgaccccatcatccacgtgtcctccggggtggtctgtgtgaaaggaaggctcggaggaggtggctcagcatcgctgcctggatccgctgcctctcagccacggagtgtttgtggacgagcgcccacacgagctgcgggggaagtggatgtggagccagtgtagacgcctccaggcctcagcgcacccagggcccacggagtgcagaaagggtaccgagatgtccctgcctggaccacaccatggctgggtgacagggagcttggtgggccagaggccacggggctgaccaggcagaaaggggagggaggaccctggttcctgagggacacactgccccagagcatgcccttgccacgccagccagctcccagctctggagaagcctcggagcccagagcacacgtgcacaccacaggcggccacgcatgtgtacacacgcgcgtacacacgcgtacacacacgcatacacacgtacacacgtgtacacatggagatgaggctgtgctggggcctcctccacccctcgccttcagcctcgccaggtgcacaggagaaaagcaaaaaaccttgagggcaaggccgggcacgtggctcctggtgggactcacacaggaggaggccacggaggcctgggctctgggaggctcacgaggcagccacggcccaggtcagtttggagttggtgctccctcgccctcggccaccccaggccccagcaggtcttcgtccagccccagtgggtgctggtccccgttgccgacggtgctgccctggtcatccttgttctgccacttctgccaccgggtctccttgtacctcaatgtgatgtccctggggagcgggatgcagcgtcaccacctgcccccacaccagccccactgcaggccccatggacagctggcacctagtccctgtggaggtccggaatggactgggtgggtgccgggtaccctggccctgggacggcagccgtggcagactggagccctgaggagcctggatctgtcagtgcagagcgaaggccccgagggctgggtcaggaaaggcgcctcccgcagaggcggccagagggttgaagcagggacagtgagacaccaacgacaccaaactcccacagtgcctgtgccaagggacccggacagcggccctccttcagaacatacgcgccctgccctgactcaccgcaggaagaagcgccagacggtccaggtgagcgccaggacggagccgagggtccagcactgggagatgtagaagggcagggacagggtgagcgtgtgggggtcgtacttcaccacgatgagcagctccgtggccgtgatggccgccaccagccaggcctgcgggcccagcttcttgtggggcttcctgcaggggcagcagggggttcagcgtcccgggccccgcagggtcctccaggcggacttgcccaggctccggcctcccaggctctgctccccagccctccggcccctgccccccgggggtgtctccacccggactgccgcagccctcacgggtcatccatgaagtcgtagatctcacgcatggccacgccacccacgttcacgaagaagacgagccgcaggaggaccaggtagtgctccgggggcatccacagcacaaacttcaggtagaacgtgttcagttctgccaacaggaactaggggaggagagggtgagcaccagctctggccccccgcccgccgcgccgtcgcgaggcagcccggccttaccaccaggatgatgccgcacacggccagccagcgacgcaggctggaggccggcttccactcgaagcgaacccagctgtacggcgtgaactggaaggcgatcctcttcatcttgcccctgggaaccacagagccggcagcctgaggaaggcagcccaccgaaccctgccctgtgccatcgggcaacagactgttcctggtcacccggccccgccctgtgccatcggacgagctctgctcttggtcaccccgccccgccctgtgccatcgggccacagactctgttcctggttacccagctgctgcccggctgttctccgaggtctggccacccagctacaagccctgcttctccacggccctctgctgttcagtctcttccagcttgagcagtggctgcagcgcctcagagggcgctccacggtgccgtgagctagccatgtctgcagagccaggcagagccggggcacccacaggcaggaggggagacccccgtcccccaggcctttccttagacttctgtttcttttttaaattccaaagtcataatgacaaagtacctgcaactatttcataaccaaagcaaccaagggagggagaagcacggaatgatcccacagcccctgcgccaggccggccagggattgaggagggaggtacgtgggtcagacgccatggccactgtgaggggcggccgggcttgagtgacaccaggtcagagggaggttccaggaggcaaagccccacggtcacccctcctgagccgcacactggacgggcctggtgctcggggtctgctggagcacggacgctgaggctgcctccaggtaacccccacccggccctgccctcgcagcccccacgacgtacttgtaggtcggaatgttccagaggccctgccacttgtacgtcttcagggacagccactcaagggtcttcatgccgcagtagatgcccagcccgttgcagacgagcacgtccatgatccactgcagggaggggccagcactcgttgcaggggtgaggggtaacgagccccccgaggaggaccccggaagagcacaggggaaccgagaatgcccctcagcctgcacccactgccccccggggagaatgagggggtccaggggccgcgctgggcacaggggttccgagaatgcccctcagcctgcaccgactgccccgggggctgtgctggcacctacgtgatcccaccagcactcgctgaagttgggcagctggtgctccaggctgtactccaggaactcgaacatcacgctgatgatcatgcacatccaccagtctcggatcatcagggtctgtgggcgccagggtcagccagagtatgggacgccggccacacccggccctgcccacgggtgcgtgcagcccccaccccggctggcagccagagtatgggacgccggccacgcccggccctgcccacgggtgcgtgcagcccccacccggctggcagccagagtatgggacgcaggccacgcccggccctgcccacgggtgcgtgcagcccccaccccggctggcagcattcttggagtcgacagcactggcagggcccccagtgaggtctcagggtgagcgtggggtgggtggctgcccctccagcagcctcgatgtacgactgtcagcaaacaaggcagcatccccgtgcccggggcctgacaccaaactctgccagggtgggctgcagggtcaagcaggcactgctcttagccccataggtagcacagggtccctcagaagtgggatggggcagt

SEQ ID NO: 96856 - DNA, 39735 bp, Homo sapiens
  misc_feature (1)...(39735): n = A,T,C or G
attttatttttagtagagacggggtttcaccatcttggccaggctggtcttgaactctgacctcatgatccacccgcctcggcctcccgaaatgctgggattacaggcgtgagccaccgcgcctggctattttttcttttttatatagaaacagagtctccctatgttgctcaggctgctctggaactcctgggctcaagggatccgcctgcctcggcctcccaaagtgctgggattacaggcatgagccaccacgaccggcctttttcttttcttttgagacagagtctcactctgtcgcccaggctggagtgcagtggcgcaatctcggctcactgcatcctctgcctctcgggttcaagtgattcttgtgcctcagcctcctgagtagctgagactacaagcgcaagccaccatgcctggctaatttttttttttgagacggagtcttactctgttgcccagtctggagtgcaatggtgtgatcttggctcactgcaacctctgcctcccaggttcaagcgattctcctgcctcagcctcccaagtagctggaattacaggcgcctgccactacgcctggctaatttttgtatttttagtagagacggggtttcatcataatggccaggctggtctcgaactcctgacctcaggtgatctgcctgccttggcctcccaaagtgctgggattacaggcgtgagccaccgtgcctggcctcggctcaagtatttttaaatcaagttttcttagacattacacacttaataagttgacccttaagtgattggggttcaaactgcacagatccacttacatgtgaattttttcaaatacaagttacaccgagtctgcctgtctcccctttggcctcctcctaagaaacgtgaagacaatgagggcctttatgatgatccacttccacttgatagtgaatatattttccttatgattttcttaacaccttctctagttttattgtttttttgtttttttttgagatagagtctcgctctgtcacccaggctggagtgcagtggcgcgatctcagctcaccgcaacctccgcctcctggattcaagcaattctcctgcctcagcctcctgagtagctggaattacaggcatgtgccaccacacccggctaatttttttgtatttttagtagagacagggtttcaccatgttggccaggctggtctcgaactcctgaccttgtgatccacccacctcaatctcccaaagtgctgggattacaggcgtgagccaccgcgcccggccactctctagttttaagaatacagtatataatacatataacacacaaagtatgtgtttgtatgctatcagcgaggcttctggccagcagcaggttactagttacattttgggggagtcaagttatatgtgaggagccagacacggtagcttacacctctaatcccagcagttggggagaccaaggttgagcccaggagtccaaggctgcagtgagctaggatggtgccaccgcacccagcctgggtgacagtgagaccctatatctctttttttccctttgttcagcctccccatagagaccgtcgaaaattgccaatgctgattatatttcaagtcatcatggagtcattggctatgatactgccactgcacaaagctggccccatctcaaaaacaagttatatgtggatttgtggctgcatggaggagggctgacacccctaacccctgcattgttcaagggtcaactataatataaacataacttcactgagaaatcaaaaaatttgtgacctgctttattgtggtagtctggaagcaaacctacagcatctgaggtatgcctgtccagtccctgttcccacagaatgtgaatggatgctagacattcacttagtattccgaggaaacaagatgggtttggcacctgagctgaagccatgctggctccagagcgatagaacattctttcccactatctcccaggaggctgaataacggcatcctactgtgtctaggcaatcactaagctcactggacttgatttatccgttaaaactgctctgggatctcacaagctccccatctgtctggggttcaacaccctttttgtcctcccctatcctctccaatttgcacaaaggacacaggacacaggctggcttactattcaaagtttactgacctccccagccaggcaggccaacccttccgagcaggggaaatgtccatctagctgccctctgctgggttgcagcctatgccatgagagggtactggaagcaggagggagccctggctagggcaggccttaaacgcaagggaagctgagcagagatctgcacactcaaccccatttgatattcttctcctcctcagtcatggccagcgtgttggtgactagaccggtgccaatagtccggttgccatctcgcagggtgaaacgctggcctttctctaagatcattggctgccgcaagattaggttgaacttcaggtcctccccgggcatggcaagctcctagagtaggaagagaaggatcatgcgtggcctccagggtgccttcattccttaagtcttttttggctacctcggaggttaagagtcatgggagaatgcagcaggggaatggttctgcctggggacagcttcatccatcccaggctgtcaggcagatgcaaacagcatattgagacaggaaaacataaaagagaccagtgatgagtgttcctaaggtatgttcttgagaaaaaaatgtctaggaagttgtgggttatgcaggtttcttggtcacagaacttcttaagccttcatatataatgaaacgctcaaaaagaagagaccttttctaggaaatctttctgtgggtacatgctggcagagctaaacttttaacctgcttcagcttagggcacactggatgaggactcccgcccctaagtccatgggccatgccccttctgttggctagcagcggcaagcagcccctttccacctaaggaaataaagccactcgggttgtcacagtgtatctttggaactatgagtgaagcaaaggtaatataaaaagtcccccctccaccctacattcctcccacccaccgtaccttctctgggggcaggataatccgacaggccatgtcccaagtcagggagaacatgacaggcatgaagtgggacacaaagggcttgtggcggccaccttcctccttgctgaggatgtaaacctggaggagagcaagcaatgacggtgagctgggcttggctggaggctggggagagcttggctcaaccctgcccaccgtcacctggagccctcacctgggcctccaccttctggtggggcttgatggaacctggcttgaccatgaccaggccccgccgcaagtcctcccgcttcaagcctcggaccagggccccgaggttatctccggcctcggccctctccaggctcttgtggaacatctcaatgcctaggacggaaagggaaaaggagcagggagaaggaaggcgaatgtgagacagagggaaggcacaagggatctgccggggtaaggccacccttcagccaggccctgctctccagactggcttcccaaacctgtcaccacagtgcggatgttcttgctatgtcctaggagctcacactcgtctcccttctttaaaatgccacgctctagtgtacctgtcaccacggtgccacggcctgggagggaataagacaggatatcagggaccccgagctaggcttctgctagagagagtgcgtgggaacagacagagtcctcaccagggacggagtacaccgcctccacaggcagcaggaaaggcttctccaggtcccgggcgggcactgggatgtaagtgtccacagcatccagtagcttctgcacagacttcaggcctaactcagggtcccgaccctgttgaggggaagtgccaggactctgaaatccccattctacttccctcgattatcaagagccacttcccagacacaaagcagagctctgggtgcccatccagccccaccctctgcagcagctgccctgcctgaccccgcgttcacctcaagggcacagagagcagagcctacgatgactggggtctcctcccctttatagccaaactcggtgagcagctcccggatctccagttccaccagttccaccatctcagagtcctggacagcgtcagccttgttcacatacaccaccacatgctccaccccaatctgtagatgccagagagacagggacaatatacagaggggcccaactccccactcttcccttttgcatccttacccaggctctgagtacctgtctggccagtaataagtgctctcgggtctggggcatggggccgtcattggctgctaccaccaggatgcagccgtcgaggggtgcagtgcctgtgatcatattctggagaggagaaggaaaggaaacagccaagttcaacgagctcttcagttcacatccatatagccaagtgtagcagttagaaactcaggcccacctttctctaccatctcctcaccacccattctgcgtggccaagaccacaaacctgccatctcatacccaaacactgaatatcttaatctcctccccacaagcctaacatttatcctgacaagaggcagcttctggccctgtctccagtgtcccagcaaccctcaccttaacataatctgcatgacccgggcagtctgtgtgggcgtagtggcgggcggcagtgctatactccacatgagccgcattgatggtgataccccgagctcgctcctccggggcattgtcaatctcctcgtacttcttgaacttagccccacctccctcagctagaactaaaggaggaaaagaatacacctctcagctaaagttccagtgctagaggcagagcttagaccacgcccctgaaccctcccacctaaatacataacctcctccaatctctaactcttccagcagagagaactgtgggtcagaaagaaatgttagagggccttaagggtctgccctgtgacttctttagggtacagcctctgcttgcagagcattccccacgactttgtgatccccaagccattggtggatcacaaagttcttcctgttcaggagaaatttgtctcttgcatctcccaatccacctgtcgcacaaattcgggctcttggggccacagtaaactcctccagcagacactctgctggccttgcctccctggctccaggtcccatcagtagatagggcgctgctggacgccccaaccccactcactcttcgtgatggctgcagtcagcgtggtcttcccgtggtccacatggccgatggtacccacattcacatgtggcttgtcgcgcacgtaagtcttcttggcctccacggccaggccgcggcacaagagaggcaatgccggggctttcagcagccgcaacagaccctgcagcaggaaggtccggccggcggcgagacctgccgggaccgaagcttggagtcaggcagggaaggggtcagaccgaacccagccacctaccactcccccaaagtgttcctgggccgccatcgccctccctgaccactcaccgctgaagtggggcgtcgcgcgcagcagggtggcggccgccattgtggtcatactcgcgccccggtaaccggggagccgggaccaggagcccgagcgcacagaagaagaagggcgcctgcggctggaaggcacttccggcggaagttagagctgggagggcaagtccgggcccctctagccgccagtgtctatggccgtctcagccgacgtcgggcgcgcggctgaagacgtcatggagggggctggtgtctcgagggcggagtatgatggagaggttttccaccactcgcgcctctcgggctgaggggcaacgtagttctctctggcggtcgcagggggcactgaggagcgtcccctaaatcaccggcgccgcgaaggctcatgggcgtagtagttctcaggtcggcgggctgtggaggtgatcagagtgggagtcaggcgggctaggccggacccggagggaggggctcgggctccgggaggcagctgcggctccgactgctcaggaacctcctcctgggcccggcagagagagaccccgagtcccccggagtccgactcgctacgcgggtcttgcgagatatctggccgcctctgccgcagctggaggtaggggaccaggtcctggacgcctttcggggatggggtgaagtgtgacctccctcttcgctgagactttgttttctaatctgtaaaatgggaatagtagtatccacttcatagggagagcctgacatctagccctgagaggagatgaactgggtaggagtcagtgttgggccctgtgaggtcaggcagcttgcggggaccctgtactgctagacctcacagggccagagcccacaagacagacagcttcgctgcccacccctgtagtccctcagcagcctaaggagcagttccgttgggcatcgccccacccatctaattttgcagatgaggagccaaggatgaggagccagctaggggagcctttaaggggagcctgagtctcctttaatctgtcggtgtccccagcacctaacagggtggagcatgcagtgaatgttgaatgaatgggtgcaagggtagtcaatgtcccttaactttcacatccatcatctcatggcagcttccacagggcactccaaagtgttaattatggctgcttaaccctggctaatgtttcggaactcatcagatcctgagactcagtggacagtgtttgtttcaaatagattccctaattcctcccctggaggttatgattccgtggggtctatgcacagactgggaagctatataacaaacactcttctaaaactgagaagaggctgggcacggtggctatagtgccagcctatagtcccagcagtttgggaggctgaggtgggaggayggtttgaagccaggagttcaagaccagcctgggcagattaggagaccctatctctacaaaaaaaaatttaaaattagccaggcacagtagcatgcagctatagcccctcctactcaggaggccgaggcaggaggatcgcctgagctcaggagttcaaggctgtggtgaggtatgatcatgacactgcaccccaccgtgagtgacagagaaagaccccatcttttttttttttttttttttttttttggagacagagtctcactctgtcgcccaggctggagtgcaatggggcgatctcggctcactgcaacctccacctcctgggttgaagcaattctcccacctcagcctcctgagtagctgggactacaggcatgtgccaccacgcctggctaattttagtatttttagtacagatggggtttcacctcgttggccagacggctctcgaactccagacctcaagtgatccgcccattgtggcctcccaaagtgctgggactacaggcgtgagctaccacgctcagccaagaaagaccccatctctataaaaatattttggccaggcgtggtggctcacacctgtaatcctagcactttgggaggccgggcgggtggattgcttgagttcaggagttcgagaacagcctgggcaacacggtgaaactctgtctctactaaaatacaaaaaattagctgggcgtggcagtgtgcacctgtagtaccagctactcaggaggctgaggcaggataattgtttgcacccgggaggcggagcttgcagtgagctgagatggtgccactgcactccaccctgggcgacacagcgagactccgtctccaaaaaaaaaaattttttttcaaatgaaaactcagaggagtttaggaaactctgaactagagctttatgatgttcaggcattcctattgtttcacaatcagcgctcccagtgctaccctgggtagtaggaactattatttcctccattttgcaggtgtgaaaactgacggtcagggtgattaaggaatccaccaccactaaaccccaaaaagtgtgcacaccgcactgtccttttttttttttttttttttttgagacagagtcacactctgttgcccagctggagtgcagtgacacgatctcggctcactgcaacctccatctcccaggttcaagcgattctcctgcctcagcctcccgagtagctgggattacaggcgcctgccaccacgcccagctaatttttgtatttttaatnnnnnnnnnnnnnnnnnnnnnnnnnnnnnnnnnnnnnnnnnnnnnnnnnnnnnnnnnnnnnnnnnnnnnnnnnnnnnnnnnnnnnnnnnnnnnnnnnnnnnnnnnnnnnnnnnnnnnnnnnnnnnnnnnnnnnnnnnnnnnnnnnnnnnnnnnnnnnnnnnnnnnnnnnngtcttgaactcctgacctcaagtgatccacccaccttggcctcccaaaatgctgggattataggtgtgagccaccatgcccagccagactgtactataatttaactctcattttactgctcagataaagtgaggaacttgctaagacttctctcttcctggccctccagttaatcagttctgcttaggaaaggctggtatcatgtgtagtataaacagattttgtttttgtttttttgacagagccttgctgggtctcctaggctggagcatagtagggcagtcacagctcactgcagcttcagcctcccaagctcaatctacctcagcctcccaaatagctgggattacaagcatacaccaccacacctggctaatttttgtattttttgtagagatggggtttcgccatgttggccaggctggtctcccaataccggggcccaagccgtctgcccaccttggcctctcaaaatgctgggattacaggcatgagccactgtgcccagcctaaaagggttttctgtttctactctgtacctaagtcactgtactcctaggaatttatcctaagacactattggccactagcaagttatgagtttttgggggtggtatttgaattaatggtttatatttttgtggtgctatatttattttaatgtgtattagcttgaaaaaaaactggcataataatcaagtttttaaaaaaacagatcaacttaaaagaatattgtttggtagataatattatggatgcactgggcacaatggctcacacctataatcccagcactttgggaggtcgaggcaggcggatcacttgaggccaggagttcgagaccagcctggccaacatggtgaaatcccgtctttactaaaaatacaaaattacctgggcatggtgcacgcctgtagtctcagctactcaggaggctgaagcaggagaatcgcttgaacccaggaggcggaggttgcagtgagccgatatcacgccattgtactccagcctgggtgacagagcgagactctgtctcaaaaataaaataaaaactattatgtgtggtatgaatatatggcaaattttttggaaggtagtgaatgaatggctagagtttgagaaacacggtgttcggaaaagagcccagagaaaattttttctagagctgttgaccgtagcatcctctgtattagtgaatggctcagtcagaagtcttgacttacagataacagattttacattggctggcttaagcagaggagggatttgttaagggtattaggcagcttacagaattgtggggcaaactggagaactaattccaagccatagaactgatttgacctgataagaaaactgctgttactgtcactaccatcaaatgctacatgccaggatatcaactcgtctgttatagctactgccgggggcactgaaaccacttctgctattgcttgagaccaggagttcgagaccagcctgggcaaaatagtgagaccttgtctctacaaacataaaaataaaaaaatttgccagatatggcagcacatgcttgtataatcccagttactggggaggctgagacaggaagatcacttgaacccaggagtttgaggctgcagtgagcaatgatagcaccactgcactccagcctgtgtgacagtgccagaccacgtctctaaaacaaaaagggccaggtgtggtggctcacgcctgtaatcccagaactttgggacgctaaggtgggcggatcatgaggtcaggagatcaagaccatcatggctaatatggtgaaaccccacctctactaaaaatacaaaaaattagccaggagtggtggcacgtgcctgtagtcccagctacttgggaggctgaaacaggagaatcgcttgaacccaggaggcagaggttgcagtgagccgagagtgcgccactgcactccagcctgggcgacagagtgagcgagactccatctgaaaaaaaaaaaaaaaaaggaaattaaaaagggccggacgtggtggctcatgcctgtaatcccagcactttgggaggccaaggcaggtgggtcacgaggtcaagagattgagaccatcctggccaatatggtgaaacccgtctctactaaaaaaatacaaaaattagctgggcatggtggcgcttgcctgtagtcccagctactcgggaggctgaggtgggagactcgctcgaacctgggaggtggaggttgcagtgtgccgagattgcgccactgcactccagcctgccgacagagcaagactctgtctcaaaaagaaaaaaaaaaaaaccaacctatccaaaacaggactctccacttcctctcactctccttatacatctgaacgtggggcaccactgttctcccctcccctctccccacacctacgctcctccccagttctgattctccaaatggaatccccagtgtgaccccacgttttactatgtcctctgtcaacactgtggttcaattgggatcatctctcatccaggttacctcaggagctctccagtgggtctcctggcttctgttctcattcccaacgcctttcttcttttttttttttttttccaagatggagtcttgctctgtcacccaggctggagtgcaatggcacaatcttggcttactgtaacctccgcctcccgggttaaagcgattctcctcctgcctcaccctcccaagtagctgggattccaggcgcctgccaccacgcccaggtaatttttttgtatttttagtagagatggagtttcaccatgttggccaggctggtcctcgaactcctgaccttgtgatccacccgcctcagcctcccaaaatgctgggattataggcatgagccaccgcgnnnnnnnnnnnnnnnnnnnncttttttaaaaaaaatacatatattggccaggcatggtgcctcacgcctgtaatcccagcactttggcaggccgaggcaggtggatcacgaggtcaggagttcgagaccagtctgaccaacatggtgaaactcccgtctctattaaaaatacaaaaaatagttgggcatggtggtgcgcacctgtggtcccagctactcaggaggctgaggcagaagaatcgcttgaacccaggaggcggaggttgcagtgagccgagattgtgccactgcactccaacctgggcgacagagtgagactctgtctcaaaaaaaagaaaaaagaaatttaaaaaaaagagtaaagaaaaaggccacttctctaatatgcagggaataaactatgagtgaataaactatgagcaagactccgtatccaaaaatatatatatttttatttatatatttacatatatatatttacatatatatatttacatatatatatttacatatatatatttacatatatatatttacatatatatatttacatatatatttacatatatatttacatatatatttatatatatttacatatatttatatatatacatatatatttatatatatttacatatatatttatatatttacatatatatttatatatatatttacatatatatttatatacatacatatatatttatatatacatacatatatatttatatatmtacatatatatttatatatatacatatatatttatatatatacacatatatatktatatatatacacatatatatgtatatatatacacatatatatgtatatatatacacatatatatttatatatatacacatatatatttatatatatatttacatatatatttatatatatacatatatatttacatatatatttatatatatacatatatatatttacatatatatgtatatatatttacatatatatttatatatatatttacatatatatttatatatatttacatatatatttatatatatacatatatatatttttatatatatttacatatatatttttatatatatttacatatatttttatatatacatgtacatatatatatttttatatatatgtacatatatattttatatatgtacatatatatgtacatatatatcttatatatgtacatatatatgcacatatatatcttatatgtacatatatgtgtacatatatatttatatatgtacatatatatgtacatatatatttatatatggacgtatgtatgtacatatatatttatatatatacatacatatatattnnnnnnnnnnnnnnnnnnnnnnnnnnnnnnnnnnnnnnnnnnnnnnnnnnnnnnnnnnnnnnnnnnnnnnnnnnnnnnnnnnnnnnnnnnnnnnnnnnnnnnnnnnnnnnnnnnnnnnnnnnnnnnnnnnnnnnnnnnnnnnnnnnnnnnnnnnnnnnnnnnnnnnnnnnnnnnnnnnnnnnnnnnnnnnnnnnnnnnnnnnnnnnnnnnnnnnnnnnnnnnnnnnnnnnnnnnnnnnnnnnnnnnnnnnnnnnnnnnnnnnnnnnnnnnnnnnnnnnnnnnnnnnnnnnnnnnnnnnnnnnnnnnnnnnnnnnnnnnnnnnnnnnnnnnnnnnnnnnnnnnnnnnnnnnnnnnnnnnnnnnnnnnnnnnnnnnnnnnnnnnnnnnnnnnnnnnnnnnnnnnnnnnnnnnnnnnnnnnnnnnnnnnnnnnnnnnnnnnnnnnnnnnnnnnnnnnnnnnnnnnnnnnnnnnnnnnnnnnnnnnnnnnnnnnnnnnnnnnnnnnnnnnnnnnnnnnnnnnnnnnnnnnnnnnnnnnnnnnnnnnnnnnnnnnnnnnnnnnnnnnnnnnnnnnnnnnnnnnnnnnntgcggtggctcatgcctgtatcccagcactttgggaagccaagcgggcggatcacaaggtcaggagtttgagaccatcctggctaacacggtgaaaccccatctctactaaaatacaaaaaaaattagccgggcgtaggtggtgcacgcctgtagtcccagctactcgggaggctgagacaggagaatggcgtaaaacccgggaggtggagcttgcagtgagccaagatcgcaccactgcactccagactgggagacagagtgagactaggtctcaaaaaaaaaaaaaaaaaaaaaaaaaagtgcatcatctcagaactttgtgaggccaaggtaggaagatagcttgagcccaggagtttcaagactagcctgggcaatgtagtgagactccatctctacaaaaaatttgaaaaattagcagggcatggtggcaagcacctgtagttccagctctgtgggaggctggggtgggaggatcacttgatcacttgagcccaggaggtcgaggctgcaatgagccgtgatcacaccactgcatttcagcatgggtgacagagcaagaccctgtcttaacaaaaataataatataaataaaatattgaccataaatgaaccctccctaaatgactcctcactgcacttggaataaaatccaaattcctactttaaatgggcgatttgtatctcaatcatggtaggtgaattatatctcaataaagctgttattaaaaaaataataaggccaagtatggtggctcatgcctgtatgtaatcccagcactttaggaggccgaggagggtggattgcttgagcccaagagtttgagaccagcctgggcaayatggcaagaacccgtctctacaagaaatagaaaaattagctgggcatggtagtgcacccctggagtcccaactacttggaaggctgaggcaggaggatcaattcagcctgggagttcaaggttgcattgagctgtgctcaagccactgcacttttgcctgggtaacagaacgagaccctgtctcaaaataataacgacaataataataaaattctccgtgtgtcccacaaggcctgcataatctggccagctctttgaacccatgtagttcattttcctcactcccctggctgcactagcccttcatttttgtttttgttttgagacagagtctcgttctgtcgcccaggctggagtgcagtggcacaatctcggctcactgcaacctccatctcctgggttcaagcgattctcctgcctcagcctcctgagtagctaggattacagatgaccactaccacaccctgctaatttttgtatttttagtagacagggtatcaccatgttggccaggctggtctcgaactcctgacttcgggtgatctgcccaccttggcctctgaaggtgctgggtgccttacaagtgtgagacaccatgcctttcccacactggccccccactttcgttttgcaaacattccatgattgtttctttttttaattgttgagacagaatctcactctatcacccaggctggagtgcaatggtgtgatctcggctcattgcaacctccacctcctgggttcaagcaatactcatgcctcagcttcccaagtagctgggattacaggcaagtgccaccacacccgactaattttttatttttagtaaagacgaggggtttcaccatgttggccaggctggcctcaaactcctggcctcgagtgatctgcccgtctctgcctcccaaattgctgggagtacaggcatgagccaccgcgcccggcccccatgattgtttctaccttgattttcttcatagcatctaaatgcccaaaattatcttactattttgcttgttttcttcccatctcaccagctcgtggcactaagaacttatttatttatttatttatttatttwttttttgagacagagtcttgttnnnnnnnnnnnnnnnnnnnnnnnnnnnnnnnnnnnnnnnnnnnnnnnnnnnnnnnnnnnnnnnnnnnnnnnnnnnnnnnnnnnnnnnnnnnnnnnnnnnnnnnnnnnnnnnnnnnnnnnnnnnnnnnnnnnnnnnnnnnnnnnnnnnnnnnnnnnnnnnnnnnnnnnnnnnnnnnnnnnnnnnnnnnnnnnnnnnnnnnnnnnnnnnnnnnnnnnnnnnnnnnnnnnnnnnnnnnnnnnnnnnnnnnnnnnnnnnnnnnnnnnnnnnnnnnnnnnnnnnnnnnnnnnnnnnnnnnnnnnnnnnnnnnnnnnnnnnnnnnnnnnnnnnnnnnnnnnnnnnnnnnnnnnnnnnnnnnnnnnnnnnnnnnnnnnnnnnnnnnnnnnnnnnnnnnnnaccagcctggccaaccccatctgttttaaaaatccaaaaaaaaaaaaaaatagctgtggggtggtggtgggtgcctgtaatcccagctactagggaggctgaggcaggagaatcacttgaatccggaggtggacattgcagtgagcccagatcacgccactgcactccagcccaggggaccgtgcaagactccatctcaaaaaaaaaaaaaaaaaccacacacacacaaaaaagtgcctaatacttaagtgaatcagtatttgttggaggatttattgaatcatttcaattgagcatttgcattgggcttagtaagtttcctgaggttttcaatggaaagcaaattttatattcacattcatttttataaataaagatgggtcactgtaccttcttggccctcagcttyattatctacaaattgggggtggaggttaaatcatatgatgatctctaagatttcttgtagctctaaaacttctaagaggaggatggggtctggtgcaatggaaatgagtactgggctagccaggaacttagtggcacattaaggactaggtcccagcgcactgtccttggtgccactctataaatccttcctcagaggaagctcaagggcatccttcactcttcccaccagccaacttggcaggacctcctgggaagtctctctggttaaaccccttggcaccaaccccattacatcgccatagccaggccagcatcagccctcttgtggaccactgcaccaacttctgctctgcctcctgcctccccaagtccctgcatgccaaccctgagtgtgcttccaaacccagggctcccgtcatacccatgtcactctgatgtgatgggagacatcacaactggaagcacttggtgaatgtcatacaaaagctactaagtaaaaggtacttgaggccagccccagtggctcacacctgtaatcccatcactttgggaggccgaggtgggaggatcacttgaggtcaggagttcgagaccagcctggccaacgtggtggaacctcatctgtactaaaaatacaaaaattagctggaygcggtgatgcacacctgtaatcccagctacttgggaggctaaggcaggaggattgcttgaacccgggagatggaggttgcagtgaaccgagattgcatcactgcactccagtctgggcaacagagtgactctgtctcaaaaaaaaaaaaaaagatagttgagaggtggcctaggtggaccagccatgcatggcttcccagaggaggctacactgtcccccatcaggttcagcagttcacaagaatggctcataatggggagtgggggcgggggggtgaaagggcaaaaaataatataaatgtatttattaccactgaactgtacacttaaaaatagtaaagatgtaaattatacatgtatattttacttaaataaaaacaatgactcatagaatgcaggaaagcactacacttgggattacagctttacaaagaatacaaagcagggccagccaatgaagagacacacagggagagctgggacagcaggccaccaagctcctgtgccctctcccctgtggaagcagggcacgtcacctcccagcacatcaatgcatttgctgaccagaacacccactgagtttcagtgtccggagttctttttttttttttttgagacggagtctcgctctgttgcccaggctggagtgcagtggcgcaatctcggctcactgcaagctccgcctcctgggttcacgccattctcctgcctcagactcccgagtagctgggactacaggcgcccaccaccacacctggcgaatttttggtatttttagtagagagggggtttcactgtgttagccaggatggtctcgatctcctgacctcgtgatccgcccacctcagcctcccaaagtgctgggattacaggcgtgagccaccgcgcccggcnnnnnnnnnnnnnnnnnnnnnnnnnnnnnnnnnnnnnnnnnnnnnnnnnnnnnnnnnnnnnnnnnnnnnnnnnnnnnnnnnnnnnnnnnnnnnnnnnnnnnnnnnnnnnnnnnnnnnnnnnnnnnnnnnnnnnnnnnnnnnnnnnnnnnnnnnnnnnnnnnnnnnnnnnnnnnnnnnnnnnnnnnnnnnnnnnnnnnnnnnnnnnnnnnnnnnnnnnnnnnnnnnnnnnnnnnnnnnnnnnnnnnnnnnnnnnnnnnnnnnnnnnnnnnnnnnnnnnnnnnnnnnnnnnnnnnnnnnnnnnnnnnnnnnnnnnnnnnnnnnnnnnnnnnnnnnnnnnnnnnnnnnnnnnnnnnnnnnnnnnnnnnnnnnnnnnnnnnnnnnnnnnnnnnnnnnnnnnnnnnnnnnnnnnnnnnnnnnnnnnnnnnnnnnnnnnnnnnnnnnnnnnnnnnnnnnnnnnnnnnnnnnnnnnnnnnnnnnnnnnnnnnnnnnnnnnnnnnnnnnnnnnnnnnnnnnnnnnnnnnnnnnnnnnnnnnnnnnnnnnnnnnnnnnnnnnnnnnnnnnnnnnnnnnnnnnnnnnnnnnnnnnnnnnnnnnnnnnnnnnnnnnnnnnnnnnnnnnnnnnnnnnnnnnnnnnnnnnnnnnnnnnnnnnnnnnnnnnnnnnnnnnnnnnnnnnnnnnnnnnnnnnnnnnnnnnnnnnnnnnnnnnnnnnnnnnnnnnnnnnnnnnnnnnnnnnnnnnnnnnnnnnnnnnnnnnnnnnnnnnnnnnnnnnnnnnnnnnnnnnnnnnnnnnnnnnnnnnnnnnnnnnnnnnnnnnnnnnnnnnnnnnnnnnnnnnnnnnnnnnnnnnnnnnnnnnnnnnnnnnnnnnnnnnnnnnnnnnnnnnnnnnnnnnnnnnnnnnnnnnnnnnnnnnnnnnnnnnnnnnnnnnnnnnnnnnnnnnnnnnnnnnnnnnnnnttttagagacaggatcttgctgtgcatgatcttggctcactgcaacctctgcctccctggttcaagccgttctcatgccttagcctcccgagtagctgggattacaggcatggaccacccaacctggctaatttttttgtatttgttgtagagatggggtttcaccatgttgcccaggctggtcttgaactcccagcctcgggtgattcgcctgcctcagcctcctaatgtgttgggattacaggtgtgagccaccatgcccagcctatttatttaagttttattttaggtttggggrtacatgtgaaggtttatcacatagatagacacctgtcatgggggtttgttatacatgtcatcactcaggtattaagcccagtacccaacagataaattccttattaaatgacaaaagatcactgggcgatgaaagctgagctcatcagacacccctgttttatttgctgtagctattgggaaagctatactctttttctgccagggttgtttaagctggtagaatgaggcttggctattttgctacttacgagatgacaacctccctgagaatgaagacagtccagggagccaggcgtgggtcatgcctgtggtctcagctactggggaggctgaggtgagaggactgcctcagcccaggagttcraagctgcagtaagctatgattgtaccactgcactccagcccaggtgacagagcaagaccctgtatcaggaaaaaaaaaaagagagagagaaaaagaaagaaagtccagggaaaagcagaactaaaagagactgagaccaagttcaaatcaacattgtttgagcctctggctccagccatgcctgaagtcatcctatctctgatttttcaattatttaaaccaatagaccscccccccccggctgttttcatgtttaagttagctggaattagggtttctagtagttatagcggaaagcatcccgagttttacatccctgcttatgaggaagaagggtttctccccttcatattaatgccttggcttaacctgggccctggataacgtccccaccaaccttctccgcaaccttgctccttcagcgaccatcctctctactgattcctttccccttaatgtttccaacaaaatcagatcttcctcaagatagaaacaaacaagcaaacctttctaccttctcacacttacaacctgccttatctctgtcctccccttttcagccaaactgtgtagaacatctctccacatttttcctcccacttcttgaattttttttttttttttttttacgatggagtcttgctctgtcacccaggctggaatgcagtggcacgatcttggctcactgcgacctccacctcccaggttcaagcgattctcctgcctcagcctcccaagtagctgggattacaggtgcgtgccaccacrcctggctaattttagtagagacagggttttgccatgttggccaggcgggtctcaaactcctgacctcaggtgatccgcctgccttggcctcccaaagtgctggaattacaggcgggagccaccgtgcccrgcctcctcccacttctttaccttccactcattcctcaaaccactaccatttggcctctgctgaaactactctcaccaagtcacgcagcagtctcttagttatcaaygccttctagagaccatggcagcrcaccctgtgatcccccacggatccctttatatcatttgtgtttgtgtttgcccatttccccccgacacacacacatcttatactcactcccacactccctggtctctggtatgtgatttctgttccaacagttaggactccagatttgtttttttttaatttcttgagatggagtctcgctctgttgcccagtctggagtgcagtggcatgatcttggctcactgcaacctccacctcccaggttcaagcgattctcgtgcctcagcctcccaagcagctgggattacaggcacgcgccaccacacgtggctaattttttatatttttggtagagatgaggtttcgccatgttggctaggctgstctcaaactcctgacctcaagtgatctgcccaccatagcctcccaaagtgctgggattgataacagtgggattgattacaggactgagccaccatgcccagcacttttttgttttttgagatggagtctcgctctgttgcccaggctggagtgccgtgggacgattttggctcaccacagcctccgcctcccagattcaagtgattctcctgcctcagcctcctgagtagctgagattacaggyatgtgccaccatgtccagctaatttttgtatttttagtagaggtggggtttcactatgttggccaggatggtcttgaactcctgaactcatgatgcgcccgcctcagcctcccagtgttgggattacaggcgtgagccactgcgcccggccatcttagaacatttttttttttgagacggagtctcgctstgtcgcccaggctggagtgcagtggtgcgatctcggctcactgcaagctctgcctcccaggttcacgccattctcctgcctcagcctccccagtagctgggactacaggcacccgccaccacgcctggctaattttttttgtatttttagcagagatggggtttcaccgtgttagccaggatggtcttgatctcctgacctcatgatccgcctgtctcggcctcccaaagtgctgggattacaggcgtgagccactgtgcccggccttgaacattcttaggtgagtcaggatttatccgtcttcccctcttgggttatttatttgtcttcgagttccaggatgggcacttgatccaatcagctactcagttctggaaatttcattgggaatctcagaaaagaggcatgctccttctaggagagttgctaagctattagggtttaagcttggagctacaagaagctattttgccactaagagaggagagcctgcctgagggtgaagccaaatgcatagggaaggcagaaccagagatggtgagccacaggttcctgatatcttctggcccctgtgttcacctgtctgaatctgtccgctctggacttttcrattacttgggccatagcttcctttactgtttaggccagctggagccgggtcaatcagacactggatgggtggaggatctcactgtgctcatgctttcaactaccctccgtactttaattgttctcgatttctctaactggccttgatgtctcttcttagctccagactatatgcccacagacgtcccaaaagcacgtctggaattgacctcattattattattgttattatttttgagatggagtctcgctcttttgcccaggctggattgcagtggcgcagtcttggctcactgcaacttccgactctggggttcaagtgattcttctgcctcagcctcctctcaagtagctgggagtacaggcgcctgccaccaagcccggctaaaatttttgtatttttattgcagatggggtttcaccatgttggtcaggctggtctcaaactcctgacctcaagtgatccgcccgcctcggcctcccaaagtgctgggattacaggcgtgagccactgcgtccggccttgacctcaattctttttttttttttttttkttgatagggagtctagctctgttgcccgcgctggagtgccgtggcgccatctcggctcaccgcaacctctgcctcccgggttcaagctgttctcctgcctcggtctcccaaggggctgggattacaggcgcctgccaccacgcccggctaaattttttgtatttttagtacagacggggtttcaccatgttggtcaggctggtctcaaactcctgacctcaagccatccgcccgcctcggcctcccaaagggctgggattacaggcgtgagccagcgctcccggccctgacctcattttttttttttctatttttaaaatagggattctagttctgttgcctgggctggagtgccgtggcgccatctcggctcaccgcaatctctgccttccggattcaagctattctcttgcctctgccgccggagggactgggactacaggcgcgcgccaccatgcccggctaatttttgtattttagtagagacggggtttcacnnnnnnnnnnnnnnnnnnnnnnnnnnnnnnnnnnnnnnnnnnnnnnnnnnnnnnnnnnnnnnnnnnnnnnnnnnnnnnnnnnnnnnnnnnnnnnnnnnnnnnnnnnnnnnnnnnnnnnnnnnnnnnnnnnnnnnnnnnnnnnnnnnnnnnnnnnnnnnnnnnnnnnnnnnnnnnnnnnccaccccctcccccaccactaccaccatcttcatctccagcctcagagatgcaaactcctggaccgcctgcccctttcctcagataaaccaaggtcgtaagttcaggctccgcctccccgcagggcctccccaaggtcacccgcttctttcctcgctcagctccttggtggcgttgtccgcgtgcccctccacagcggggccggcgctctaggctgcagcgggccgttcacacagcctcatcatctcgctggtttccggtgctcggcggctactctagccctcagccgggccctgggactctatcccctaaggccggttctctatggtcgacatcgcccctttgtcccgaatttcctccgggaggacgctctggtgggatccaagcacttcccccgctgcgtctgtggtcgcttttaggtgcaactggagaaggcactgaagccctacgagattcacaccgtcttcggtctcctggggtcggcgccgagtgggaggatggcggaagtaagtatgaaggtgcccttccctcccgccgctgttctctatggtckcttccttcagcgacgggaaagggggtcctgacgcctgcgcggaaccgggctgggcgctcgtcgcgtagtgggtgggggcgcwgggagcgggagccgccgccgccgccgccgccgccggagctaacctcggggaccgagatgcaggtgggaccggaaccggaacccccctcttcaagtaccttttccctctccgcgacccggccctggcgcccgagaggattcctgggtgggggtgggcgtggagggccgggggctggagaggcactcggccccggagagtgcagcagacagggctggtcccgaggtggatgcggccccggaaaatgggcggctggggggtgtccagggagtagggtcggrtcggagtatatggaccaccgggcccggagggtccgagccgagagcggagcctgcaccctccacctcccgcccttcgggaaatatcagaactgagccaggaggcaggtgcaccgggaaaatgtgtctgagtcctgcttggcagaagagaaactgagtcaccagcttaggagtcgcagggtcagcgggcctgaagggggctgggtctgtctgcggtgcggaggattgggtgggcctgtgtgagccgaggtggccgctrgctggagattggtttgcacttcttggctgggttcccccgtgctccatgactcctgcatctcctgattgtttctcgttggtttggagttgtccctgcggttggagccatctgagcttgtagggtcgaggcccaggaggaaggggagggttcaccgacttacagcctggctgtaggtttgaacaggagtctgaggtcgctgagggtttggggaggctttcctgagctgctctggccccagtcctggggctgtcaccttccagtattgcgtggcgggaggagcgctaacaagagccaagggttgtaaattccacacccagctctgccactttctagttgtaagaccttgagagggctcctcctttctctaatttctattttagaaaattggaacaataatattcttctcccacatgaagatagtaacaatggcagtcgttcagcggatgcttactttgcgttcagcgctgacataccccattccatgtaattctctcaacatttcgaggggagggatcattagctttgtttaacagatagaaaaacggaggctcagagaggacgtggaatttgttcaagataacatcgctcataaggtggctggactgggtgctcataaggtggtttgagccctggtctgactcaagtccatggccttaaccagaaggctaacctgcctttagggcatactccccagtgggagaagaggaaggtgaaaaatcctagggccccagctctccctgtgatgttttgtttacgtgaggccagcaaagacttgacctgagccaacccagtttctcctctggggcccctgcggcctctggccccagactgaagggataccaaagaagtgggctgtagctatttcacatctccttcacgcagtgcgtgggtgctggactctggggtcagctttcaagacaattactgttttggtccatcatgcatccatcctcattaatgaatcggccccctccaaagagttggaccctaagatgcgtgaggcaggctctctaaggtctagaatcccagctcctctctagccccctgcgagctggggcggtgaggtgctatggctgaggctggcccagccgggccctggggacagggactatgaagtggggaaaacagtagacttggagttctgaaacttttctgagcttcggtttcctcatctgttcgagaggtctttgaaacctctcagggaaaggtaagataaccaagtgggagcctctagaatggctcatgggaagtgtgacatgaatattggaggatccgatgtagagggggggtgatctggaaaagttcccttttttagggggaaggtgctccaaagccctctactgctggatccaaagctaaggaaagtgggggcaaatgtggcaggctcggggcaggttagacgctggggagccagttggctggggcctgcagggtgccaggatctgggagagggaagggaggtgttgggctcccttcccccattgctctctgcggagtctgaagtagggtcggacgtctctggctgggggtgggatgcagcctccggtgcgccctcagcagtgaccctcgtgtgtgcctctctcttcctttcgcagctgctgccgcccacccctcgtcttctggctgcctccctctttgtgccccacaggctccccctctccacctcctggggcccatcatgaatggtgccccttccccagaggacggggcctccccctcgtctcccccgctgcccccacccccgccccctagttggcgggagttctgtgagtcccacgcccgggctgcggctctggactttgcccgccgttttcgcctctacctggcctcccacccccaatatgcggggcccggggccgaggctgccttctcccgccgttttgctgagctcttcctgcagcactttgaagccgaggtggcccgggcctctggctccctgtcgccacccatcctggctcccctgagccctggtgcggagatttcgccacatgacctgtcccttgagagctgcagggtgggtgggcccctggctgtgctgggcccttctcgatcatctgaggacctggccggccccctcccttcctcagtctcttcctcctctacaacctcctccaagccgaagctcaagaagcgcttttccctgcgttcagtgggtcgctctgtccgaggctcagtccgtggcatcctgcagtggcgggggaccgttgaccctccctcctccgctgggcccctggagacctcgtcaggccccccagtcttaggtggaaacagcaactccaactcctctggcggggctgggaccgttggtaggggactggtcagtgatggaacgtcccctggggaaagatggactcaccgttttgagaggctgagactcagtcggggagggggcgccttgaaggatggagcagggatggtgcagagggaagagctgctgagtttcatgggggctgaggaggcagcccctgacccagccggagtgggccggggaggaggggtggctggrcctccttcagggggaggagggcagcctcagtggcagaagtgtcgcctgctgcttcgaagtgaaggagaaggaggaggaggaagtcgcctggagttctttgtaccacccaaggtgaggccccttggagggtgggtgactgagagcaagtgagagagtgctcagagtggtcacagccctgcagataagctctggggtttaccagcccatggccctggtgtcgctcactttttgttggtaaagctggctcttggctctgtgttagcagctgcgggcaggactgagaaagcagtgtgactgccttttgtctaacttcccgaggatgtagaaggaaagatgaatgtctggagggaggggaagagtggtctttggaaaccaaacacccagatctgtttctttctcctgacttaggcctctcggccccgactcagcatcccctgctcttctatcacagacgtccggacaaccacagccctggagatgcctgaccgggagaacacgtttgtggttaaggtaggaattcaacttcccagccgccggcagtgcttgtgttaaggagaaagccctcagcgcatttaagcaagtggcgtcgccgaaaggaggtatatatatgtgtccagtgccttgagagtgtgtccctggggctgcagcttttctgggatagcggaagacagggaaatgttcttactctcaaaaacaatgcctccacttgaaagagaactgtggagtttttgttgttgtggttgttttagagagacagggtctccctctaagtcaggagtgcagcaacctgatcatagctcactgtagcctcgtgtagcctcgaactcctgggctcaagtgatcgtcctgcctcagccctctaaggagctgggactacaggcatgtgacaccatgcctggctaattttgttacttacttacatttgagatagagccttgctctgccgcacaggctggagtgcagcggcgcgatcttggctcactgcaacctctgcctcccaggttcaagcgattcttgtgcctcagcctcctgagtagttgggattacaggcatgcaccactatgcccagctaattttttgtatgtttagcagaaatgggttttgccatgttcggcaggctggtctcaaactggcctcaagtgatccaccccacttggcctcccaaagtgttgggatcacaggcgtgagccactgtgcctggccttattttattttattatttatttattttttttgagacrgagtctcgctctgtcgcccaggctggagtgcagtggcgcgatctcgactcactgcaagctccacctcccgggttcatgccattttcctgcctcagcctcccgagtagctgggactactggcgtccgccaccacgcccggataatttttttgtatttttagtagagacggggtttcaccaagttagctaggatggtctcgatctcctgacctcgtgatttgcccgcctcagcctcccaaagtgctgggattataggcgtgagccactgcgcctggcctattttattttattttatttttattttttatatttttgagacggcattttactctgtctcccaggctggagttgaagtggcatgatcttggctcactgcaacctccgcctcccgggttcaagcgattctcctgtctcagcctctcgagtagctgggactacaggcgcctgccaccacgcctggctaatttttgtttttagtagagacagggtttcaccacattggtcatgttggtctcgaactcttgaccttgtgatccaccctccttggcctctcaaagtgctgggattacaggtgtgagccatcgtacccggcctcgccttattttatttttcaatttttttagagacaggttctcactatgttgcccagactggtccaactcctgggctcaagtgatcctccagaggtgctgggattacaggtgtgagcctctgtacccggcctccagagagaattcgaatgcatcttgtttgtagacagcctgcatacattgttctcattaggcatggattaagcctcctccctgcccctgccccagctgaggcgtcgtctcatctctgtaggtggaaggtccatccgagtatatcatggagacagtggatgcccagcatgtgaaggcctgggtgtctgacatccaagaatgcctgagcccagggtgagaagcctgacttctgtcgctaagggacatagagtggggttggggagcagccttgcgcctctcacctggtgactttcctcccagcaccatcttccctgtctctgcagaccctgccctgctaccagtccccgccccatgaccctccctctggcccctgggacctcattccttacaagggagaacacagacagcctggagctgtcctgcctgaatcactcggagagtctmcccagccaggacctgctgcttggacccagcgagagcaatgaccgcctgtcgcagggtaagggtggagccttagagagctcggagcctcggaacctgccatgcggggcccctgctgtcaggcgccatgccctctccagacgccactgtgcccccatccctgttttccagatgccctaccccaaccccaccaaatgttggtctttgatccctgaacacagccacagtttgctgtttagaataatcatgaccccacgcaggccccaagcaaaccttagccaggcttctgcacccagcctcgccactttttcagtcagcgtcctgccagccaccgctctggctggaaataatggtkgttttctccaagcttctggaacactttgtagaaatctttgttttgttcttactctgcatctctgtgtctgtcaggggcaatcacgttttctcttgactctgtactttttggtctgaccaaacacacatacccgacccacacacacaaacacacaaagatgtgtcacccagtcccaactcatatttctagattcggcctccmctatagccttttctcctgaccctctgttctgagttccagctgcacagtgcctagcacacaggctgtattcagtgaatgaacacatgaatcatggaatcttagatctagagtggaccttgcatctcatcagatcttagtagctaagaccagggagaggacacctgagggtcactgaggaagacaggggctgcgccaccctgtttcccaagccatgctgtctgtgcaccacacgcctgtcttctgagcactgcctgcctatgacatttgtgtaggcagtggcctgctgttggacagacttggaggatggccctagtgcatacctggccctgctctgtgtcccgggccaggatggggtagctaggatgcctgagatgagctccttgttctctagaggctttcagctgggttgacatcactccctatagaaagcttagtgtcccctgagcagcacaagcaggaatcacgttgggagctcaggaggaagagagcaggggaaggtgggagagacagggactgcgacgccgaggagaggagaggacatgcctggggacgtgaagggcaagagcagagacctgcggggagggcccaggatatggggacaaattggatgggaaattgggttaaagtggaagagacatgaatacaaggtaaggtaaagctcaagttggtgtgggttgggggagtaatagaaggagcatctttgatgcctcttaagagttaggggctttgtcctatagttcaacaaaggacacctttttttttttgtttgtgtgtttaatttttttatttttaaaaaattattgtttgtgtttttgtttttgagatagggtcttgttatgtctcccaggctggagtgcagtggtgcagtcacagcttcctgcagccttgacctccctggctcaagccatcttcctgcgtcagcggcttaaggtgctgggaccacaggcgtgtgccaccaccacacctagctaattttttattttttgtaagagatggggtctcaccatgttgcccaagttggtcttgaactcctgggctcaagtcattctcacacctcagcctcccaaaaggctgggattacaggcgtgagccactgtgtgcagccagaattccktgtgtgtgtgtgtgtgtgtgtgtgtgtgtgtgtgttttgagacagaggcttgctctgtcgcccaggctgcagtgcagtgaaacaatctyggctcactgcaacctcygcctcccgggttcaagcaattcttctgcctcagcctcccaggtagctaggattacaggtgtgcaccactacgtccagctaatttttgtatttttagtagagatggtgtttcaccatgttgcccaggctgctctcgaactcctaagctcaagtgatcctcctgcctcaacctcccaaagtgcgggtattacaggtgtgagccactgcgcctggcccaggactccttttgaatgtcaaaatatttgaggcagctgggcacggtggctcacgcctgtaatcccagagctgaggtgggcagatcacttgagtccaggaactcagggccaacctgggctattatatagcgagaccccttctctacaaaaacatgtatatatatatttaaggcattctgctctccgtttctgcaacagtctttcagctgttgattcagaaaaagatggagacacattgggactttagaacctccttgcaataactctgcagtccctcagcagcgcaggaagcatcagttaggagccattggtaaaagcatcaggggtcactacccacagagctgtttggcatcttggccagcgactgcacacagggtagactgctggtgaggagatgggcccaggacagtcctttagaagaggaatttcttgggttctcagctttgccctttttttttccaggggcatatgggggcctctcagaccgcccctcggcatccatctcccccagctctgcctccattgccgcctcccattttgactcgatggaactgcttcccccagagttgcccccccgcatccccattgaagagggacccccarcagggacagttcatcccctctcagccccctaccctcccttggacactccggaaacagccacaggtaccggaggtgtgagtgtgcaygtctccaggcctgggtgcctaccttcctgaccacctctcctgggatcccgagggagctggcccaggggagttggggacgcatgtggggagcaggcgccttgaggggaaggcaaggcttttttctcccaggatgggggaggctgccctgacaccccggtttccctccctctctccttcctgaagggtccttcctgttccagggggagccagagggcggtgagggggaccagcccctctcagggtatccttggttccacgggatgctctctcggctcaaggctgcacagttggtgctgactggcggcactggctcccacggtgtcttcctggtgcgccagagtgagacaaggcggggtgaatacgtcctcaccttcaacttccagggcaaggccaaggtgagccaccctgtgggaaaggctctgttctgtgcatagttggcagtggggtgggggagcactgccgggggagggggtttgtacctggcagggcctttgcctcctacctcacctcccccatcccgccctcagcacctgcgtttgtcgctgaacgaggagggtcagtgccgggtccagcacctgtggttccagtccattttcgatatgctcgagcacttccgggtgcaccccatccctttggagtcgggaggctccagtgatgttgtccttgtcagctatgtcccatcctcccagcgacagcagggtgagcagagcaggtctgcaggggaggaggtgcccgtgcacccaagaagtgaggtgtgtgtgccagaaagatggggcggggaggggggactatcacaaggagaagctttgcttgggagagcagggtagaggaggctgttgtgcctcggggtttggaagggaaagaaatgcgctgataggacacaggaaggcagaaggctcctggccggagccggggcggcagctgagaggtgggcgggcgcatccccattccatcggatcctctgttccattgtctgtctgtctcctggacccatcctggcctcgtctttgccctccgtcgcagcctggccttgggcctgcccttcccggggacactcggtctgatccccttccctcctccctcaatgtctcatgtccctgtctgatctctccctttcccctgccccaccgtcccatctgtccccacgttgcccctccccccaggccgggagcaggctgggagccatgcgggggtgtgcgagggagatggatgccaccccgatgcctcctgcaccctcatgcccttcggagcgagtgactgtgtgtaagtgtggtcctcctctcaccaccgcccatgatccatcttccatggatggggggttgctcaggagatgggatgtggggagacagccacgctcctggggggctgagtgaaggggaggccacggcaggagctcacctgcctccacaatcagtctgttttcttaccattcctatccagaaccgaccacctcccatgacccaccccagccccctgaacccccttcatggacagatcccccacagcctggggcagaagaggcgtcgagggcgccagaagtggcggcagcagcagccgcagcagccaaagagaggcaagagaaagagaaagcgggcggtggaggggtcccggaagagctggtccccgtggttgagctggtccccgtggttgaattggaagaggccatagccccaggctcagaggcccagggcgctgggtctggtggggacgcgggggtgcccccaatggtgcagctgcagcagtcaccactagggggtgatggagaggaagggggccaccccagggccattaacaaccagtactccttcgtgtgagccaaccccacccgctccaccctttttaaaccccccagccctgctcgtgagattgggctgggtagggacagaggaggccgaaatccctcccccatgcttcctgacccttgttggccaagggcatctttgatggtacaagcagaggctcgggagaggctcccgtcacacactacaggtcccctccccagggcaggggatttgkgctccatgagctccttgaggggctyttytggtcagccccaccctgggggccatttccccattaactacccccagcccgaggcagggtgagggggaagggctgtcagttacattaaggtggttgttgttgttgttttaaacaaaatggagaagcataaataaataaaaaggtttatctcggttctatcgtgatggctatggccattgtttgctgtggggactggggacagttgggttgggaaggcagcccactcagtgcccacaggccagagggctggcccaggccagtccccatcattctgcagtgctgtgctttcggagccatccctgtgtctgacagccttgttcgtggagcactaaatgatgctcttggggtctcctgcgagtttttgtcatgggacagtgctgtgaatggcaggcatggtgatctccagcggcccttcctgagttatggctttgtaccctagagagagctggcagtgagagatgggaggcacggtggctgtgctggaagagattgaacgtggcagtcacagggtagccgcagaggggcccaatggcccccttctcaaagccaggctggagggatggcagagggcactagcttctgtcctggccttgccactcactggcctgggcaaggtgtagccacgccgggcctgagcatcctcatctgtgacatgtgaagtttcatcttgagtcagagctgctgacatggtttgcttggcctggacatggtgtccatttgagtttcacattaaaaattcagatcacaggccaggtgtggtggctcacgcctgtaatcccagcactttgggaggccgacgtgggtggatcacctgaggtcaggagtttgagaccaggctgaccaatgtggagaaaccccgtctctactaaaaatacaaaaaattagccgggtgtggtggtgcgcgcctgtaataccagctactcaggaggctaaggtaggagaattgcttgagcccaggaggtggaggttgctgtgagccaagatcgcaccattgcactccaacctgggcaacagagcgagactctgtctaaaaaaaaaaaaaaaaaaaaaaaatcactggcttctcttaaannnnnnnnnnnnnnnnnnnnnnnnnnnnnnnnnnnctcttaaaaatcagaagatccagtgatgtgggtccacttccacatctgccccatccccaccagctcactttgctccctgggagggcctggccctgtgggcatttgagtttataacaccacccccattgtggcacacccctccaccccgtaaaacacaggctctgctcttggaatcagtcttcctgatctgtggctgtgccctccaacagagggcacccctgggcttcccagctctgggggtagtgggtgccaacaaggaggggcctggggctgaagaatcccacccgctgagctcggccttctcccttccccactgtccagctccgcctttcagcatcctgcctcactccccgcccaggcagcaaggagcccacaccctcatgcccctcagcttcagcccccacctccaggaggccctacccacgctcatgaccttgctattctgggccttgtgtcctgtagggagatggacaggagacagctgggcttccaggccacccaggcggggggctagccgagggaagcctgctggctctcctgcttgctctaatttctggggctccccaaaccttggcctcaggagactggggataggaccggccttgaaagtgggggaagctttggagagccgggtgctgggttcttagtgagatggccagtgaaggctgtggtgccccgaggtaagcagggcctgatcccctcctaatcttccagcagcaactggtgctctgaggctccccctcccccagccctgccagccttcagggacctgccttccaaagatgggcaggggagggggacgaggacacccacccactcctcagaccagcatgtcttggctgttggggcctgagagactttccctctaagcctttctttacagatggttaaaccgaagttctgcactcatcagggactggccagggtgtctctgtgtcccatgcttttagctccagccctcaggtgtgacaggaggatcactttccatccctgggcgtggagacccctgtgggaagggatccccgagggcgcctctggctcagcctccctccatggcagttcacacccacagccttccctagagcagcccttctgcagctcctggcgggtggctttccctccctggcttgtttccccctctgggaagccgggggaggtagaaatgaataaccttaaaggcctgttggcaggaatgtgctgccaagcctgccccctgccctctgtctcaggctctcgactccctcgaagctgcccatctctccgtctgcccctctccatgtttgggcattcccactgctgtaagacagtagcccctgtcactcctccaggtgccggtggggagacgccggccagcgccaaaagccttggcgggtgtgagcctgagtccagcggagacggtgggtgctgggccgggtggaggtgccgggggctgtgtctcttggaagagaggctgctaatgctctcctgcacccccaattcagcccactgtcccccactcccctcaggtcacagcaggattctgcttcaggggaggggtttgttggaactgtgaaaaggaggcaggaaggagcaccttgtcctcaactcacccaggaggccgcgcctcacccaagtccaggcagaagggatgcatctgggaggctgaaccctcaagttccatccacccctgctgccatccccctccccaaaagtgggggcctcccttttctttgctctgctgtctcctattctgtcctctgcttcggagtttgagccccagaatggaaagcagccttaagaagccacacttaggaagtccacatgcctctgctcatttcaggaaacaggcctagacagaggacggacttgagcccagggcaccaggccccttcccctcactgacctttcaccctgactctcatccagcctttctgcctgcctgtcctccccttcctgcacccctggtaccctccctcggctcctccagcagctgccttggtggtaaccaagagacgcccccatcctggagcaggggtggggaggggcagctcagagcagctgcttctctgaggaagctgacaccaaggccagcattcagcaacaacttgtggctttgcacccagcgccggggtccccgcccacctggctccctgctgtccctcttccccactgctgctcggacttccctctgaccctggtggctctgtgtctctgctccctttccccctaggtctagacatctgtccttatttcccccagacctgtccccagaagtccacccttccccattcctttggtctggagcccctgcttggtccagcttccccaggccccgacacctttctgtggggtctgcctagctcctgcacgcacacagcatgggcctgatcctgttcccctcgtggacagatgcagcagggcagagtgcagcgcagaccacaggcctctggggctggccacagaaaccccgttggttagagcacagtgtgggatgaggtgaccctcagtgcacgacttggggtgacccctgcccccatcctgagacagttacccctccccctctgccatcagcacattctgtagcctcttgggttacttgnnnnnnnnnnnnnnnnnnnnnnnnnnnnnnnnnnnnnnnnnnnnnnnnnnnnnnnnnnnnnnnnnnnnnnnnnnnnnnnnnnnnnnnnnnnnnnnnnnnnnnnnnnnnnnnnnnnctttgctcaccagggcctggacactaaatcccttgttgatggctgtggcaacccctccctagggtagggttaccatcttcggccctgtccccttgactctctcccctcacttccccttgtccctctaggagccactcacttcctctagcccccaaaagatgttctcccttcatcagtcccccaaaggcttggggtatctctgccactgcttcagcaaatggggtgaggaggaaggagactgcggcaatggaaacaggctccgggcagatgaggcaggaaggggggtgtgaggaaagggacaggtgaggccggggatggaagagggctccgggaagaactggggggatgagtttggaatgggaaattcaatgcagctggggaagtcgaggcaatgggggggcagggtcagtagcagatgacagaaagtgaagtctctccctaccccacttccctggggctggggctacctttgcgtccctcatgagtgacatctcaggctgcagccccactgttccccctctgtcagcagaaatatctctcttttctgaccacctcctgctggagtctcagccagccaatccctgatctggtggaggggggagcccggcctccccctgctccctcataaggaccagctgggggccggggggtggccggctgctcaagtgggacgggggtcagagctttgtggagggaagaaaaacctggagggggcaggagagtaaaaagaagaaacccaggcagacaggcagttggacacactgaggaagaccccccacgagtgggaaccccctggaaggaacacaccggccccggcccccaggaagggagcacaatggaggccgctcatgctaaaaccacggaggaatgtttggcctattttggggtgagtgagaccacgggcctcaccccggaccaagttaagcggaatctggagaaatacggcctcaatggtaagtgtcccttggaagagcggctggtaattaatgccctcctgcacccccaaaacacacgcacacgcatgcacgcgtttctcccttcagggtttcttaaggaagagctgggccgttgtccaatgctcgcagggggaagaagatactgagaaaacagagtcccgagatccagagttttgggaggttttaatgggatgaacttgatgaacctcaaggtggcctgattctcttagccacaaagtcttgggtgtggggggcatgaggctgaaccccaaatgaatctgtccttttcttctttttcctgggtagagctccctgctgaggaaggtaagttactggaatccctgaactctcataaatgaccaccccccaccccgccctgtcccactccctcctccctgcctctttagattctttgagcaaatatcccttcccaaaaggcaaatctccctccctaaaggttagagtcctgtccggggcagaagtctcccaggcgctttctccttgaagcagccaacccttgaactgccccccactttgccgagtctgtttctggactccaggcgagcttcttagcccttctctgggcaccaagctgtctgcccaccaccctagagcctccccactgcaggccggagtccagggcgctccatcccagaccttcacccactagaccttaacccggggccctccccttgcctcctcccccagggaagaccctgtgggagctggtgatagagcagtttgaagacctcctggtgcggattctcctcctggccgcatgcatttccttcgtaagtgtgggagggtctctgggggctggctgggggtgtgaggctgggatcgggcgaatgcggggctcgcagtcactggatcctcccgtccgagtcccgagcatcccattgtacagacggggcgggctggcgcgcagcagcgggtgtgattcgcgtcctcctctctcctcccctgcaccccagaggcaggttttattttaagctttaagggtgttctcagccaaaacaccgaagctaagccaccctcgcggcttcaagagcttggagagctcgggttacccacccgaactccgggctccgggtcccgccgcgatgccggctgcggcgcggggggccactgccactcccggcatgcgccgggcggacggccgctccaccaatccccgcgcccgtcggcgcccctgccccgccctccccagcctcctgacgctgattggtcgaggggaggactcgctcctagtggcgggaaagcgcggcggtgtgatgatgactccaaggagcccggcgcccggtcagggagggcactggcatccctcattacccgcccagcctggccttagcccttccccgcgctccctaggcacccccacccccgcagggcatctccagggctctgcw

SEQ ID NO: 96857 - DNA, 22619 bp, Homo sapiens
tcagtatatatatactatatactatacgtatgtagtatatatatactatatactataagtatgtcagtatatatatactatatactaatacgtatgtcagtatatatatacatatactaatacgtatgtcagtatatatatacatacactaatacgtatattagtatatatatacatatactaatatgtatgtgagtatatatactaatatacatatgtatactatatgtatactaatatgtatactaatatacatattagcatatatactaatatacatattagcatatatactaatatacatattagcatatatactaatatacatattagtatatatactaatatacttatacatattagtatatatactaatacacttatacatattagtatatatactaatatacttatacatattagtatatatactaatacacttatacatattagtatatatactaatacacttatatatattagtatacacactagtatatatatctatatatctggatataagttatttgtcagatatataggtatatattatatgttatattatatattatatatatagtcaataataatttaattgtacatttaaaaataagtaaaagagtatatatatcatgatatattatataatatataatattaagtaatatatactttatattatatataatcacagtttatctacttgttgattgatgggcatttatatatacacacacactcacacacacacacacacacacacacacatatatatatatatatatatatatatatatacacaccatagaatgctacccagctgtaaaaaggtatgaaataatcacattctcagcaacctggatggaattggagaccattattctaagtgaagttaactcaggaatggaaagccaaacatcatcgtatgttctcacttaagtggatgttaagctgtgaggacgcaaaggcctaagaataatacaatggactttggggacttgggggaaaggttgggaggagttgagggataaaagactacacattggatacagtgtacactgctcggtgatgcatgcaccataatctcagaaatcaccactacggaacttattcatgtaaccaaacaccacttcttcccttaaaacctattgaatttaaaattaaaaaaagaaatacaactgatttttgtatgttgaatttgtttcttagttattttttgtggattctttatctacatataaagttatgtggtctgctaacagggacaattaaacttcttttttttccaaattggattacatttctttctcttgctgaggatgtcagtactatgttgaatataagtggtgagagcaggcatacttgctttattcctgaccttagagaaaaggctttccacttttcaccattgagtaggatgttagctataggtttgttgtatatgagctttattgtattgaggtacgtttccttttatacctaatttgctgagcgctttttcttaaaatcaagaattattgttgaattttatcaacgccttttctgcatctactgagatgatcatgtggtttctgtcctttattctgttaaggtattctatcacatttagtgatttgcatgtgttgaaccatccttgcatccttgggataaatcacacttgatcatgatgaacgatctttttaatatggtgttgaatttggtttgctagtattttgctgaggagtttgcatctatgttcctcagggatactggtctgtaattttcttttcttctagtgtctttgtctggttttggtgtcagggtaattctggttctgtaaaatgactttggaagtgtttctttctcttcaatgtattggtagaatttgaaaaggattgatattcattcctctttaaatgtttggtaaaattcagcagtggatccaccaggtctggagattttctttgatgagagacttttatcactgatttagtctcctttcccattacatatctgtttagattttctatttcttcaagcttaagtcttggtaggttttatgtgtctaggaatgtatccatttcttctaggttatccaatttcctggcatataattgttcttagtattctcttaaaatcttttgcttttctgtggtattaattgtaatgtctcctctttcatttctgattttgagtcttctcttgttttttcttagttgatctagctaagggcttgtcaatcttatttatcttttcataaaaccaactcttggtttcactgatttttttcctattgtttctctaatctctacttcatttacttctgctctgatctttattatttccttttttctactaattttgagcttatttgttcttttttttccagttccttgaagtgtgatgttagattgtttgggatcttttttctttttgatgtatgtatttattgctataaacttcgttcttagaagtgcttttgctgcattctataagttttagtatgttgtatatacattttcgcttgtctcaagatattttaaattttccctttaatttcttccttgacgtattggttattctggaatatgttttttgatttccatatatttatgaatgttccacaattcttatcattaatgatttctagttccataccactgtgcatatattacttgatgtgatttcaatattcttaaatttgttaagacttgtttttgtctgtcactttgaaaaaattcaacaaccttcatgctaaaaactctcaataaattaggtattgatgggatgtatcaaaataataagagctatctatgacaaacccacagccaatatcatactgaatgggcaaaaactggaagcattccctttgaaaactggcacaagacagggatgccctctctcaccactcctattcaacatagtgttggaagttctggccagggcaattaggcaggagaaggaaataaagggtattcaattaggaaaagaggaagtcaaattgtccctgtttgcagatgacatgactgtatatctagaaaaccccattgtctcagctcaaaatctccttaagctgataagcaacttcagcaaagtctcaggatacaaaatcaatgtacaaaaatcacaagcattcttatacaccaataacagacaaacagagagccaaatcatgagtgaactcctattcacaattgcttcaaagagaataaaatacctaggaatccaacttacaagggacgtgaaggacctcttcaaggagaactacaaaccactgctcaatgaaataaaagaggatacaaagaaatggaagaacattccatgctcatggctaggaagaatcaatatcgtgaaaatggccatactgcccaaggtaatttatagattcaatgtcatccccatcaagctaccaatgactttcttcacagaattggaaaaactactttaaagttcatatggaaccaaaaaagagcccgcatcaccaagtcaatcctaagccaaaagaacaaagctgggggcatctcgctacctgacttcaaactatactacaaggctagagtaaccaaaacagcatggtactagtaccaaaacagagatacagatcaatggaacagaacagagccctcagaaataatgccgcatatctacaactatctgatctttgacaaacctgagaaaaacaagcaatggggaaaggattccctatttaataaacggtgctgggaaaactggctagccatatgtagaaagctgaaactggatcccttccttacaccttatacaaaaattaattcaagatggatgaaagacttaaacgttagacctaaaaccataaaaaccctagaagaaaacctaggcattaccattcaggacataggcatgggcaaggacttcatgtctaaaacaccaaaagcaatggcaacaaaagccaaaattgacaagtgggatctaatttaactcaagagcttctgcacagcaaaagaaactaccatcagagtgaacaggcaacttacagactgggagaaaatttttgcaacctactcatcagacaaagggctaacatccagaatctacaatgaactcaaacaaattgacaagaaaaaaacaaacaaccccatcaaaaagtaggtgaaggacatgaatagacacttctcaaaagaagacatttatgcagccaaaaaacacatgaaaaaatgctcaccatcactggccgtcagagaaaggcaaatcaaaaccacaatgagataccatctcacaccagttagagtggcaatcattaaaaagtcaggaaacaacaggtgctggagaggatgtggagaaataggaacacttttacactgttggtgggactggaaactagttcaaccattgtggaagtcagtgtggtgattcctcagggatctagaactagaaataccatttgacccaggcatcctattactgggtatacacccaaaggactataaatcatgctgctataaagacacacgcacacatatgtttattgcggcattattcacaatagcagagacttggaaccaacccgaatgtccaacaacgatagactggattaagaaaatgtggcacatatacaccatggaatactatgcagccataaaaatgatgagttcatgtcctttgtagggtcatggatgaaattggaaatcatcattctcagtaaactactgcaaggacaaaaaaccaaacaccgcatattctcactcataggtgggaattgaacaatgagaacacatggacacaggaaggggaacatcacactctggggactgttgtggggtggggggaggggggagggatagcattaggagatatacctaatgctaaatgacgagttaatgggtgcagcaccccagcatggcacatgtatacatatgtaactaacctgcacattgtgcacatgtaccctaaaacttaaagtagaataataataaaataaaataaaaaagacttgtttttggcctaacttatgatctatcctggagaattttctatgtgtgcttgagaatattatatattctattggataaaatattccgtaggtcctttttgtctaaagtgtatttcaagttcaatgtttccctatcgattttctgtctggatgatctgtgaattgttgaagatggggtcttgaagtctcctaccattattgtattgcagtctacttctcccttcagatctattaatatttgttttatatatttaggtgcttctatgttgggtgcatatattaaatatgtttataattattcgatattcacgatgaatttatctcattatcattatataatgacctttaagatcttttatggtttttgactttaagtctattttatttgacatatgtgtagttatccttgctctcttttgaatgattgatggaatagataaatgtcatgaattgttttctgcatgggggcacagtgcaccatgtcacaagagacagtctaagtacaaactgatattgttaaaacatcaatatagtcattgtgggatcaataaaaacttttcatagatttttatacattactgtttttattctgaattgcataagatggacgggcaccctatcttttagtgtttagaacctctaaatgttttaatgtggtaacacttgaaaaacagaaatgaatatgacctagtcccctgctccagagcagctctagggaagagagacatagacacaaggtataacaacactatgtaaatagtgttgggatagagggtctgtaggaagggttggtgtgggagttcagagaactacattcctcctaggggaaacaggagaatcaaataggaacggagatacagagtggggaatagagaagtcaaatggagaataagagggagtgataactgaataggggtagtaagaagaaaaagggagctacattgaggagaatggaaagttgaaagtaggtatggaggggaggagactgacaggcaggaacggagacccccctctggaggcggaaagaggcaggaccacttccggccagggagrgggataggctcagacacaaggagaggcttggagagagcagacgccttctggattcaagaagacgaggtgagctgaggtacctggctttagtgaagaccctgtgggggcttcctggctgcggcttcgacgtgcctgactccacacgcccctaaggtttgaagaaaacctgctggaggtttgggacctaaccgcatcaaagtcgcctttagcggtgcctggacccagttcgcacgggaggaagtaggaggcagaatcccctttgggccacagaaagtaacgatctggactcggttcgggccgtgaaagggagggatgcagacctagttgggaccgcagaaaggaaggatcgagaaatccttcagacggtagcaagaggggaggaggatacacacagttcgggagggagataggagacggcaggactccgtttaggctggagaaagggggcagtaccccgtttgggccacagaatggagggatcgggacccagagataagagtgggcagcatcccttttgagcaacggaaaggaccagactcagacaggagaaaggaggggatatgacccggttggttccggtttgaaagggaagagacaggacctggtagggtttgagaacaggaatacacagaaggttcatacagttggatttgggggtgaggtattcatgttgcagaaagggcggagctgcacacttgcagacgtggaaagaggggggagtggtgttggttggggaaggggtggtgcagagacgtaccgcagagcggagggagggggcttattaaaggaagggaagatgaagagaaatgctgcagagcggagggaggggggtgtattgggaaggggcggtgcgtggcagtaccgcagaggagagatgggcggtgttggggtaggggcggtgcggagtggtactgcagagcggagggagggggctagtgttgggggaagggttggatcgagatgtgatgcagttagaaagagtgggtcggggtggcgccaagatgttctgttgctctgagagcagggggcagatgtgggattgagctggttagaaactgtccggtttaccaaggcgcatgcgcgcggagggcattgaagaatggttcttttgggatagaggtgggcctragatggggggtgggggcgcctctagtcggtgcgcatgcgcactatcgagttgcggagggggcgtgtaaaggggtggggtcgtagaactgactctctcggaggcaaaaggagctgggccttggaaaccagatggcctgggttttttaggtatgaaaacccaggagttgaagggattagggcccaaggttacatgagactcccctaagtcaggataggtgagatgtctgatgaatctccccctccctctcattctctaactcaggcccattcccctcaggctcacctgttactcggcctcccagaaagatggataggagaaatgactacggatatagggtgcctctatttcaggtgaggcctctctgcattctctctaggccayctgccccatcctgagttcacttactgctcttcagaccccttccaccgtgtagtttcataattccctgcctaactcgtctcagtcctcccttacatggtgaaggagaggagaggaaaacctgcctgactctattccttccttgctccctaccccattttaattaaccactgctcagaggaagggaaggcctttgtggaaagggatgggctttagcgaggccaaatggcccagaggatggtaatcctaagtgtgtagggccctctgcctcccccggggagcctggggcttcccttccctccagatatacagactgagaccacagaagaggacagtgtcctgctgatgcataccctgttggcggcaaccaaggactccctggccatggacccaccagttgtcaaccggcctaagaaaagcaagaccaagaaggcccctataaagactattactaaggctgcacctgctgcccctccagtcccagctgccaatgagattgccaccaacaagcccaaaataacttggcaggctttaaacctgccagtcattacccagatcagccaggctttacctaccactgaggtaaccaatactcaggcttcttcagtcactgctcagcctaagaaagccaacaagatgaagagagttactgccaaggcagcccaaggctcccaatccccaactggccatgagggtggcactatacagctgaagtcacccttgcaggtcctaaagctaccagtcatctcacagaatattcacgctccaattgccaatgagtcagccagttcccaagccttgataacctctatcaagcctaagaaagcttccaaggctaagaaggctgcaaataaggccatagctagtgccaccgaggtctcgctggctgcaactgccacccatacagctaccacccaaggccaaattaccaatgagacagccagtatccacaccacagcagcctccatccgaaccaagaaagcctccaaagccaggaagacaattgctaaggtcataaatactgacactgagcatatagaggctctaaatgtcactgacgcagctaccaggcagattgaggcctcagtagtggctatcaggcccaaaaaatccaagggcaagaaggctgccagcaggggcccaaattctgtctctgagatctctgaggccccacttgccactcagatagtcacaaaccaagccctggcagccaccctgcgggtcaagagagggtctagggctcggaaggctgccactaaggctcgggcaactgaaagccagactccaaatgctgaccaaggggcccaggccaagatagcctctgctcagaccaacgtaagtgcccttgagactcaggttgctgctgctgtccaggccctggcagatgactatctggctcagttgagcctggagcccacaaccaggacccggggcaaaagaaaccgaaaggtgagatctctgacattgccatccttaactttgtgcttcttttccatttctacccttctagtttgttcatttcttctataaaagttttactttgagctagtccctgtgttcagataggctgtggaagatgctgagaagaaggtgatatagtttctgctccctagcagttcacagattggtgaggaaataagacatccatacactcagctacaacctgtatgtaatactacttgtatttaaatagtagttaccacgtgccaggctttgtgttgggtacagttacacagggtatgtctgaatgtcttgaaagtaactcttaccaacaagggatcataggtcccagttttacacttaagaaaactgagtctcagagaaatgaagtgacttgtccaagaggtaccagccagcataattggtggtagccagaggaagagaaagacccttaggctcttatcttgagttgttcctggcctggcagaggaacgaaactccttcctggaagacagtgaaagataagctcaggactcagggtggccaatggcaagrtcaggatcaggctccactacagcaaggctgagggagggggttagagggactttctgtctggagcaggcaaggtgaggagacagagccatctctttcacctggtgactctggaccttccttctttctgatgatgaagtccaagcatctgaatggggatgagagaagtggcagtaattacaggcggatcccatggggccggaggcctgcaccaccgcgagatgtggccattttacaagaaagggtaagaatccaatgctgtccagtctcttctcttcttcacttgccctcttctctgcctccttccaagttttctgcaagcatgttaagatctctccatctattcctctcctcccaggctaataagttggtgaaatacctgttggttaaggaccagacaaagatccccatcaaacgctcaggtagtgtcctaccaaccctcctccttgagctctcctctccactcccctctcctcccatagtctgggagtaacactttatggcctctttgttctgtcatatctccacacctgccctccttgcactctgccatggctggcatctcccattaactcacttcaggtctctgattgcactgacccaacaggactggcaaaagggctgcagctctgtggcccctgctaagctcagctactctcacctctccttttctacagacatgctgagggatgtcatccaagaatatgatgaatatttcccagaaatcattgaacgagcaagctacactctggagaaggtgaaggggcagtgctggcggatgggcgcaatggggaagctttgaatcgagcaaagacatacatgtcccttttggagagaatcacagaaacatgctaatccagccccattactgtgtgaatgggcagacagtggcctagggagaggtgtagatttgccatgggtcacacagcatgtcagtgatgaaaacatggctaggacagaagccactcaaattagtctcagcttctattcatagttggacatattctgcatgtatttcagatctcacctctcccttgtatccccattttctgtctccctagattcctgctcatcacaaagatgatgttgatgacaatagtacatttgctgtgtgtttactgggtgccaggcacttggctatgtgctttatgtgcattatctcactgacttcttacacatgcagaccccctaagtacactgggagttttaggatgcccggaaagttcactgatacctaagctgaattttgtgatctcacaggctattcttttacttggcagatgtttcgagtcaatctgaaagaaattgataagcaaagtagcttgtatattctcatcagcactcaggaatcctctgcaggcatactgggaacgtaagctgggaaagggctggagtgggaaggaagcttctgcttttatctgtgctgctaccccttctttgtcctacttcccccatcctcttagagagtcaggaaaaacagggtctcaaaagccctgtctcagcacctgcacatagttggagccctgctcacagtagtggcacctgattatgattgactgaagggtataggagcctagggtgggacattcctgctgtcaggtttgctgtctctgtagaagcttcccaggaaagcaggcctgtcattgcttgcctcttccgatggagtgcctggcctggctttgrcagagtggttctcaaggagggcttcctggtgtggctggatcagtatgcatgaagcgcaagagtgtcagtggggctgaaggttctgggagagaaagaagggactcacattgactgagtgcttgtgttgtaccaggwtgacagccattcttccatcttcttggcaacctgaggaagggagaatatgattttcccattttactgaataatagaccaaggcttgcaaggtctaagtgccttgcccagggtggcatagagctggaagcagagactgggcagaattctgtatctgaggaatctgggagaggttagcctggtgagctggctggtgtatcttttgcggatggctgctgaaacataaaccttctttctgtcctgttgaaacataaaccttctttctgtcctgttattcccttaggaccaagracacacccaagctgggtctcctcatggtgattctgagtgtcatttttatgaatggcaacaaggccagtgagggtgagtggctgggcatgcagctgaatgggcggccatggtctggattccatgtgttcaatttctgtccctgtctcctcttgcctcccctcacagctgtcatctgggaggtgctgcgcaagttggggctgcgccctgggtatgactgggctctctcagcgcttgctgtccgtgttgtcctttggcaagagaggatggtcctaggattgcatcagtctggtggtctggtggagcgggtggggtgctggactgggtagagggcccagggttctgacctgggtggatgacgggcaaatggtcctgaactctctgctgtctctctccttaatgtcctctgtctgttctaagctgagatgttagatagaccttcagggatccctgacaaagaggcatctggtcttaactgcttgcttctagtggccatgtgctcattactttcttcacttcattgagactgccccatgtgctagagaggtctcttccatgttgggaaatgcctctgccctcatctgggcagttctgatctgtgttcatgggttatttttcccattgtcagggtgaggcattcactctttggggaagtgaggaagctcatcacagacgagtttgtgaagcagaagtaagtggtgtttggggctttgtctggccctgaagtgttctgggtatactgatctggttcagaaagtgcttagtcagtgcctttcttatactagctttagagggatggrcatcctgtgtcctagaactgatactgtctaaaattcccatgggcagacctttccaggactgggccagactcaacacaaggcccttgcagtggggtgcgctcagagcagagggccttaagaatggctcctctgtttacaacacacccaacaggaatctgggcttactcctcacaggtggcatgatactttggccttcctgtgacatcatgccctatacatgtctcccctggagaagcccaagggactgctttgcacagggccagtgggaaatggctcagtattggaggccaagaccataaactgtgtttggtagtgagtctggggctggagggtcttagaaatccctctccaggggctgtttgtatttgtttggaggaggttgccacctggtgtctagtgcttagacagcagggttgcttggttagaaacaagtttcatttcctttttccaaggtacctggagtacaagagggtccctaacagcagaccacctgaatatgagttcttctggggcttgcgctcctaccacgagactagcaagatgaaagtcctcaagtttgcatgcagggtaagaggagagctgcccgagcttggcatattaaggcaatgggatacccttggctggggcaggcaatgcacagggatgggcaggtacagagcagcctgcagctcatatataaacatgtggagcctcctttatgtcccagggtgctgctagatatatagtttacatcatctcattcattcttcatactttgtattaatcagcatgggctgccataacaaaataccatagactgggtggattaaaaaacaaatttattttctcatagttcttgagggcgagaatcctaggtcagggtccacgagggtcagttcctgttgaaggctctcttcctggcttgcagatggctgccttcttgctgtgtcctcacatggctttgtgtgtgagagagaagagagcaagctttctggtgtctcttcttataaggacactaatcctgttgatcaggaccccacccttatggcctcatttaaccttaattatctccataaaggccctatctccaagtacaatcacactgggtgttagggattcaacatacgaatttgggggcgggcacaacccttcagttcataacatatttacgctctatcatttcctgtaattataaagacacttaggctaagtgaggttaagtaacttgtccaaggtcatatagcacgtaagtcagcagagctgaaactggagttcagaactgacccatgatagagccccaataactgagaagtttaaaaaagtattgctactagtttaatacaaagcccgtaggttaatacatgattactagggttgttttcttattatgattatcatccccatttcaggtgcagaagaaagaccccaaggactgggctgtgcagtaccgcgaggcagtggagatggaagtccaagctgcagctgtggctgtggctgaggctgaagccagggctgaggcaagagcccaaatggggattggagaggaagctgtggctgggccctggaattgggatgacatggatatcgactgcctaacaagggaagagttaggcgatgatkctcaggcctggagcagattttcatttgaaattgaggccagagcccaagaaaatgcagatgccagcaccaacgtcaacttcagcagaggagctagtaccagggctggcttcagcgatsgtgctagtattagcttcaatggtgcacccagctccagtggtggcttcagtggtggacctggcattacctttggtgttgcacccagcaccagtgccagcttcagcaatacagccagcattagctttggtggtacactgagcactagctccagcttcagcagcgcagccagcattagctttggttgtgcacmcagcaccagcactagtttcagcagtgaagccagcattagctttggtggcatgccttgtaccagtgccagctttagtggtggagtcagctctagttttagtggyccactcagcaccagtgccactttcagtggtggagccagctctggctttggaggcacactcagcaccacggctggctttagtggtgtactcagcactagcaccagctttggcagtgcacccacaacgagcacagtcttcagtagtgcgcttagcaccagcactggctttggaggcatactcagcaccagtgtctgttttggtggctctcccagctccagtggtagctttggtggtacactcagtaccagtatctgcttcggtggctctccctgcaccagcactggctttggaggcacacttagcaccagtgtctcctttggtggctcttccagcaccagtgccaattttggtggtacactaagtaccagcatctgctttgatggctctcccagcactggtgctggctttggtggtgctctcaacaccagtgccagctttggcagtgtgctcaacaccagtactggttttggtggtgctatgagcaccagtgctgactttggcggtacactaagcaccagtgtctgctttggtggctctcctggcaccagtgtcagctttggcagtgcactcaacaccaatgctggttatggtggtgctgtcagcaccaacactgactttggtggtacactaagcaccagcgtctgttttggtggctctcccagcaccagtgctggctttggtggtgcactcaacaccaatgccagctttggctgtgccgtcagcaccagtgccagcttcagtggtgctgtcagcaccagtgcttgcttcagtggtgcaccaatcaccaaccctggctttggcggtgcatttagcaccagtgctggcttcggtggggcacttagtaccgctgctgacttcggtggtactcccagcaacagcattggctttggtgctgctcccagcaccagtgtcagctttggtggtgctcatggcaccagcctctgttttggtggagctcccagcaccagcctctgctttggcagtgcatctaatactaacctatgctttggtggccctcctagcaccagtgcctgctttagtggtgctaccagccctagtttttgtgatggacccagcaccagtaccggtttcagctttggcaatgggttaagcaccaatgctggatttggtggtggactgaacaccagtgctggctttggtggtggcctaggcaccagtgctggcttcagtggtggcctaagcacaagttctggctttgatggtgggctaggtaccagcgctggcttcggtggaggaccaggcaccagcactggttttggtggtggactgggcaccagtgctggcttcagtggcggactgggcaccagtgctggctttggtggtggactggtcactagtgatggctttggtggtggactgggcaccaatgctagtttcggcagcacacttggcaccagtgctggctttagtggtggcctcagcaccagcgatggctttggcagtaggcctaatgccagcttcgacagaggactgagtaccatcattggctttggcagtggttccaacaccagcactggctttactggcgaacccagcaccagcacgggcttcagtagtggacccagttctattgttggcttcagcggtggaccaagcactggtgttggcttctgcagtggaccaagcaccagtggcttcagcggtggaccgagcacaggagctggcttcggcggtggaccaaacactggtgctggctttggtggtggaccgagcaccagtgctggctttggcagtggagccgccagtcttggtgcctgtggcttctcgtatggctagtgaggtttcaggtaactgcaatatttccatagccaggacccacagggatgggtacaagagctgggagatgttgtaagaaacactaaggcaggacagcagggtggaaaggtgagggcaattaaggaattatgagaagacagtgtatttggtgctaaaatgtgttcctatttgttttgttttcagatttattccccatgtttacagataccgctaataaattgcagtagtccttcccatggagccaaagtacatccttggaatctttgtccacacagcagtcaaggcagttatggccaatcagctgagggtgtcatgtgatggaaaaatctgtttgctgttcctgctttattgtttgctttctgtgtgctgtcatattttggtatcagagttacattaaatttgcaaaatgaattggagttttttctgtcttttaatgtgcttaggtagttgtggagtggcatcttgggttcgtagaagagctggagatcagcatagctctttggagaatgtgggtctccagcttttggctcaaaggcaaatatgatttcagcaggatagaggcctggggaaagcatggcaggcaagaggataacaggttgaggaaagatatggagagggaaagcctggagcagaaggcaaacggagaggcttctggacagtaagtacagattgattttgaatcactggtgtaagaatggagggaagggcagaggtcactaggggtggacataagaacaagggagggtttaattgggataggagaggaaaacttgggcatattgtatagactgtggggcaaaagctaacaggaacaggagatagatatggaagagtcaggaattgactgaagtagcccatccctgagaaggtgggatggaatagggtaccagagaagacaaccctgactttgaacagacttaagggtggctgtggatgcagataaatatagatctgcttcaagcagggatcagcaacttctgtagtagacaacaacaacaacaaaaggagaggtggattatacaaggtttaggtcttgctgggtggttgtgatggaaggacaagggaacaaaggcagcaagtgtatgagtctgtctctttaccactgggtcactggtacctggcttatggtagctgcctggagagtggctgaagagatggcccatagtatccaacatagttagggacagaacactaaggatagattgggggacaatagagcattcaaaggactctgctcttgatgctgtacagcaacaaatattgttcattcaaaaaatactacagggctgggcacagtggctcatgtctgtaatcccaggactttgggagaggccaagatgggaggattgcttgagcccaggagttcaagaccagcctggataacatagtaagacttcgtctctacagaataattgaaaattagccgggcatggtggtgtgcacctgtggtcccagctccttgtgagagaggctgaggtgggaggattgcttaagcccaggagtttgaggctgcagtgagctgagattgcaccactgcacttcagcctgggtgacagagtgagaccctgtctcaaaaaaaaagaagaaaatactacatatatgcctactgtatggaggcacactgctagggattcagtggatgacagagagttgtaaggactggggtagtgggtgggcagtggtcagacagttggatgcttacgtttaagaagtcagaccagggagatgataccaaaatccatggagtaggtggttgaaggggagaagatgatcactggagttgagggggtcaggggactgtgaggccagagtattggttggatcattcacataaacagtgaaatcactcaggatggcagcaagagttggagaagaaaggagcacttggctcaagtgccagattcttccctgagtataaggatgaaagtgtcatgcccacagccaccttgctggaacaaggcccacaggaactcacaggcacctatcttctcccccatctttggaggtgctactgtagaacttttccctccaggaaatcctcacccattccatgccctcacagcagcagagctgggtcaggattagggtcagtaccttgagaacaactggaaaagcctcgccatgacctcctcctctcctcttgtaggcagtaagtctttattcgtcagagaataggaattaagaaagaaagtttcctccagagctagatagctccttggttgcggccagcaagcgaggcttgtttgggagttgcggaggacttcttcactggaagtggggtgcctcagtgaggccaaggcagagtaggagaagagcaaagatagcatttcctaaaggtggaaggcgatgaggacacaggcagtttgacttcttggaaagggctcagtagtgggctgggacagtatccagggcttcctcaggttcccgggtgatgtccacattctgaggagagagcgcaggattaataggaaggagacagcagtgcagggccccaacctctcccctgcctcttgtcttcattgccaggctcccctctttcagccaggcccggatcctgaccctcaggtaggcctgggggaatctcagcctgaggccttttaggcgggaattgccccagccttgcatctccatggtgcctcgtgtctgggttgtggtttctgcatttctgggtgctgtttgctccatctgttggtgcaaaacacccaggcttggtggggttggggcagcctttctgtggataaggtgctttcaccatgtgctgtgtccacagccagcttgggccatggagtcccccacctacctcaggcttctcccggtgtgtgttcacggcctccacattcaggtagatggattccactttgcagccttagaaaagaacaatccatctgtccataggcccccaaggtaggcacaggtcttccctgaggtatcacctcccctcccccatcaccagccacacccccagcttcatactgtgtacagatcatgactcgcctgtatggaggagaatttagacagctatgtgatgtgtggggaagacaccaggcctaagaggcagccaacagggtatcctgtcacctctgcccctaacagtcttagttcgctgagcttcaggtgctcatttgtaaatggggatggagatgagagatgaactctggctgcccacagctcttgaggtccgcaggacagcagtctcatctatgtaatattgatgtagctctgcggatcctccaagccgtgttaggtggtgaagaggtggaagagtcctggggccactgccttgggcgatcagtgccaggcaaagtttatctggaggacaatgtggttgtggcaacaccaggagtatggaagttcacctgggagttttaggaaacctgaagacggatgagggtgcatcattggggcttggggctgacagagggggcctaatgcctgtggaagctcccttagcttcatccctgtggactgcaccttactccaggcttcagtaggtcatctgccctgttcgcaccccagaatagatttgattctgtccctcccctgttcatgaacctttcatagctaatgtcccaagaaagaccctaaactgcccaggctggtctttgtgctctttctccaatacggccctaacctataattttcctctggtcccctttggggaatcccccttccacagcttggtgctctgtgctgggtgctctggcaaagacacagagtcagagccagccccagatttagaaaccatcctactctttccctgttatcctactaccatcagtcccacccccaccacccactaagggaacctcctgcaggacacccacccaggaaacctcctgcaggactcttctgggcaaatggtaggcactagggccatgctcatagcctctatatgcctgtcctttgatcagggtgggagtacttaccataagccacaggagtgagtttgagcactgtgtgcagagggcacttgagatatggaagctcatctagaaaggaacaggaagcagccctcagaggcagggtgctggccaggacacagcctccccaggcccccaggcttgctggatgctccccattccatgtccccttgccgtggtggggcctcaccaggggcccactccccacaccctgcaggggcagcactgagagcacctgggaagagaggaggagagcagggaggcaggaatgccttggaaaatggtggtagactggactgggtgtcctgcaggagggttgggccggccaccctggagacggccaccacctcactcacaggacaaatgagacccaggcaggcttctctcccgccccaagcctggggccttcagcagaccccacaccacaaaggcccacagttcacgtcagcaagtgttttttgagaccctgctgtggcagtggacagctcccacagccttctcccagcctggcccgctccctctgatcatccctgcctcaggcctggtgatggacaagcatttgtgcattcacttgtttccagttattgacattatgcataaagttgttctgaatattcatatgcattcttgtctgggtctatgtttccatttctcaggcaagcccaagaggtggggacagtaagcccatttcatggtctcagccaactgaggccttgagagggaaaatgctctccgcaagtcacacagccaggaagcagcagagcaaggccttgaacctgggaccctgtgaggccagaatgcatgcactggcccctactgtcaactgcccctgccatccaggggcttgcagtgtcctgggggtgataaacccacctgctaggcactctctcctgacacccactttcctgcccacctgcacataacgctacccatttcccttcattttgcaggatcaccgaccctcatggcttccctcaacagcaggttccaccctaggtttctgaggtctgccactgccctcccagcctcctgagacattaggttggcttttttccttcctgggcatccatcctgctgctcctccttgtttttgtcatcatcaggccctgggccaagggtgttttgcccactacctcatgacacccttaaagctagattgaggtactactgtacaccctccttgtacacttgaggaaacagactcggagaagggaagtgacttgcctgagatctctgacccagctctgccactgcctccactaatgaccttggcccgggctcttctctctctggtcctcagtgttcccatttcacaggacaggattggactagatgtactctgagggtgccccagccctgatgttctgtgggtctgcattctcagtcacatcatctctctgggccttgttccagcattcacctaagtaatggggtgggtgggggggtgagaaacatctgtccagtgctgccctgtctggctcccaggacaggtagcctgtgtgtaaaaagcactccacacatgtctgagacgggaagtcctctggcatgtacctgggatcaatgtctatccctcacactctgagccccatgaccttgtgccagtcacttcacctttctgggtctcccatttcctcatctggacaatgggagttacagcacctgcctcatggtctcaaaacattgccctgaaaagtaaagatgtgaacagagagaaatctaccagtgcaaggacccccaccgcacatcctatcacctatttccagtgaggaaactgaggaccaggcagaggaaattccttatttaatgtcaagttctcaagtgccctgggttccaattctggatgactccatattacagtgttctttattttcaaactagcatcgtagaaaagatccaagactgtaaaacagtgtagacattgaatataattttgcattgctctgagacaccttaaaaatatcctggaaatgctaacacatcagcatccacattggaaatggaatctcatgcctgaaagtgatataacagtttttttttttttgccaggccagctgccccagtttgcagttcagcctatgcagtcagtgtgtaaatactctgtaaatgcaatgcctacatatttttttaaaaataaattatcatttgaaaaacaatttaaaatgaaaacatcactatcttggggaaattacccctatagcaaggacagaaacttgtaatcaggatcatgaagctatgaaaggccctactatcacctgatggtagcatgcttcacagaaatactagctcatcttttccagattgaggcagactgttaacgttggctttgaaaatgttagctaagaataatactatactaataatagcagttaatatatagcccacacaatgtgtcatgaactgttctaaactttttacttatgttatttaaaattcatcattattctccccattttacagatgaggacactgaggccagagaagttaaagaaa
